United States Patent Application Publication US 2017/0114356 A1 - sequence listing, part 116

SEQ ID NO: 215515 - DNA, 3286 bp, Zea Mays
acgaactgctggaccggagatggcctaaacatagggtttagaccgttgccgtccctactcccgcctagccgaccccactcgtcccagtcccagtcccagtccgccgcctggttccttcttgctcttccctccactctctacagacgcagattgacaaggaagagagagagaggccgaggggaggaggcgtcgtcgtcttcttctgaatgcctgaacttttatttggattccagatagtatggctgccaaaatggctggagctgtccaagtgctcaaggatgacactgttaaacgcacacccatggcacgacctagtaacggccgtgaaggaaagcccattaggttgctgtcgaaccacttctcagtgaagcttagaggagttgatgctgttttctaccaatacagtgtctgcatcaaatctgaggatgataaggtggttgatagcaagggtattggccgaaaggtcatagataaactattgcaaacatactgttctgagcttgatgggaaggattttgcatatgatggagagaaatgtctatttactgtgggacctcttccacagaataactttgagttcactgttatcttggaggaaacatcttcaagggctgctggtggaagtccagtgcatgaaagccctactcaagctaacaaaaagcgagtcaagcgatcacatctggcaaaaaagttcagtgtagacataagttatgccgcaaagattcctcttcagtcggttgctttggctcttcgaggaagcgagtcagaacatggtcaagatgttctgagagtccttgacgttgttttaaggcaacagcaggctaagagaggttgtctacttgttagacagtcatttttcagtgatgatagtcgaaaccttgttgatttaactggtggagttagtggttgtcgtggactccactctagtttccgtactacaattggtggtctttcactaaatatggatgtttcaaccactatggttgtaactcctggaccagttattgattttctcgtcacaaatcaaaatgtaagagacatcagagatattgactggcccagggccaagaaaatgcttaaaaatctcagagttaaagctaagcacaacaacatggagttcaagattattggccttagtgatcaaccatgctctagacagatgttcccaatgaaagttcgaaatggaaacatcgaaattaaatctgttgatatcactgttcaggattattttaaatccaagcaagttgagctaacaatgccttatctgccatgtcttgatgtgggaaaaccaaaacgccctaattatctcccaattgagttatgccacatggtatcacttcaacgttatacaaaggcactgtcttctcaacaaagggcaatgttggttgaaaagtcacgacagaaacctcaagaaagaatgcgagttgttacagatgctgtaaaaagtaatatgtatgatgatgatccaatcttatcttcatgtggtattgaaattgagaaacaacttactcgtgttgacgctcgtgttctctctgcaccagcgctagttgtgggcaacagtgaagattgcatcccaaacagggaggctattcgatccagtcaagattgagcgttgggccattgttaatttctctgctcgttgtgacatgagccgaatctcaagagaactgataaactgtggacgcagcaaaggcattttcattgaatgtcctcacagtttggtggatgaggacagccagtctaggagatgttcacctgtggaaagggttgaaaagatgtttgaaaaagtcaaagcaagccttcctggtcctccagagtttctcctttgtcttttaccagagaggaagaattgtgatatttacgggccatggaagaagaaaaatcttcatgaaatgggtattgtcactcaatgcattgctccaagtaataagatgaatgatcaatatttcaccaatgttcttctaaaaattaatgctaagcttggtggaatgaactccaaactggcactggaacatcgtcaaatgataccagttgtgactcaaataccaacattaattcttggcatggatgtttcacatggttctccaggtcgagcagatataccatcaattgctgcggttgttggatctagatgctggccattgatatcacggtacagagcatctgtgcgcacccagtctccaaaggtagagatgattgattctctatttaagccactggatgatgggaaggatgatggcataatgagggaacttctactagacttctaccaaaccagtcaacaaagaaagcctaagcagataatcatcttcagggatggtgttagcgagtctcagtttagccaagtactgaacgtagaacttaatcaaattataaaggcatatcagagtatgggacagggggaccttccgaagttcacagtgatcattgctcaaaagaatcaccacacaaaactcttccaagctgattcaccagagaacgttccacctgggactgttgtggactccggcatagttcatccaagacagtatgatttctacatgtgtgctcatgccggaccaattggtacttcaaggccaacccattaccatgtgttgcttgatgagattggcttctctgcagataatctccagaagctagttctttcactttcatatgtgtaccagaggagcaccactgcgatttctgtggtggcacctatctgttatgcccacctcgcagcagctcagatgggccagttcatgaaatttgaagagtttgcagatacgtcgtcagggagtgtcaattcatcatcgccaccatcaataccagaattgccacggctgcatgctgatgtctgcagttccatgttcttctgttgacgtgattttagtttgaccgttgtggggtagggccaattctttgtgaaaggaaccttaccttatatgttggcacacagcaggctaaccgtttttgtgaagaaaccatgtaggtcgttagttgtcgtatatcgcacgcgtgcatctttttggagcggttttcggctccccccacccacaggtggcggttccgttaggtacagtttccagattttaacgatgctaatacagtaaaagcagtttgtacattctacgcagattttgcagggatacgtggttagatgatctttttgttatgcccagaaatacgtgtgcattggggggttatgaaagtgagctaaatttctgtgcctcgcatggcatccaattgtactcggagattgtgtttgtgctcgatacgcttcctgccactgaaatgcgaaaatgac

SEQ ID NO: 215516 - DNA, 3299 bp, Zea Mays
cacttacacgaactgctggaccggagatggcctaaacatagggtttagaccgttgccgtccctactcccgcctagccgaccccactcgtcccagtcccagtcccagtccgccgcctggttccttcttgctcttccctccactctctacagacgcagattgacaaggaagagagagagaggccgaggggaggaggcgtcgtcgtcttcttctgaatgcctgaacatagtatggctgccaaaatggctggagctgtccaagtgctcaaggatgacactgttaaacgcacacccatggcacgacctagtaacggccgtgaaggaaagcccattaggttgctgtcgaaccacttctcagtgaagcttagaggagttgatgctgttttctaccaatacagtgtctgcatcaaatctgaggatgataaggtggttgatagcaagggtattggccgaaaggtcatagataaactattgcaaacatactgttctgagcttgatgggaaggattttgcatatgatggagagaaatgtctatttactgtgggacctcttccacagaataactttgagttcactgttatcttggaggaaacatcttcaagggctgctggtggaagtccagtgcatgaaagccctactcaagctaacaaaaagcgagtcaagcgatcacatctggcaaaaaagttcagtgtagacataagttatgccgcaaagattcctcttcagtcggttgctttggctcttcgaggaagcgagtcagaacatggtcaagatgttctgagagtccttgacgttgttttaaggcaacagcaggctaagagaggttgtctacttgttagacagtcatttttcagtgatgatagtcgaaaccttgttgatttaactggtggagttagtggttgtcgtggactccactctagtttccgtactacaattggtggtctttcactaaatatggatgtttcaaccactatggttgtaactcctggaccagttattgattttctcgtcacaaatcaaaatgtaagagacatcagagatattgactggcccagggccaagaaaatgcttaaaaatctcagagttaaagctaagcacaacaacatggagttcaagattattggccttagtgatcaaccatgctctagacagatgttcccaatgaaagttcgaaatggaaacatcgaaattaaatctgttgatatcactgttcaggattattttaaatccaagcaagttgagctaacaatgccttatctgccatgtcttgatgtgggaaaaccaaaacgccctaattatctcccaattgagttatgccacatggtatcacttcaacgttatacaaaggcactgtcttctcaacaaagggcaatgttggttgaaaagtcacgacagaaacctcaagaaagaatgcgagttgttacagatgctgtaaaaagtaatatgtatgatgatgatccaatcttatcttcatgtggtattgaaattgagaaacaacttactcgtgttgacgctcgtgttctctctgcaccagcgctagttgtgggcaacagtgaagattgcatcccaaacaggggtaggtggaactacaataataagaggctattcgatccagtcaagattgagcgttgggccattgttaatttctctgctcgttgtgacatgagccgaatctcaagagaactgataaactgtggacgcagcaaaggcattttcattgaatgtcctcacagtttggtggatgaggacagccagtctaggagatgttcacctgtggaaagggttgaaaagatgtttgaaaaagtcaaagcaagccttcctggtcctccagagtttctcctttgtcttttaccagagaggaagaattgtgatatttacgggccatggaagaagaaaaatcttcatgaaatgggtattgtcactcaatgcattgctccaagtaataagatgaatgatcaatatttcaccaatgttcttctaaaaattaatgctaagcttggtggaatgaactccaaactggcactggaacatcgtcaaatgataccagttgtgactcaaataccaacattaattcttggcatggatgtttcacatggttctccaggtcgagcagatataccatcaattgctgcggttgttggatctagatgctggccattgatatcacggtacagagcatctgtgcgcacccagtctccaaaggtagagatgattgattctctatttaagccactggatgatgggaaggatgatggcataatgagggaacttctactagacttctaccaaaccagtcaacaaagaaagcctaagcagataatcatcttcagggatggtgttagcgagtctcagtttagccaagtactgaacgtagaacttaatcaaattataaaggcatatcagagtatgggacagggggaccttccgaagttcacagtgatcattgctcaaaagaatcaccacacaaaactcttccaagctgattcaccagagaacgttccacctgggactgttgtggactccggcatagttcatccaagacagtatgatttctacatgtgtgctcatgccggaccaattggtacttcaaggccaacccattaccatgtgttgcttgatgagattggcttctctgcagataatctccagaagctagttctttcactttcatatgtgtaccagaggagcaccactgcgatttctgtggtggcacctatctgttatgcccacctcgcagcagctcagatgggccagttcatgaaatttgaagagtttgcagatacgtcgtcagggagtgtcaattcatcatcgccaccatcaataccagaattgccacggctgcatgctgatgtctgcagttccatgttcttctgttgacgtgattttagtttgaccgttgtggggtagggccaattctttgtgaaaggaaccttaccttatatgttggcacacagcaggctaaccgtttttgtgaagaaaccatgtaggtcgttagttgtcgtatatcgcacgcgtgcatctttttggagcggttttcggctccccccacccacaggtggcggttccgttaggtacagtttccagattttaacgatgctaatacagtaaaagcagtttgtacattctacgcagattttgcagggatacgtggttagatgatctttttgttatgcccagaaatacgtgtgcattggggggttatgaaagtgagctaaatttctgtgcctcgcatggcatccaattgtactcggagattgtgtttgtgctcgatacgcttcctgccactgaaatgcgaaaatgac

SEQ ID NO: 215517 - DNA, 2434 bp, Zea Mays
ctctcaacgaccccaaaaccatgcaacaccactcctaaaagaaactttgtccaccaagaatcaagatcaagactaggacagatcaaggttagaggcgatctagcaggcgtgcgtggagatcatcatcatcatggattctacaacggaagaggcctcgccatgtgtggagcggggattcgacgggcttccttatcctgggttctgggagcaggtgacgttgcgttccatggccatcgcggtggtgctcgccgccgtcttctctctggtcacgctgcgcatctacatgaccgttggggtggtaggcgcactcaacatgcccacgaacgtcctgagcttcttctccgtgaagagcctcgtctccctgcagcggcgctacggcatctctgctgcccccttcacgcggcaggagaacatcttcctccagacctgtgtcatcacctgcgttaacactgcaatctcaggtggtttgccaaattatattactgcaatgaacgctcaggtggcaacatctcttagagatgatccggataaagaagacattattgaccgcataccaacaggaaaatatgcgctgttccttttgcttactggtctggtggcgataacattgatgctgccactggcacaggttatgattgtcgactacagattgttgtttccaacaggctcggttgtggctcatcttatcaatagctttcacacgccgcaaggagcctatgcagcaaaattgcaggttgccgctatattcaaaacatttctgggaagcttttcttggtctatgttccagtggttcttcgctggaggcaacaattgtggatttcagtccttccccatctttggactagagctatacaagcgcaatagattctattttgatttctctgcatcgtttgttggtctgggtatgattgtccctcatgttgtaaactttgggttactttttggggccatcacctcttggggattattatatcctttccttcaaagtaaaagagggcaatggtatcacactgacagtcgtacaagtttgagtggaatgaatggatataagattttcattgccgtgacaatgattatcactgaagggatgtttaacttcattaaactccttacggtgagctcaattgacctatacaagaagaggcaacaaaatgattcagggaagatcaaatacatgttgacaagccccagccttagctatgatgatcgtagaaggcttgatgtgtttcttggtcagagaatcccgctccatgtgccggttgctggatatatcggatgtgcaatagtatgctcagtcgtcatcccttggatcttccaacacattaaactctaccacatggcccttctgttcaccattcttcccgttttcaccttctgcaacacgtacggaacaggactcacagactggtcagttgcacaatcttatggcaggttcatacagttcgtcatagcagcatgggttgccgtgcctggtgcggtcatcgctagccttgcagcctgtggggtgtctgttgcagctctgaatgtgtcttcacaagccatgcaagaccttaagactggctatatgacttcgacctccccgagagctgtagtggctgggcacatatatggtgtactgattggttctgttattatcccatccatttttcttgcatttgaggcgaacgccaaaagtactgcacccattggatccaaggattcagagtactcatgtccctctgcagcagtctatcgtgccattgggctacttgggaagcgaggagtgaaggagctcccagatcactgcatcaccctctgtttggttactttcttcatgacactagctattgaaacaattagattggtgtcccaaagaagaaactggaagctacacagtttcatcccatgcatgatagcaatagctctaccattccttgctgggccttacttcaccatcgatatgtgcctaggcagtgtcctgttaatcatatggaacaaaagaaataggccgcatgcagaattactgtcgtcagcagttgcagcaggcttaatatgtggagatggattgtgggttttgccgtcatcagtactcagcatcttcaatgtgcatccaccaatctgcatgaaatttctttccagtggaaaacaagtggatattgcagactcattcctaaatactttaggaccacatggaaggacatgacaaaactatagatactttaggaatttattgtaaaggatgcatatgtattctatcatgtagttcattttttttgttgggatacggctctgctatagcctaaggtcaatctcagggctgtggccagcagaccgtgtatatgactattcaaaacattgttttatattgtagataaaactagttatatagtgaaatttgaaatagtaaatatgatatgatagcttaagtactggccaggcaagacccaaagaaggc

SEQ ID NO: 215518 - DNA, 7438 bp, Zea Mays
ctccatctcaccacgcctagctagggcagccctcccccttcccgtacaccgacccgacaccaccaaccttcccatcccctcccccacacccccgccgccgcctcctcgtcggccggcggcgagggcgcgacgcctcatacccgcctcttccggtcctccggggggcccgccccgcgcgtgagagccccctcgcaacgggcttcgcctacgagctcgtgggttagggtttcatgcgcctcgccggccgccgatgtcgcaccccggaaagtttgtctccgtcaacctcaaccgatcctacggccagtccgctccctcatcacaccatggcggcggcggccgtccctcccgccctgccggcgccggttcctcagccggcggcggtatggtggtgctctctcgtccgcgcggagcctcctcccttgccaagccgcaagcgcccaagctctccgtcccgccgcctctcaatctaccgtcgctccgcaaggagcacgagagatttgacggctcggcggccgctgcggggggcggggtcgcctcggccccgcctcgatccggcgggcctgctgctggctggaccaagcccgcctcggcgtccgagaagcctcccggctccgcagcgcttcctggcggcgtccccaggccaccgtcatatgggtttgcggagaaagccggcgtcttgcgtggggaggacttcccgtccttgaaagcagctgttgccccgccaacacccccgcagcctgcgcagcggcagaaggatgctgatggggtccgggtcgtcacgccagaggcgcgaccaggatctcttgggatgcggccacaggtgacaacctcgcggaccactgagacgctggcctctggtgtcagcttgggacctggtggccgcacttccgctgagagggtgcagaagcctgatctggggccgcttccgatggtccggcttaggtatgattctgactgggctgatgacgagcgtgacacagggctgagccttccagagcgggacagcagggagaggggatttggcaggactgaggccatgcttccagggcgcgacctttatgtatcgatgagggatcccttcaaaaaggagatgtttgggagagatgtggctgcaacaaataaagaaggtgggcaggacaggctgtggcgatctcccgtgtcaaaccaacacgacagggagcgaacagatggtcgaccttacagtggtggcagaggaagcagtgggcaatcataccgagaaaacatagctgccagtggatccaaggatgtgtggagtaatggtaaggagcctcctatgagtgcctatggacagaatggggtggaagctgctagcgagcgttacggcgacagttcaaataattggcctaggttgaattctttccagaataatgttggttccaaagtgcagccctttggtggtaataaagggcctttaaataatgatccagtggcaaaatttggcagggagaagcggctgactggttcccctgcaaagcctttaatagatgatagtggttttgacagcatttctgccgttaacttgactgcaataaagaagaaaaaagaagcagctaaaccagctgattttcatgacccagcaagggagtcgtttgaggcagagcttgataggatcttgagggtacaggagcaggagagacaacgggtaatggaagaacaggaaagggccagagaagttgctcggaagcaagaagaggaacaggagaggatgatacgagaagaggaggagaggcaacggctggcggaggagcaggcaaagcaggcagcttggcaagctgagcaagagaggctagaagctgctagaagggctgaagagcagagaatcgcaagggaagaggaaagaaagaggatcgctatggaggaggagcggcgcagggaggcagcacatcagaagctcttagaattggaggcaagaattgctaaaagggaagcaaaaacaaacattgacagcacaagagctgtcaatgatgaatttattcctggagatgtcaaggacagagacctgtcacactctgctaactttggtgacagaaaggatattgacaaaatgaatgagcgcatcaatacctcaacaccattggaatcctctagtattaacaggttcagtgagacagttccaagggtgcgcactcttacagatggacgcccttcatttattgatagagaaactgcacactatagttcaaggcctgcatttccagaacaagagaatgtgcatcataggccacagcatgacccttttgcttcaaagaggggaaatttccccaagaaggatcttaatgatggatttgggagtgtttcggttaggcaatcttcaacaggccgaacaactgattcttcatgggcacttgaagatttccatcatgaaaaggttccacgatgggatgcgcctagggagattgaccgtttcagcaaacaatctgaatttgataatgagttttttaacagcgacaggtttggagatacagcttggctgcctagtagttctcatggaagcctcaatgctcaacaaggagataggatgtttcagagtcctgatgttaatgaattgtcttcttttaccagaccacgctactctatgaggcaaccacgtgttcccccacccccaattgtgacctctgtgcacagaagttcaattggtgcttcagcacaacgtttcaattcatcttttgtggatggtgggaacagagagtgttctggtagagatgatgtgcagattatgcagggtcagtacggaagtgtataccaagaggcatctcgccagcatgggatacgatctgaccacatttctgtcaatgagcaacaaattgtggacagaaaaagccctgtattgggttcacaatcttctctttctgtttcaagccctcctagctcacctccacatgtttcacatgatgagatggacgtatctggtgattctcctgtgttaccgacttctgctgatggtgaacatacggcgctctctgacaaccatcatgcagctctgactgtagatgcagacaatacaagcagaattgctgcctcaggagtgccccacttggaggaggatgaatggtcaagtgtaaacaatgatgataggcgaaaacaggatgaatatgatgaagacaatgatagctaccaggaagatgaaatgaatgaagctgatgatgagaacatagacttggatgatgagttcttagaggggcaggatacacccgtagaactggaaccagttatacttgggtttgatgagggcgtgcaggttgaaattccaccgaatagtcaacttgaattagcttctgtgaggagcacggaaaggacagttggagtacatctaaactcaggagttgcagagcaagagaatgtcagtggttcagttgtccattctgatcctgttactgaagcagagaaagcactgcaggcattgactcttgatggtgtaaatggcctgacagaagacagtaatggggagccatccaatagctcaaggacacctgcttcaagttcccagttacctcaggcatcttctgtgggtcctattttttcgtcagcttcaacagtagttgggcagaatgaagtacctgtcagcctccagtttggtttgtttacaggtcctcctctaataccaactccggttccagccattcaaattggttccatacagatgccaatccatctccacaatcagtttaacccatccctgcctcatatgcacccttcaacaacccctttgtatcaatttggccagttgaggtatgtacgtcctatcgctccgagtgttcgatcgctgccttctcaggccacccgccctgcacattcttccatatcagctcaacatacattgaatcagaatgtgtccagtgttctacctgagctaatggatggaggtacaaaccagaacatcccagctcaggcaagctcatccacctttatcaacaaatcagcagcacctacaaccaaggttccccttggcatggacaattcaaattcccagtatctcaatgctcctgcaaacaatcagatggctggtgtggacggatttagtagtcaagtggacagagagtttgctgagggtacaactccaagtgggaggaatcaaggtctctctttgaagaggaattacaggcctacgtccaacaatgtagaatcttctcaatatggtttggaggggagagccatgggtgatccaaaggctcttggtgttgtctctgatagaagggggaggagatatggatatgctgttaaagacattaacatgagatctactggctcaattgttgagccttctcataaggattccaaaggaggattccagagaagggctcgtaggaatgtaagacgaactgagtttagagttcgggaaaacatcgagaagaatcaaaatgaaacttctgaatcattttgccatggtgaacaagatgagataacaagctccaatggaacaagagatattccagcgagaaatactaatagaagggaacttgatatgagcaaggcatctaggataaatggagcaagtgatcagagtctctcgtttagaagtacacacaatgtcccttatgagagatctcatggtgggaacaagaagtctagaacgggtgctgttcctgatggagatactacctcattgcaagctggagctgtccgtgttgtgaagcagcaaggcattgaggtccctgttgatgcagatggcttcattgaagtaagatccaaaaggcagatcatgagtgtcaggagagagcagagggagaaagaaaacagatccaaaataaggatggcaaaggctccccgcaaacagcatagtatttccctacaaagctcagttggtcctagtgtgaataagcgagcagctccttctagtggagaagttacaaagaaagtttcttctggttccgccatcacagtagaaggaagaattgttgactatgctgaatcttcaattccattgatgggtgatacagcctccatgaacctcatagggccaccctcaaccaatgcagaaactcatacaaactgctttgccaatcagcctatccagatccaggcatcctctgacttggtcacctcgagtcctgcaaagcttgtgagtggcttatctgatggcgacaataaagggccatctattagtactccatttaacatggtttcctgggataattcacaaataaaccaacaggtcatgccattaactcaaactcaacttgaagaagctatgggaccagctaaatttgaacagcaggctgggcctggcttttcgttggagtccaacaatgctttgtctcccacagtaatcacagaaaaggtgttgccttcatctgctagtcctattaactcccttctggctggagagaagattcaatttggggcagtaacgtcaccaaccatgctacccccagtcagccgaactgtttcaagtggtcttggagctccaggttcatctaggcctgatatgaagatcgatcgaggcttgcctagcgataacagtggtcctgataaggcaaattccaaggaattatgtccgagtaccgaggatgcggaagcagaggctgaagcagctgcttctgctgtggctgtggcagctattagcactgatgagggatctccagctgatgcaactactgcatcggctccagacaagagctttacaagcaaggatctcagtgggttaacatcaggaggggcaagaacaggtcaagctggtcaatcatccacagaagagccactcgcagttgctcttcctgcagacttatcggttgatactccatccatgtccttgtggcctcctatagccagtccacaagcatcagggccaatgctttctcagtttcatggtgcacagccatcccacttttcctgctttgatatgaactcgatgttaggagggcacatttttgcatttggcccaagtgacgaatctgctggttctcaaggtcagcaccctcaaagaagcaatgcattgccttcagcaccattgggagcttggccacagtgtcattctggggtagactctttctaccgccctccaactgggtacgctggtcctttcatcactccgggaggaatcccaggcgtgcaagcccccccacatatggtggtctataaccacttcgccccagtaggtcaatttggtcagatgggacttggttttatgggagccacttatatccctggtgacaagcagcctgactggaagcaaagtcaagggccacctattgttggtgtaagccagagtgatccaaacagccaaaatatggtgtctggtcaagtaaacgctcctagtgttcctgctccagttccacatctacgcccaacttctatcatgccaatcccgtctccattgaccatgttcgacattgctcctttccagacatctacagacatacagatgcaaacgtgctggccacatatgcctgtacctcctctacactcagttccattatcagttgcacttaagcagcatccagtagagggtacagccacacaacagtttgttcataacgtgccaatagacaagtctggtacaaataaccgatttcaggagtcctctgcttctgctgggccatcagacggcaacaaaaccttcccaaatgcagccgtttctcagtacagggatgagttaggtcttgtcgaacagccagcctcaaccagctcaagctcccaaactgttcagccttcgtttggccaggcgggcttgatcagcaatgaagtcccaaccagtgccaaagccatggttagggtgaccccatccaaagtcaaccctggaattgcagcaggggcggctggcagcacgaacgccccccaggtcaccagcataccttccaagacccatcagtcctcgtcatcatcatcagacccgcaataccagcatctggttaacaatcaggatcgccgtgcccgtgcgactcagaaggctggtactggtaacgagtggcagcgacgatcagggtaccagggtaggaatcaaggttctggttccgacaggagttcaggcactggtaggatgaagcagatctacgttgcgaagccctctgcaacaagtggccatgcctcgtcaggctagagagtggtggtgctgacttcactgagcctgctccacgctggtacacagctcagagcatccttggcatcagacacatgtgaaacatattttcgctccatgtctgtctattctggtttgttttggtgattgtggcatggtgctggttgtgtatgtttttggttcattttgttgcatagaagaaaatagagtgtgctgttgcactgcaaaaagacattcgaagcgataccatatcatgcatgataaattttgcagccgatggaatcggctgcccgtgtaagtcactggtgtgatgtaaggattactattgtttattgttactatttgttggctggctcaacgtctggacaggcgaggaaatgtaacgtgggggggtatgttaat

SEQ ID NO: 215519 - DNA, 1950 bp, Zea Mays
tggataccttgatcttcctagaagttaggaacatataagtggtacactctgcttattgatttgtttgtgttttctcatggctggtttcatggtgtcactgagctgctctgtttttgaacccaaggcttagaagaacaaacaacacatgttcatggtagtaaggaagctagcctaaaatctggttcaaaccttgcatgcaacactcatgatgggataaatgaccactctggcacactaaagttgcaatcagctgggcaaagcacattgcttgaagtggatgagtacagtgaactgggaaacctttcctcagaagtatcagcaatatatcttgctatgcagcagtctaagttggagtgcattgatgaacagagtcaagattctacctcaacagaaggttatggtgaagctgaggagactgaagagtatgatgattttgacccctactcctttatcaaagatttacctgatttatctatggtggtccccaagtttcgtcctgttctccttccaaagcagacccggagttgtcctacgatgactcttgtacttgatcttgatggtatgaactattagctatatacacacttaaatagtcttcaatactgcatttaatagccttttatagccatttacacgagtatctgcaaccaaagctgcttattcatgttattcggttcaaaactgcagaatgtctgctgcctctacaatgcataagtttaaagcacgaatccatctatctaagactactaattagggaacaagcaagcactgatctaattttgttgtcttagtacaattttcttgcagctatgggctggtatgtgttataacaagataaactccagtgctccacatgttggctaaatctagcagaacagaaggcgatattatttttgcaggctgatgtatttgtacgatgaatatatcactatcatggtatttcagaactcagattcatcatggatgtagatcttggttatttatgtaaactagattgtttgctgtatggtagtaatctagcacttagtagtaccgaaacttccctagaaccatgctttggtccacaatgttggatttatttctctttctcttgtctaggttctattactactgccagtttgatataagttttaaagtatcattcatttcttatattgatgttaatttcatgtttgtcttgctacaatgtagagacacttgtacattcaactcttgaacactgtgaggatgctgatttcacatttccagttcattttaacttcagagagcacacaatatatgttcgatgccgcccctatctcaaggaattcttggatagggttgccagcgtgtttgagacaattattttcactgctagtcaaagcatttatgcggagcaacttctcaatgttcttgatcccaaaagaaagttgttccgtcatcgtgtttatcgtgaatcttgtgtctatgtggagggaaactacatgaaggatctgacagtacttggacgtgacttaactcgcgtaatgattgttgacaattctccgcaggcctttgggttccagttggacaatggcattcctatagaaagctggtttgatgatcccaatgacatggagctgctgaaattgctcccgttcttagaaagcttggtcggcgttgaagatgtcaggccttatatagcaaggaagttcaacctaagggagaaggtagccaccgcatcttctcttacaatagacatgcagatgtgatccgtccaatgctgccagcatgtcaggatctcctggctccttgcattattgtatgctctaccgaccgcaatgtacaattttcgctgcagttggcagttgtagacttcacttgcattttgttggcccagttgacatgggaagggcctacttgaacattttgtcgatcagttaatatcgtgttgattcatatattgtctgcgacatgtgtgaaagtcgaccg

SEQ ID NO: 215520 - DNA, 2442 bp, Zea Mays
atgggagagagcgtttccagtcgctgcgctgcgcgtcattctcctcccctccttccacccggcaaaaaccccgcgtcggccactctccggaggcgactagggtttcagcccctgggacacgccgccggtcgtggcacctccgccaccggatcccggtacccgagctacgccatcgccgccccgcccccggtcaccgccggtgcgcttccgccgacaccagacgcagctcgtccgccccgtcacgtgcacctctgcgtgggcgcgggattggatagggtttggggtttcggcggctggcgccaaatcccaccgctgctgctcgcgcaggaggtctcgagccctcggggttcccctactccgctccggctggagttctcgatgaaacttgttctacagtgttcttctgttgcatgactcagttgttttgagttatacttcataataacaatgcaaacacgaaaaaagggtgctgcaaaaaatgcagtggggtatcatgccaatcctaagacaagtaggccatccagaagggcaactcaatctacagttgctgaaaagaaagtatctgatctcatcacgtcttcttccaagaagcagagacctgttggtgtcacttccaagaagcattctaaaggaggaaggaagctgctagtttcatgtgatacaactgatgctggaaatgatgcacctcaggcccagcattctgatggtgttgcagatgatcgtcccaacgattccatattctctccaacataccatcatcacaaggaaggtggtgtgaataacctatccaaaggcttagaagaacaaacaacacatgttcatggtagtaaggaagctagcctaaaatctggttcaaaccttgcatgcaacactcatgatgggataaatgaccactctggcacactaaagttgcaatcagctgggcaaagcacattgcttgaagtggatgagtacagtgaactgggaaacctttcctcagaagtatcagcaatatatcttgctatgcagcagtctaagttggagtgcattgatgaacagagtcaagattctacctcaacagaaggttatggtgaagctgaggagactgaagagtatgatgattttgacccctactcctttatcaaagatttacctgatttatctatggtggtccccaagtttcgtcctgttctccttccaaagcagacccggagttgtcctacgatgactcttgtacttgatcttgatggtatgaactattagctatatacacacttaaatagtcttcaatactgcatttaatagccttttatagccatttacacgagtatctgcaaccaaagctgcttattcatgttattcggttcaaaactgcagaatgtctgctgcctctacaatgcataagtttaaagcacgaatccatctatctaagactactaattagggaacaagcaagcactgatctaattttgttgtcttagtacaattttcttgcagctatgggctggtatgtgttataacaagataaactccagtgctccacatgttggctaaatctagcagaacagaaggcgatattatttttgcaggctgatgtatttgtacgatgaatatatcactatcatgagacacttgtacattcaactcttgaacactgtgaggatgctgatttcacatttccagttcattttaacttcagagagcacacaatatatgttcgatgccgcccctatctcaaggaattcttggatagggttgccagcgtgtttgagacaattattttcactgctagtcaaagcatttatgcggagcaacttctcaatgttcttgatcccaaaagaaagttgttccgtcatcgtgtttatcgtgaatcttgtgtctatgtggagggaaactacatgaaggatctgacagtacttggacgtgacttaactcgcgtaatgattgttgacaattctccgcaggcctttgggttccagttggacaatggcattcctatagaaagctggtttgatgatcccaatgacatggagctgctgaaattgctcccgttcttagaaagcttggtcggcgttgaagatgtcaggccttatatagcaaggaagttcaacctaagggagaaggtagccaccgcatcttctcttacaatagacatgcagatgtgatccgtccaatgctgccaggtatttttcaggtgccaaaggtcgccgtgatgataaatgtaggaccggagctgatatagtggttcttgttgaatgtagcatgtcaggatctcctggctccttgcattattgtatgctctaccgaccgcaatgtacaattttcgctgcagttggcagttgtagacttcacttgcattttgttggcccagttgacatgggaagggcctacttgaacattttgtcgatcagttaatatcgtgttgattcatatattgtctgcgacatgtgtgaaagtcgaccg

SEQ ID NO: 215521 - DNA, 2589 bp, Zea Mays
atgggagagagcgtttccagtcgctgcgctgcgcgtcattctcctcccctccttccacccggcaaaaaccccgcgtcggccactctccggaggcgactagggtttcagcccctgggacacgccgccggtcgtggcacctccgccaccggatcccggtacccgagctacgccatcgccgccccgcccccggtcaccgccggtgcgcttccgccgacaccagacgcagctcgtccgccccgtcacgtgcacctctgcgtgggcgcgggattggatagggtttggggtttcggcggctggcgccaaatcccaccgctgctgctcgcgcaggaggtctcgagccctcggggttcccctactccgctccggctggagttctcgatgaaacttgttctacagtgttcttctgttgcatgactcagttgttttgagttatacttcataataacaatgcaaacacgaaaaaagggtgctgcaaaaaatgcagtggggtatcatgccaatcctaagacaagtaggccatccagaagggcaactcaatctacagttgctgaaaagaaagtatctgatctcatcacgtcttcttccaagaagcagagacctgttggtgtcacttccaagaagcattctaaaggaggaaggaagctgctagtttcatgtgatacaactgatgctggaaatgatgcacctcaggtaccccctagcgtcttccctgatctgcaggcccagcattctgatggtgttgcagatgatcgtcccaacgattccatattctctccaacataccatcatcacaaggaaggtggtgtgaataacctatccaaaggcttagaagaacaaacaacacatgttcatggtagtaaggaagctagcctaaaatctggttcaaaccttgcatgcaacactcatgatgggataaatgaccactctggcacactaaagttgcaatcagctgggcaaagcacattgcttgaagtggatgagtacagtgaactgggaaacctttcctcagaagtatcagcaatatatcttgctatgcagcagtctaagttggagtgcattgatgaacagagtcaagattctacctcaacagaaggttatggtgaagctgaggagactgaagagtatgatgattttgacccctactcctttatcaaagatttacctgatttatctatggtggtccccaagtttcgtcctgttctccttccaaagcagacccggagttgtcctacgatgactcttgtacttgatcttgatggtatgaactattagctatatacacacttaaatagtcttcaatactgcatttaatagccttttatagccatttacacgagtatctgcaaccaaagctgcttattcatgttattcggttcaaaactgcagaatgtctgctgcctctacaatgcataagtttaaagcacgaatccatctatctaagactactaattagggaacaagcaagcactgatctaattttgttgtcttagtacaattttcttgcagctatgggctggtatgtgttataacaagataaactccagtgctccacatgttggctaaatctagcagaacagaaggcgatattatttttgcaggctgatgtatttgtacgatgaatatatcactatcatggtatttcagaactcagattcatcatggatgtagatcttggttatttatgtaaactagattgtttgctgtatggtagtaatctagcacttagtagtaccgaaacttccctagaaccatgctttggtccacaatgttggatttatttctctttctcttgtctaggttctattactactgccagtttgatataagttttaaagtatcattcatttcttatattgatgttaatttcatgtttgtcttgctacaatgtagagacacttgtacattcaactcttgaacactgtgaggatgctgatttcacatttccagttcattttaacttcagagagcacacaatatatgttcgatgccgcccctatctcaaggaattcttggatagggttgccagcgtgtttgagacaattattttcactgctagtcaaagcatttatgcggagcaacttctcaatgttcttgatcccaaaagaaagttgttccgtcatcgtgtttatcgtgaatcttgtgtctatgtggagggaaactacatgaaggatctgacagtacttggacgtgacttaactcgcgtaatgattgttgacaattctccgcaggcctttgggttccagttggacaatggcattcctatagaaagctggtttgatgatcccaatgacatggagctgctgaaattgctcccgttcttagaaagcttggtcggcgttgaagatgtcaggccttatatagcaaggaagttcaacctaagggagaagcatgtcaggatctcctggctccttgcattattgtatgctctaccgaccgcaatgtacaattttcgctgcagttggcagttgtagacttcacttgcattttgttggcccagttgacatgggaagggcctacttgaacattttgtcgatcagttaatatcgtgttgattcatatattgtctgcgacatgtgtgaaagtcgaccg

SEQ ID NO: 215522 - DNA, 2637 bp, Zea Mays
atgggagagagcgtttccagtcgctgcgctgcgcgtcattctcctcccctccttccacccggcaaaaaccccgcgtcggccactctccggaggcgactagggtttcagcccctgggacacgccgccggtcgtggcacctccgccaccggatcccggtacccgagctacgccatcgccgccccgcccccggtcaccgccggtgcgcttccgccgacaccagacgcagctcgtccgccccgtcacgtgcacctctgcgtgggcgcgggattggatagggtttggggtttcggcggctggcgccaaatcccaccgctgctgctcgcgcaggaggtctcgagccctcggggttcccctactccgctccggctggagttctcgatgaaacttgttctacagtgttcttctgttgcatgactcagttgttttgagttatacttcataataacaatgcaaacacgaaaaaagggtgctgcaaaaaatgcagtggggtatcatgccaatcctaagacaagtaggccatccagaagggcaactcaatctacagttgctgaaaagaaagtatctgatctcatcacgtcttcttccaagaagcagagacctgttggtgtcacttccaagaagcattctaaaggaggaaggaagctgctagtttcatgtgatacaactgatgctggaaatgatgcacctcaggcccagcattctgatggtgttgcagatgatcgtcccaacgattccatattctctccaacataccatcatcacaaggaaggtggtgtgaataacctatccaaaggcttagaagaacaaacaacacatgttcatggtagtaaggaagctagcctaaaatctggttcaaaccttgcatgcaacactcatgatgggataaatgaccactctggcacactaaagttgcaatcagctgggcaaagcacattgcttgaagtggatgagtacagtgaactgggaaacctttcctcagaagtatcagcaatatatcttgctatgcagcagtctaagttggagtgcattgatgaacagagtcaagattctacctcaacagaaggttatggtgaagctgaggagactgaagagtatgatgattttgacccctactcctttatcaaagatttacctgatttatctatggtggtccccaagtttcgtcctgttctccttccaaagcagacccggagttgtcctacgatgactcttgtacttgatcttgatggtatgaactattagctatatacacacttaaatagtcttcaatactgcatttaatagccttttatagccatttacacgagtatctgcaaccaaagctgcttattcatgttattcggttcaaaactgcagaatgtctgctgcctctacaatgcataagtttaaagcacgaatccatctatctaagactactaattagggaacaagcaagcactgatctaattttgttgtcttagtacaattttcttgcagctatgggctggtatgtgttataacaagataaactccagtgctccacatgttggctaaatctagcagaacagaaggcgatattatttttgcaggctgatgtatttgtacgatgaatatatcactatcatggtatttcagaactcagattcatcatggatgtagatcttggttatttatgtaaactagattgtttgctgtatggtagtaatctagcacttagtagtaccgaaacttccctagaaccatgctttggtccacaatgttggatttatttctctttctcttgtctaggttctattactactgccagtttgatataagttttaaagtatcattcatttcttatattgatgttaatttcatgtttgtcttgctacaatgtagagacacttgtacattcaactcttgaacactgtgaggatgctgatttcacatttccagttcattttaacttcagagagcacacaatatatgttcgatgccgcccctatctcaaggaattcttggatagggttgccagcgtgtttgagacaattattttcactgctagtcaaagcatttatgcggagcaacttctcaatgttcttgatcccaaaagaaagttgttccgtcatcgtgtttatcgtgaatcttgtgtctatgtggagggaaactacatgaaggatctgacagtacttggacgtgacttaactcgcgtaatgattgttgacaattctccgcaggcctttgggttccagttggacaatggcattcctatagaaagctggtttgatgatcccaatgacatggagctgctgaaattgctcccgttcttagaaagcttggtcggcgttgaagatgtcaggccttatatagcaaggaagttcaacctaagggagaaggtatttttcaggtgccaaaggtcgccgtgatgataaatgtaggaccggagctgatatagtggttcttgttgaatgtagcatgtcaggatctcctggctccttgcattattgtatgctctaccgaccgcaatgtacaattttcgctgcagttggcagttgtagacttcacttgcattttgttggcccagttgacatgggaagggcctacttgaacattttgtcgatcagttaatatcgtgttgattcatatattgtctgcgacatgtgtgaaagtcgaccg

SEQ ID NO: 215523 - DNA, 1622 bp, Zea Mays
atgggagagagcgtttccagtcgctgcgctgcgcgtcattctcctcccctccttccacccggcaaaaaccccgcgtcggccactctccggaggcgactagggtttcagcccctgggacacgccgccggtcgtggcacctccgccaccggatcccggtacccgagctacgccatcgccgccccgcccccggtcaccgccggtgcgcttccgccgacaccagacgcagctcgtccgccccgtcacgtgcacctctgcgtgggcgcgggattggatagggtttggggtttcggcggctggcgccaaatcccaccgctgctgctcgcgcaggaggtctcgagccctcggggttcccctactccgctccggctggagttctcgatgaaacttgttctacagtgttcttctgttgcatgactcagttgttttgagttatacttcataataacaatgcaaacacgaaaaaagggtgctgcaaaaaatgcagtggggtatcatgccaatcctaagacaagtaggccatccagaagggcaactcaatctacagttgctgaaaagaaagtatctgatctcatcacgtcttcttccaagaagcagagacctgttggtgtcacttccaagaagcattctaaaggaggaaggaagctgctagtttcatgtgatacaactgatgctggaaatgatgcacctcaggtaccccctagcgtcttccctgatctgcaggcccagcattctgatggtgttgcagatgatcgtcccaacgattccatattctctccaacataccatcatcacaaggaaggtggtgtgaataacctatccaaaggcttagaagaacaaacaacacatgttcatggtagtaaggaagctagcctaaaatctggttcaaaccttgcatgcaacactcatgatgggataaatgaccactctggcacactaaagttgcaatcagctgggcaaagcacattgcttgaagtggatgagtacagtgaactgggaaacctttcctcagaagtatcagcaatatatcttgctatgcagcagtctaagttggagtgcattgatgaacagagtcaagattctacctcaacagaaggttatggtgaagctgaggagactgaagagtatgatgattttgacccctactcctttatcaaagatttacctgatttatctatggtggtccccaagtttcgtcctgttctccttccaaagcagacccggagttgtcctacgatgactcttgtacttgatcttgatgagacacttgtacattcaactcttgaacactgtgaggatgctgatttcacatttccagttcattttaacttcagagagcacacaatatatgttcgatgccgcccctatctcaaggaattcttggatagggttgccagcgtgtttgagacaattattttcactgctagtcaaagcatttatgcggagcaacttctcaatgttcttgatcccaaaagaaagttgttccgtcatcgtgtttatcgtgaatcttgtgtctatgtggagggaaactacatgaaggatctgacagtacttggacgtgacttaactcgcgtaatgattgttgacaattctccgcaggatttaaatgtaaagccgctttcctc

SEQ ID NO: 215524 - DNA, 2224 bp, Zea Mays
atgggagagagcgtttccagtcgctgcgctgcgcgtcattctcctcccctccttccacccggcaaaaaccccgcgtcggccactctccggaggcgactagggtttcagcccctgggacacgccgccggtcgtggcacctccgccaccggatcccggtacccgagctacgccatcgccgccccgcccccggtcaccgccggtgcgcttccgccgacaccagacgcagctcgtccgccccgtcacgtgcacctctgcgtgggcgcgggattggatagggtttggggtttcggcggctggcgccaaatcccaccgctgctgctcgcgcaggaggtctcgagccctcggggttcccctactccgctccggctggagttctcgatgaaacttgttctacagtgttcttctgttgcatgactcagttgttttgagttatacttcataataacaatgcaaacacgaaaaaagggtgctgcaaaaaatgcagtggggtatcatgccaatcctaagacaagtaggccatccagaagggcaactcaatctacagttgctgaaaagaaagtatctgatctcatcacgtcttcttccaagaagcagagacctgttggtgtcacttccaagaagcattctaaaggaggaaggaagctgctagtttcatgtgatacaactgatgctggaaatgatgcacctcaggcccagcattctgatggtgttgcagatgatcgtcccaacgattccatattctctccaacataccatcatcacaaggaaggtggtgtgaataacctatccaaaggcttagaagaacaaacaacacatgttcatggtagtaaggaagctagcctaaaatctggttcaaaccttgcatgcaacactcatgatgggataaatgaccactctggcacactaaagttgcaatcagctgggcaaagcacattgcttgaagtggatgagtacagtgaactgggaaacctttcctcagaagtatcagcaatatatcttgctatgcagcagtctaagttggagtgcattgatgaacagagtcaagattctacctcaacagaaggttatggtgaagctgaggagactgaagagtatgatgattttgacccctactcctttatcaaagatttacctgatttatctatggtggtccccaagtttcgtcctgttctccttccaaagcagacccggagttgtcctacgatgactcttgtacttgatcttgatggtatgaactattagctatatacacacttaaatagtcttcaatactgcatttaatagccttttatagccatttacacgagtatctgcaaccaaagctgcttattcatgttattcggttcaaaactgcagaatgtctgctgcctctacaatgcataagtttaaagcacgaatccatctatctaagactactaattagggaacaagcaagcactgatctaattttgttgtcttagtacaattttcttgcagctatgggctggtatgtgttataacaagataaactccagtgctccacatgttggctaaatctagcagaacagaaggcgatattatttttgcaggctgatgtatttgtacgatgaatatatcactatcatggtatttcagaactcagattcatcatggatgtagatcttggttatttatgtaaactagattgtttgctgtatggtagtaatctagcacttagtagtaccgaaacttccctagaaccatgctttggtccacaatgttggatttatttctctttctcttgtctaggttctattactactgccagtttgatataagttttaaagtatcattcatttcttatattgatgttaatttcatgtttgtcttgctacaatgtagagacacttgtacattcaactcttgaacactgtgaggatgctgatttcacatttccagttcattttaacttcagagagcacacaatatatgttcgatgccgcccctatctcaaggaattcttggatagggttgccagcgtgtttgagacaattattttcactgctagtcaaagcatttatgcggagcaacttctcaatgttcttgatcccaaaagaaagttgttccgtcatcgtgtttatcgtgaatcttgtgtctatgtggagggaaactacatgaaggatctgacagtacttggacgtgacttaactcgcgtaatgattgttgacaattctccgcaggatttaaatgtaaagccgctttcctc

SEQ ID NO: 215525 - DNA, 2623 bp, Zea Mays
cgaccggaaaaggacattgttcttttctgcgcccctactccacccgccgcctccgctcctcgccgccgcgcggcgcggcgacgtgcaatcttagggttcgtgagagggttcccgaatcctccttgccgtgcaccacaccgtccccctccaccgacgccgctgcttcccatgtcgctccgatccggcggccgccagctatctttcgagcttctcgcgggcgacctcaccgccgacgacccggacgacatctccccgcgctccctgcccgatacatcgtccgatgggcagcgccggcgcaggaggcggtctaagcgcaagcgtgggttccggagccccccgatccaggaggcggtttcggagggggagcagcagccgcgcgtggagggcggcggcaactcggccgcggcgttcagggtcctggatctgaagtcgactgcggagacggtgtgcgagagctcggacgcggaaaggtctgcggcgagctgcgtgacctatgttggcgtggagctgaggcagaggagcgtctccgggggcgggagggtggtggcagcgtccgcggatgatgggaccagcagctgcggaagcagcacgcgggagagcgccgcagctgctgcggctgtggcggatgtggcagccatggcgtggcggcctgaggcaaatggcggcatgaagaagaagctggagaaggagtcgtcgctggactgggagaagtacatgaaggacaataacaaaattctcggagaatttgagcgccttgacaaatcaccattcagatactttcttggggaactatatggtggcaattcactgagaagcacaattgcagtgggcaatgagaagaagcggcagcgggtgtacaacactatgtttcatgtcccatggagatgtgaacggctaattgtcgcaggattcttcgtctgcttggattcctttctgtcattgcttacaattatgcctgcacgaattgtcgttaccatctggcgggtgatgaagaccaggaagttccggcggccaaatgctgctgatttatcagattatggatgttttgtagttctagcccttggagttgcctctttgcaaatgatagatattagcttaatttaccatgtcattcgtggtcagggcacaatcaagctttatgtcgtatacaacgtactagagatctttgacaaactctgtcaatcattcggtgaggatgtgctgcaagttctgttcaactcagctgaggggttgtcagcatgctcgacagataatgtgacatttgaactgatgcggttcattttggatgaggctatagccgttgttgcatttgatatccttttctgcagattgcatcagttaattttcttgctagtcactgtaggttaagttagttgagttctaatctgtcagtagttaatttccctttaaatgttaggtgtaatttgaattagaactagataagatcatagacacctgactgcctaatgataaaggtcacacacagatctggtggtgaatctagtgattgcaatagcaaaattttcaattgaatatacagtggtatggatttgcttgacatcaatgagctctaattacattgtaaaatttaattgtattatcaatactgttgctattataatataaacatcgaattttgaatcccttaataagttatacttgtccattcatttgtcttgttagctcaggcgatcaccctgtcaacatgcattattgcccacaataatgcattattggctctactggtatcaaacaattttgctgagattaaaagtaatgtatttaagcgtgttagcaaagagaatcttcataatttggtatactatgacatcattgagcgatttcacatcatggcctttctgctatttgttcttgctcaaaatatcttggaagcagagggcccatggtttgacagctttcttattattttgaatgacaaacctgatgaccgtcagaaggacctaacattcatcccacttgccccagcttgtgttgtaattcgtgtattgaccccagtatatgctaccctccttcctgctggcccttttatctggagaatattctggattttactttggtcagttctgacctattttatgctcgccatattcaagataatcgtgggattgatactgcgctgccttgcaaattggtatgtaaatctacggctcacaagaaaacaacacgtggattgagtacatggcaccacaattctgctgctatcgttacatctgtgagtagaaattttgctgtggtgcatgaagtgcagcaagcactgcagctgctgagagttatatgacagaagtattcatagtatagtacagcgcagatgaatattatagtctcttcttccaagggttttgtcgattcgaggaacagattagtcaaattttgtggtgtttagacttctgacctccgtttgtgcatagctcagcttcatccaaaactatctgctgtcacctaaccaagatgttctggtctgtgatgtaagacatgtttatacattttttttaaaaaagaaacaaactgtactttcgtgttcagcagaagctcgataaggttgttcgcgttgcgtctgtttttgtgtgctattccctggtgcatgtcttccagataagatatg

SEQ ID NO: 215526 - DNA, 2733 bp, Zea Mays
cgaccggaaaaggacattgttcttttctgcgcccctactccacccgccgcctccgctcctcgccgccgcgcggcgcggcgacgtgcaatcttagggttcgtgagagggttcccgaatcctccttgccgtgcaccacaccgtccccctccaccgacgccgctgcttcccatgtcgctccgatccggcggccgccagctatctttcgagcttctcgcgggcgacctcaccgccgacgacccggacgacatctccccgcgctccctgcccgatacatcgtccgatgggcagcgccggcgcaggaggcggtctaagcgcaagcgtgggttccggagccccccgatccaggaggcggtttcggagggggagcagcagccgcgcgtggagggcggcggcaactcggccgcggcgttcagggtcctggatctgaagtcgactgcggagacggtgtgcgagagctcggacgcggaaaggtctgcggcgagctgcgtgacctatgttggcgtggagctgaggcagaggagcgtctccgggggcgggagggtggtggcagcgtccgcggatgatgggaccagcagctgcggaagcagcacgcgggagagcgccgcagctgctgcggctgtggcggatgtggcagccatggcgtggcggcctgaggcaaatggcggcatgaagaagaagctggagaaggagtcgtcgctggactgggagaagtacatgaaggacaataacaaaattctcggagaatttgagcgccttgacaaatcaccattcagatactttcttggggaactatatggtggcaattcactgagaagcacaattgcagtgggcaatgagaagaagcggcagcgggtgtacaacactatgtttcatgtcccatggagatgtgaacgggattcttcgtctgcttggattcctttctgtcattgcttacaattatgcctgcacgaattgtcgttaccatctggcgggtgatgaagaccaggaagttccggcggccaaatgctgctgatttatcagattatggatgttttgtagttctagcccttggagttgcctctttgcaaatgatagatattagcttaatttaccatgtcattcgtggtcagggcacaatcaagctttatgtcgtatacaacgtactagagatctttgacaaactctgtcaatcattcggtgaggatgtgctgcaagttctgttcaactcagctgaggggttgtcagcatgctcgacagataatgtgacatttgaactgatgcggttcattttggatgaggctatagccgttgttgcatttgatatccttttctgcagattgcatcagttaattttcttgctagtcactgtaggttaagttagttgagttctaatctgtcagtagttaatttccctttaaatgttaggtgtaatttgaattagaactagataagatcatagacacctgactgcctaatgataaaggtcacacacagatctggtggtgaatctagtgattgcaatagcaaaattttcaattgaatatacagtggtatggatttgcttgacatcaatgagctctaattacattgtaaaatttaattgtattatcaatactgttgctattataatataaacatcgaattttgaatcccttaataagttatacttgtccattcatttgtcttgttagctcaggcgatcaccctgtcaacatgcattattgcccacaataatgcattattggctctactggtatcaaacaattttgctgagattaaaagtaatgtatttaagcgtgttagcaaagagaatcttcataatttggtatactatgacatcattgagcgatttcacatcatggcctttctgctatttgttcttgctcaaaatatcttggaagcagagggcccatggtttgacagctttcttattaatgcgtcattggtttttttgtgtgaagtacttatcgatgctatcaaacattctttccttgcaaaatttaatgagataaagccagttgcatattcagaatttttggaagatctttgcaagcagattttgaatgacaaacctgatgaccgtcagaaggacctaacattcatcccacttgccccagcttgtgttgtaattcgtgtattgaccccagtatatgctaccctccttcctgctggcccttttatctggagaatattctggattttactttggtcagttctgacctattttatgctcgccatattcaagataatcgtgggattgatactgcgctgccttgcaaattggtatgtaaatctacggctcacaagaaaacaacacgtggattgagtacatggcaccacaattctgctgctatcgttacatctgtgagtagaaattttgctgtggtgcatgaagtgcagcaagcactgcagctgctgagagttatatgacagaagtattcatagtatagtacagcgcagatgaatattatagtctcttcttccaagggttttgtcgattcgaggaacagattagtcaaattttgtggtgtttagacttctgacctccgtttgtgcatagctcagcttcatccaaaactatctgctgtcacctaaccaagatgttctggtctgtgatgtaagacatgtttatacattttttttaaaaaagaaacaaactgtactttcgtgttcagcagaagctcgataaggttgttcgcgttgcgtctgtttttgtgtgctattccctggtgcatgtcttccagataagatatg

SEQ ID NO: 215527 - DNA, 2610 bp, Zea Mays
cgaccggaaaaggacattgttcttttctgcgcccctactccacccgccgcctccgctcctcgccgccgcgcggcgcggcgacgtgcaatcttagggttcgtgagagggttcccgaatcctccttgccgtgcaccacaccgtccccctccaccgacgccgctgcttcccatgtcgctccgatccggcggccgccagctatctttcgagcttctcgcgggcgacctcaccgccgacgacccggacgacatctccccgcgctccctgcccgatacatcgtccgatgggcagcgccggcgcaggaggcggtctaagcgcaagcgtgggttccggagccccccgatccaggaggcggtttcggagggggagcagcagccgcgcgtggagggcggcggcaactcggccgcggcgttcagggtcctggatctgaagtcgactgcggagacggtgtgcgagagctcggacgcggaaaggtctgcggcgagctgcgtgacctatgttggcgtggagctgaggcagaggagcgtctccgggggcgggagggtggtggcagcgtccgcggatgatgggaccagcagctgcggaagcagcacgcgggagagcgccgcagctgctgcggctgtggcggatgtggcagccatggcgtggcggcctgaggcaaatggcggcatgaagaagaagctggagaaggagtcgtcgctggactgggagaagtacatgaaggacaataacaaaattctcggagaatttgagcgccttgacaaatcaccattcagatactttcttggggaactatatggtggcaattcactgagaagcacaattgcagtgggcaatgagaagaagcggcagcgggtgtacaacactatgtttcatgtcccatggagatgtgaacgggattcttcgtctgcttggattcctttctgtcattgcttacaattatgcctgcacgaattgtcgttaccatctggcgggtgatgaagaccaggaagttccggcggccaaatgctgctgatttatcagattatggatgttttgtagttctagcccttggagttgcctctttgcaaatgatagatattagcttaatttaccatgtcattcgtggtcagggcacaatcaagctttatgtcgtatacaacgtactagagatctttgacaaactctgtcaatcattcggtgaggatgtgctgcaagttctgttcaactcagctgaggggttgtcagcatgctcgacagataatgtgacatttgaactgatgcggttcattttggatgaggctatagccgttgttgcatttgatatccttttctgcagattgcatcagttaattttcttgctagtcactgtaggttaagttagttgagttctaatctgtcagtagttaatttccctttaaatgttaggtgtaatttgaattagaactagataagatcatagacacctgactgcctaatgataaaggtcacacacagatctggtggtgaatctagtgattgcaatagcaaaattttcaattgaatatacagtggtatggatttgcttgacatcaatgagctctaattacattgtaaaatttaattgtattatcaatactgttgctattataatataaacatcgaattttgaatcccttaataagttatacttgtccattcatttgtcttgttagctcaggcgatcaccctgtcaacatgcattattgcccacaataatgcattattggctctactggtatcaaacaattttgctgagattaaaagtaatgtatttaagcgtgttagcaaagagaatcttcataatttggtatactatgacatcattgagcgatttcacatcatggcctttctgctatttgttcttgctcaaaatatcttggaagcagagggcccatggtttgacagctttcttattattttgaatgacaaacctgatgaccgtcagaaggacctaacattcatcccacttgccccagcttgtgttgtaattcgtgtattgaccccagtatatgctaccctccttcctgctggcccttttatctggagaatattctggattttactttggtcagttctgacctattttatgctcgccatattcaagataatcgtgggattgatactgcgctgccttgcaaattggtatgtaaatctacggctcacaagaaaacaacacgtggattgagtacatggcaccacaattctgctgctatcgttacatctgtgagtagaaattttgctgtggtgcatgaagtgcagcaagcactgcagctgctgagagttatatgacagaagtattcatagtatagtacagcgcagatgaatattatagtctcttcttccaagggttttgtcgattcgaggaacagattagtcaaattttgtggtgtttagacttctgacctccgtttgtgcatagctcagcttcatccaaaactatctgctgtcacctaaccaagatgttctggtctgtgatgtaagacatgtttatacattttttttaaaaaagaaacaaactgtactttcgtgttcagcagaagctcgataaggttgttcgcgttgcgtctgtttttgtgtgctattccctggtgcatgtcttccagataagatatg

SEQ ID NO: 215528 - DNA, 2746 bp, Zea Mays
cgaccggaaaaggacattgttcttttctgcgcccctactccacccgccgcctccgctcctcgccgccgcgcggcgcggcgacgtgcaatcttagggttcgtgagagggttcccgaatcctccttgccgtgcaccacaccgtccccctccaccgacgccgctgcttcccatgtcgctccgatccggcggccgccagctatctttcgagcttctcgcgggcgacctcaccgccgacgacccggacgacatctccccgcgctccctgcccgatacatcgtccgatgggcagcgccggcgcaggaggcggtctaagcgcaagcgtgggttccggagccccccgatccaggaggcggtttcggagggggagcagcagccgcgcgtggagggcggcggcaactcggccgcggcgttcagggtcctggatctgaagtcgactgcggagacggtgtgcgagagctcggacgcggaaaggtctgcggcgagctgcgtgacctatgttggcgtggagctgaggcagaggagcgtctccgggggcgggagggtggtggcagcgtccgcggatgatgggaccagcagctgcggaagcagcacgcgggagagcgccgcagctgctgcggctgtggcggatgtggcagccatggcgtggcggcctgaggcaaatggcggcatgaagaagaagctggagaaggagtcgtcgctggactgggagaagtacatgaaggacaataacaaaattctcggagaatttgagcgccttgacaaatcaccattcagatactttcttggggaactatatggtggcaattcactgagaagcacaattgcagtgggcaatgagaagaagcggcagcgggtgtacaacactatgtttcatgtcccatggagatgtgaacggctaattgtcgcaggattcttcgtctgcttggattcctttctgtcattgcttacaattatgcctgcacgaattgtcgttaccatctggcgggtgatgaagaccaggaagttccggcggccaaatgctgctgatttatcagattatggatgttttgtagttctagcccttggagttgcctctttgcaaatgatagatattagcttaatttaccatgtcattcgtggtcagggcacaatcaagctttatgtcgtatacaacgtactagagatctttgacaaactctgtcaatcattcggtgaggatgtgctgcaagttctgttcaactcagctgaggggttgtcagcatgctcgacagataatgtgacatttgaactgatgcggttcattttggatgaggctatagccgttgttgcatttgatatccttttctgcagattgcatcagttaattttcttgctagtcactgtaggttaagttagttgagttctaatctgtcagtagttaatttccctttaaatgttaggtgtaatttgaattagaactagataagatcatagacacctgactgcctaatgataaaggtcacacacagatctggtggtgaatctagtgattgcaatagcaaaattttcaattgaatatacagtggtatggatttgcttgacatcaatgagctctaattacattgtaaaatttaattgtattatcaatactgttgctattataatataaacatcgaattttgaatcccttaataagttatacttgtccattcatttgtcttgttagctcaggcgatcaccctgtcaacatgcattattgcccacaataatgcattattggctctactggtatcaaacaattttgctgagattaaaagtaatgtatttaagcgtgttagcaaagagaatcttcataatttggtatactatgacatcattgagcgatttcacatcatggcctttctgctatttgttcttgctcaaaatatcttggaagcagagggcccatggtttgacagctttcttattaatgcgtcattggtttttttgtgtgaagtacttatcgatgctatcaaacattctttccttgcaaaatttaatgagataaagccagttgcatattcagaatttttggaagatctttgcaagcagattttgaatgacaaacctgatgaccgtcagaaggacctaacattcatcccacttgccccagcttgtgttgtaattcgtgtattgaccccagtatatgctaccctccttcctgctggcccttttatctggagaatattctggattttactttggtcagttctgacctattttatgctcgccatattcaagataatcgtgggattgatactgcgctgccttgcaaattggtatgtaaatctacggctcacaagaaaacaacacgtggattgagtacatggcaccacaattctgctgctatcgttacatctgtgagtagaaattttgctgtggtgcatgaagtgcagcaagcactgcagctgctgagagttatatgacagaagtattcatagtatagtacagcgcagatgaatattatagtctcttcttccaagggttttgtcgattcgaggaacagattagtcaaattttgtggtgtttagacttctgacctccgtttgtgcatagctcagcttcatccaaaactatctgctgtcacctaaccaagatgttctggtctgtgatgtaagacatgtttatacattttttttaaaaaagaaacaaactgtactttcgtgttcagcagaagctcgataaggttgttcgcgttgcgtctgtttttgtgtgctattccctggtgcatgtcttccagataagatatg

SEQ ID NO: 215529 - DNA, 1665 bp, Zea Mays
tctcactgttcactaatttgagcgccttgacaaatcaccattcagatactttcttggggaactatatggtggcaattcactgagaagcacaattgcagtgggcaatgagaagaagcggcagcgggtgtacaacactatgtttcatgtcccatggagatgtgaacgggattcttcgtctgcttggattcctttctgtcattgcttacaattatgcctgcacgaattgtcgttaccatctggcgggtgatgaagaccaggaagttccggcggccaaatgctgctgatttatcagattatggatgttttgtagttctagcccttggagttgcctctttgcaaatgataggtcccccccccccaaccgttttttgttgaacaagtggccatcctacgtatttgttaatcggcctacgattgtttttttttggtgtcagatattagcttaatttaccatgtcattcgtggtcagggcacaatcaagctttatgtcgtatacaacgtactagagatctttgacaaactctgtcaatcattcggtgaggatgtgctgcaagttctgttcaactcagctgaggggttgtcagcatgctcgacagataatgtgacatttgaactgatgcggttcattttggatgaggctatagccgttgttgcatttgttgtccattcatttgtcttgttagctcaggcgatcaccctgtcaacatgcattattgcccacaataatgcattattggctctactggtatcaaacaattttgctgagattaaaagtaatgtatttaagcgtgttagcaaagagaatcttcataatttggtatactatgacatcattgagcgatttcacatcatggcctttctgctatttgttcttgctcaaaatatcttggaagcagagggcccatggtttgacagctttcttattccagttgcatattcagaatttttggaagatctttgcaagcagattttgaatgacaaacctgatgaccgtcagaaggacctaacattcatcccacttgccccagcttgtgttgtaattcgtgtattgaccccagtatatgctaccctccttcctgctggcccttttatctggagaatattctggattttactttggtcagttctgacctattttatgctcgccatattcaagataatcgtgggattgatactgcgctgccttgcaaattggtatgtaaatctacggctcacaagaaaacaacacgtggattgagtacatggcaccacaattctgctgctatcgttacatctgtgagtagaaattttgctgtggtgcatgaagtgcagcaagcactgcagctgctgagagttatatgacagaagtattcatagtatagtacagcgcagatgaatattatagtctcttcttccaagggttttgtcgattcgaggaacagattagtcaaattttgtggtgtttagacttctgacctccgtttgtgcatagctcagcttcatccaaaactatctgctgtcacctaaccaagatgttctggtctgtgatgtaagacatgtttatacattttttttaaaaaagaaacaaactgtactttcgtgttcagcagaagctcgataaggttgttcgcgttgcgtctgtttttgtgtgctattccctggtgcatgtcttccagataagatatg

SEQ ID NO: 215530 - DNA, 1440 bp, Zea Mays
ataacctgcttcgaagcaatactttgcaaaacaaggcaaaagaagttccggcggccaaatgctgctgatttatcagattatggatgttttgtagttctagcccttggagttgcctctttgcaaatgatagattagcttaatttaccatgtcattcgtggtcagggcacaatcaagctttatgtcgtatacaacgtactagagatctttgacaaactctgtcaatcattcggtgaggatgtgctgcaagttctgttcaactcagctgaggggttgtcagcatgctcgacagataatgtgacatttgaactgatgcggttcattttggatgaggctatagccgttgttgcatttgttgtccattcatttgtcttgttagctcaggcgatcaccctgtcaacatgcattattgcccacaataatgcattattggctctactggtatcaaacaattttgctgagattaaaagtaatgtatttaagcgtgttagcaaagagaatcttcataatttggtatactatgacatcattgagcgatttcacatcatggcctttctgctatttgttcttgctcaaaatatcttggaagcagagggcccatggtttgacagctttcttattaatgcgtcattggtttttttgtgtgaagtacttatcgatgctatcaaacattctttccttgcaaaatttaatgagataaagccagttgcatattcagaatttttggaagatctttgcaagcagattttgaatgacaaacctgatgaccgtcagaaggacctaacattcatcccacttgccccagcttgtgttgtaattcgtgtattgaccccagtatatgctaccctccttcctgctggcccttttatctggagaatattctggattttactttggtcagttctgacctattttatgctcgccatattcaagataatcgtgggattgatactgcgctgccttgcaaattggtatgtaaatctacggctcacaagaaaacaacacgtggattgagtacatggcaccacaattctgctgctatcgttacatctgtgagtagaaattttgctgtggtgcatgaagtgcagcaagcactgcagctgctgagagttatatgacagaagtattcatagtatagtacagcgcagatgaatattatagtctcttcttccaagggttttgtcgattcgaggaacagattagtcaaattttgtggtgtttagacttctgacctccgtttgtgcatagctcagcttcatccaaaactatctgctgtcacctaaccaagatgttctggtctgtgatgtaagacatgtttatacattttttttaaaaaagaaacaaactgtactttcgtgttcagcagaagctcgataaggttgttcgcgttgcgtctgtttttgtgtgctattccctggtgcatgtcttccagataagatatg

SEQ ID NO: 215531 - DNA, 967 bp, Zea Mays
acaaaaactgaaccatcttcaaacagctttgtgtacatttttatcaatacatcattgagcgatttcacatcatggcctttctgctatttgttcttgctcaaaatatcttggaagcagagggcccatggtttgacagctttcttattaatgcgtcattggtttttttgtgtgaagtacttatcgatgctatcaaacattctttccttgcaaaatttaatgagataaagccagttgcatattcagaatttttggaagatctttgcaagcagattttgaatgacaaacctgatgaccgtcagaaggacctaacattcatcccacttgccccagcttgtgttgtaattcgtgtattgaccccagtatatgctaccctccttcctgctggcccttttatctggagaatattctggattttactttggtcagttctgacctattttatgctcgccatattcaagataatcgtgggattgatactgcgctgccttgcaaattggtatgtaaatctacggctcacaagaaaacaacacgtggattgagtacatggcaccacaattctgctgctatcgttacatctgtgagtagaaattttgctgtggtgcatgaagtgcagcaagcactgcagctgctgagagttatatgacagaagtattcatagtatagtacagcgcagatgaatattatagtctcttcttccaagggttttgtcgattcgaggaacagattagtcaaattttgtggtgtttagacttctgacctccgtttgtgcatagctcagcttcatccaaaactatctgctgtcacctaaccaagatgttctggtctgtgatgtaagacatgtttatacattttttttaaaaaagaaacaaactgtactttcgtgttcagcagaagctcgataaggttgttcgcgttgcgtctgtttttgtgtgctattccctggtgcatgtcttccagataagatatg

SEQ ID NO: 215532 - DNA, 949 bp, Zea Mays
gcccacccctacatacaagggacatagaagacatcattgagcgatttcacatcatggcctttctgctatttgttcttgctcaaaatatcttggaagcagagggcccatggtttgacagctttcttattaatgcgtcattggtttttttgtgtgaagtacttatcgatgctatcaaacattctttccttgcaaaatttaatgagataaagccagttgcatattcagaatttttggaagatctttgcaagcagattttgaatgacaaacctgatgaccgtcagaaggacctaacattcatcccacttgccccagcttgtgttgtaattcgtgtattgaccccagtatatgctaccctccttcctgctggcccttttatctggagaatattctggattttactttggtcagttctgacctattttatgctcgccatattcaagataatcgtgggattgatactgcgctgccttgcaaattggtatgtaaatctacggctcacaagaaaacaacacgtggattgagtacatggcaccacaattctgctgctatcgttacatctgtgagtagaaattttgctgtggtgcatgaagtgcagcaagcactgcagctgctgagagttatatgacagaagtattcatagtatagtacagcgcagatgaatattatagtctcttcttccaagggttttgtcgattcgaggaacagattagtcaaattttgtggtgtttagacttctgacctccgtttgtgcatagctcagcttcatccaaaactatctgctgtcacctaaccaagatgttctggtctgtgatgtaagacatgtttatacattttttttaaaaaagaaacaaactgtactttcgtgttcagcagaagctcgataaggttgttcgcgttgcgtctgtttttgtgtgctattccctggtgcatgtcttccagataagatatg

SEQ ID NO: 215533 - DNA, 758 bp, Zea Mays
tgataaaataattgatagctaagcaataattaggtagctgttcatcttcaaaaataaaagattttgaatgacaaacctgatgaccgtcagaaggacctaacattcatcccacttgccccagcttgtgttgtaattcgtgtattgaccccagtatatgctaccctccttcctgctggcccttttatctggagaatattctggattttactttggtcagttctgacctattttatgctcgccatattcaagataatcgtgggattgatactgcgctgccttgcaaattggtatgtaaatctacggctcacaagaaaacaacacgtggattgagtacatggcaccacaattctgctgctatcgttacatctgtgagtagaaattttgctgtggtgcatgaagtgcagcaagcactgcagctgctgagagttatatgacagaagtattcatagtatagtacagcgcagatgaatattatagtctcttcttccaagggttttgtcgattcgaggaacagattagtcaaattttgtggtgtttagacttctgacctccgtttgtgcatagctcagcttcatccaaaactatctgctgtcacctaaccaagatgttctggtctgtgatgtaagacatgtttatacattttttttaaaaaagaaacaaactgtactttcgtgttcagcagaagctcgataaggttgttcgcgttgcgtctgtttttgtgtgctattccctggtgcatgtcttccagataagatatg

SEQ ID NO: 215534 - DNA, 2224 bp, Zea Mays
tgaatgcccaaggaagccactattgatataaagcttcctagaagaagtttgcttgttcaatttacatgcaatgcatgtggtgaaaggaccaagcgcttgataaatagagtagcctatgaaagagggacaatttttcttcagtgtgcagggtgccaggtgtaccacaagtttgttgataatcttggtctagttgttgagtatgatctacgagaggaaaatgtggtacaaggagaaaatgtgattgatactaattctgaagattgatctgttgtgagaagcagtgttggtatgcaaaacatcctgttgtagcctgttgtctgaatgtctgtaggttttgacaatattgattatttatataaaatgacattttagttgctgcatatactcatctgaatacatgggggcctagatgtattttatagtgtgatatatggttttatgaaggaaacaaaggatcacgatactagagtaccctgcatttccaaaaaagacctgtcattaatatgggaccaatacatttttagcagattattctggctcttgtgatatggtactaatatttgatatgcacactactttgcaccattattggcctgcatcattgagattttgatcaactggggcaattttgtagtcatcaccttcgctatccttggcatcacccttctttcccttgaggaaccgaataaggcccggtgtcgtcattcctcataagcacttctgagatctctgttggagtcagcatcacctccttaggtcaatgcttgtttaccagtacacgagaaaatggaagctggatgcttctttaccaatacaccagcatttacagaaccactaggagcaacagcagcatactatgtcaaaaaccaacatgagacgccggcatggtttggacttgaatggtctctcctactgttacgcgatgaaagtatgctatcaggatgaagaatgcatgactggaacaaggaaggaacgcagcttcatggagtggttagggtgggttccgtcaaatggtccagagtcttatattgcgctgccttcagatgtacatggaccagaaagaagtggtcgatgccctctcccaccactcgaagatagagccctgcattactgaacttgtttggcgacaacttgagcatcaaaatcctctgtttttcaaggcgtactatatgagactaatgcttaagaatcaaataatggtcttcaacaagcttcttcaggatcagtttgaggttatcaataaagaattttcttcagggatcccttctatgtcgcttcctaatggctctaactccaacctattgaagcaaaatccatgctttttgccagagactgctcctggatctgcaatgccagatggtataatgcacaatggaagttcgcgtggtataataaatggcacaccatctggcgatcaattgctcaatgctagtaaagacttgcatggccttcataatggaatagatgcttcgactagtctgcagtcagaccagaacgcagctgctgtgctgtatggtgtagacaacgagacaagtgcaacgataaagaccgagtcttgctattcgagcaatgctgattttgctttctgtgggaatactttcctggaatcgtgccagtcaataggcgatgcatctggtggtggatccttcagtagctcagagctgaacgggcaaccactaaacgattcaattctggatatggaatcatcgtcatttagcttcttgaaccaaatgccccaaagcttcatctttccggacttgggagacgatttcaaccaaagtgcagagataacacaatttctcaccccggaaacaaatttctccgattcgacagggggagaccatacagcaggttgagcggggtcatgcacagcgcaccaaccatttgtacatacgctcatgggcagtcaaacctgcactgatgaagagcttgaggaccttttgatctagctgtttcttttttctactcttctcgtcttatattgtggtagtttatgggttggtcttctggtatgccctgcgatggcgtcgttatcgtgccttgtacattgccgtgcttgtgtaagaaacattaggagcggcgttgttcgcgtcagcattgatttggctaattcctccgcttggcttggcttgtacaacgaattttatcaaaatattaactggattctgaaatcgagattttcgaccatcggtttgtgctattgtgtatgctgcttccaactatc

SEQ ID NO: 215535 - DNA, 1987 bp, Zea Mays
atgatgaaatttaagaagggaggatgttgtggcaaggcgtccaaagatgaaaatacaagaaaagataacatgatactattaggtaagagagaagcaaagcaagcaacaccggctgccgacgcgcaggtcagtacaatgagaggatcgatgttctgcggcggagatctccggtggtggatgttggccatcttcttcctctgcacactaattgctgccgcggaggagcgcgtcgtcacccatctccccggcttccagggaccactccccttccagctccgaactgggtacgtggaggtggacgaggacaatggcgtccgcctcttctactacttcaccctctccgagggctcctcagccgacgacccggtcatgctctggctcagcggcggccccggatgcacttccttcaccggcctcgtctatcagattggccctctcagtttcgaccttgacagctacatgggtggcctgcctaagctggtgtacagacctgagtcctggaccaaggtgagcaatatcatttttcttgattccccggttggagctggattttcatactctgtcaaagagcaaggatacaattcaagtgacacaaaagctgtcagccatattctggtctttctcaagaagtggtttgacgagcacccagagttcttgtcaaatccactttacattggcggtgattcatacgctggtatgattgtgcctaccgtcacttctgaaattgctaagggtttgaaaattgttggtagtaaacctacaatgaatctaaagggctgccttgttggaaatccattcacagatcaatcaaactttgatgggccatcgaaaattccatttgctcataggatggctctcatatctgaccaaatgtacaagtcatacaagaagagttgccgtggaggagacaacaggcaccaaagcatccagtgcagaaatagtcttgatgccatagatgagtgtgtcaaggatatatctgagtttcacgttctggagccccgctgtgcttatgcaagccctcaccaatacaatgttctcaagctgaagacgagtttaggtgttcagaagatgcagcagctaccagacttcactgcagaagggcttcacttgtctgagatttctacagagtgcagagtttgtgcctagatgagacaatgctatatacactgtctagaatatgggcaaacaatgccacagtgagggaggctcttgggattcacaagggaacagttcccctatggttaagatgcaacacggacataccgtatttgaaagatattaagagttcagtgaagtaccatttggatgtgaccaccaaaggatacaaaagtctagtttacagtggtgatcatgacatgggtgtaccttatattggcacacaatcctggattaggtcacttaatttctctattgtggatgactggagaccatggtatgttgatgggcaagttgcaggatatacagtgttgtactcaaataacctcacatttgcaacggtgaagggtgctgggcatactgctccagaatacatgccaaggcaatgccttgctatgctttcaaggtggcttgctggtgataccctttgattggcgcatagagatgcactgctacatagttgtatagactttatgtgtatgtaagtgagttacttgggactagttgtctggattgttgtgtctaggcttttcgtcgtttttccctttaataaaccgagcgattgtaatgttttcgggtctgttgtccctaataaaaatttggtcaattcttttgtacctacagtgaaatgcagaactctgcccttttaaaaaagagaggttctatacaattatggtaaactcatgtaatccttttgcaatcctttacagaacctccccgaaaaggattgcaagcataatattcgatcgaaggaaaaaaatcaaataaggttctgttgagcaccgaattgagcctgtggacggtccggccctgaggccggacggttcgcgcg

SEQ ID NO: 215536 - DNA, 3054 bp, Zea Mays
cttccctccaccggtcgctcctagcccggactaggcggcctcccagtctccaccgggccggggctgcccacccccaagtccccaactgcatccgcgccgccgccatccgtcgcagtcgcagtcgcactgctggctgcccgccgtaccgtaccaacaagcttcttctacttctcttcctcgcccagtctcccctccttccctaccatccccgcatttcgaaaggagctagctaagctagcgcaccggcctgcttcccttccctcccgccgtccgcgcttcttccatttcccttcgcaacggcctctcggtcacacccgagcccgtagctgcgccgtactccgtccgtccgtccgtgccacaccgccacccaccaggccagagccaaccgggagtggccacgcagagtggttttggcggcttgctggctagctctgcctctgcccgccacctcggaccagccagtgtccatgccgcggatggccaagctgctgctccagctgaaggcggcggcggacaggaggcacggccccggccccggccggcgccacccgctcgcgccccgccacgcggccgcgtccgccaccagattcgtgcccgcctgcctcgccctcgccgccgccgccaccacgctcgtcgcgctggcgctcacgctgcagaatcgcggcctcggccccgccgacccctctccctcctccgtctcgccacgcggcggcggcttcgcggtggttgtcaacacgtggaggcggcccgcgctgctgcggaggtccgtggcgcactacgcggcctgcgggggcgtggacgccgtccacgtggtgtggagcgagccgcggccgccgccggaacccctgcgccggggcgtcctcgggctcggcggcgcccggcggcgcgtgcggttcgagatcaacgcgggcgacagcctcaacaacaggttcaggcccatccgggcgctcgagtcggacgccgtcttctccgtcgacgacgacctcatcgtcccctgctccgcgctgcgcttcgccttctccgtctggcggaccgcgccctccgccatggtcggcttcgtgccgcggatgcactggcctaccgacccgagaagcactgaagatgcataccgatacggaagctggtggtcagtttggtggacagggacatacagcatggttctttccaaagcggggttcttccacaagaagtacctggaaatgtacaccaaccagatgccaccgtccattcgcagatatgtggatgagaacaggaactgtgaggacatcgccatggcttttcttgttgcaaatgctactggagccccgcctatatgggtgcaaggaaggatatttgagattggatcgagcggcatcagcagcctgaaaggccatggcttgcagagatcaaggtgcctcaacgcgttcgccgccatgtacggccacatgccgctcgtagccaccacagtcaaggccgtggacagccgcgggagctggttctggtgataaagatatgtgcctcttttttctgtacatcctagccttgcctctagtctacattgtttatatagcagagtttgaaaccagagataagaatgagtaggctagtgtgtctgtgcataattcatccgcaccttagaacacaggctatatagattttacagatggaactgagacgcagtgattatatccatattgctgttggagccttagtccaacatcaggatcagctaaggccctgtttggttcctttagttagtaggtaactatgtgcaaggagattgtttatgtatgtgagacagtaattattaattcaatgaatgaaatttatggtggtggtctgtctctctcctctattttgtgtggaggatcgactattttgtgtgcgcctggctgcctgccaagatcctgatgctgtccagttcagtgatcagtgggctaacttttatgtggctgtgacggccgaaacaggatagtgaggataaggggggcactctttcgttgggccagcgctgcatgcttccttgcttgcttttttgtcgcgcctgcttctcccccctctgcctcttggtgctgcttcctggtgggggaagggaaggagaaggctgtgtgcgtcctgcgccgataacgcgatggtgtccattgtcactgaggtatgggcgctcgctggatgcggcccggcgtccaaggcggcggcggtagcggtagcggcgcaggagttgccggcgcagcatccttctcctgccgcagcgggaggagggaaggccaagaagagagccgtgccagtgtcgttcagaggcgtcagcagcggcggtggtcaggaccaccagcgtgaggccgccgccgtcgtcgtcgggcggcggcgcggcctcgcgtcgtgcgcgctcgccgccgtcgccgcctcgttctccgcccgcgctgaccgccccgcgcgggcgcttgtcctcgaggaagacgacgacatcgagctgctggagcgcgtgaaggaggacaggaagaagcggctgcagaagcagggcatcatcagctcctccggcgccgagaccgggtatttgcaggacctcatctacaggctcagcaaagtcgggcaggccattgacaacgacgacctcccagccgcgagcagcgtgctgggaccaagctcagacgcccagtgggtgcagaacatcaatgcagctttctccaagctcagctcaagcccggagcagaggaacgtggtcgacagcttcaacagctcgctggccacactgtttacatcagtgagcaagctcgaccctgaatcctccaagtcggcgttcgtgtcgtccgcgacggcgttggagaaatggatcgcgttagctggactgggcggccagctcaagggctactgatgcgtgcgaggggaagagaagcactgggttgttctatgtttgggtccggcatttgtgaatctcctgaagagggtaccgtgaccgagaactgagttcagataggcatgctatgctcatcaagaaactgtgactgtttttgagactctgctgttacttacaagtggtaggaaacgaagttgtcttgtatcttgttgtccaaaaaaaga

SEQ ID NO: 215537 - DNA, 590 bp, Zea Mays
ctcgacccgatgaaatgctgcagtgcatcctcgcgctccacgtgtccccagccgtcttgtcgtcgttgcgtcttctctggtgctccttctcacgctccgccttagcctgccaccattgtcgtctcgctcgctgctcgccaacgccctgccttgccgacggttgtaggctcctccgctcgctccaccgtctccaccacatcctcgcgatctggcaccgtgtcccttccggttccgatttcggctatgattcattatctcagtatcggtgtctccaagtgcctcttcatgatgttttgcatcgacgagtgtgacagatggctggaatggctagagtaggagatgttgttgttggagaattatggttttctttgctatatgacccaattattcacaattcgaacaaaatcattatgccagcttctacgtacgaatcacacagtatttgtcagtcttattcaattcaattttacagctggaacaataacaatgaacaatcttatgcaggtatcttcggactcaagtcggcatcacagtagaccagaataatacgaaggttggtacagcgccgaaggtgtgagcaagaaagcttc

SEQ ID NO: 215538 - DNA, 432 bp, Zea Mays
ctcgacccgatgaaatgctgcagtgcatcctcgcgctccacgtgtccccagccgtcttgtcgtcgttgcgtcttctctggtgctccttctcacgctccgccttagcctgccaccattgtcgtctcgctcgctgctcgccaacgccctgccttgccgacggttgtaggctcctccgctcgctccaccgtctccaccacatcctcgcgatctggcaccgtgtcccttccggttccgatttcggctatgattcattatctcagtatcggtgtctccaagtgcctcttcatgatgttttgcatcgacgagtgtgacagatggctggaatggctagagtaggagatgttgttgttggagaattatggttttctttgctatatgacccaattattcacaattcgaacaaaatcattatgccagcttctacgtacactt

SEQ ID NO: 215539 - DNA, 2592 bp, Zea Mays
ctcgacccgatgaaatgctgcagtgcatcctcgcgctccacgtgtccccagccgtcttgtcgtcgttgcgtcttctctggtgctccttctcacgctccgccttagcctgccaccattgtcgtctcgctcgctgctcgccaacgccctgccttgccgacggttgtaggctcctccgctcgctccaccgtctccaccacatcctcgcgatctggcaccgtgtcccttccggttccgatttcggctatgattcattatctcagtatcggtgtctccaagtgcctcttcatgatgttttgcatcgacgagtgtgacagatggctggaatggctagagtaggagatgttgttgttggagaattatggttttctttgctatatgacccaattattcacaattcgaacaaaatcattatgccagcttctacgtacgaatcacacagtatttgtcagtcttattcaattcaattttacagctggaacaataacaatgaacaatcttatgcaggttacaaaacatcaaactccggctgatgcaacccacaacagttgatgaggaaattcaagtttgtcaatcgcctagcttcaaagacaagactgttgaagaactacttgatatagatccagacatattccctataaccactatgaaattctcttgtgttcgactaatttcatacatcaacaataagtttattctatttgcaatatcctttttttcttccactatacagccacaaggttacatatgcactatcactatctcactcctcgtacaagatagtggatggtggtttccatcttgcaccaagtgcaacaagtctttagctcagacctccactggataccgctacacaccatgcgactgggcagacattaaatttaggtagctctccacacaaacacttggtttatcatgcttcgtttggagaaaaaatatttttttatttcctacatacctaatcactgctataaagcactaacatttccaattcacagatacaaacttgacttcattggtaatgatggaacatccaaagcataattcttttgtttcgataatatagacaaacgaatactatgaaagccttatgaaacccttgttagaataacgaaagcctctcagggtcctctagtcgacctggccgccattgtattgcttaagtttacctttgcatttatcattaacatgtcagaattctctgtcacaaatagtcttttaagttctctctgtgttaacaaatcatggaagacaaagatcagtaccatctaccatgcttaattatccccaactagaattgctgacccaagacgacatatttggccttacaaccacacaggactctccaccgacatcgtttgctagactatccacttctaccaattaaaaaatgttgtaagaaattcctttttagtagcgtctgaaactacatgtgtagagcctgattccggtgcgcatcagagtacaaaggtaaatttggtataatagtgtatttaacttttgtaataatagcatatattataatctattcccccatatacatctttttgtaaaggaaaaatgagagaactactaaacttctactttaaaccagcaaaaatgatttgacagctcttatccacttaatcacagggtgatgagcaatatacaagtcagcttaaacaggacgaagtacatattacataggagattatttgggaaaaatacaaatagcaaatagcttgatattttatagctataacttatacttcataatgatgcaacaaagcacatacatgatatatacatgatcaaacctagccaacttcacaaactcctacccgcatatcccaaaaagaacaacggttagatcgtcatgaattgcatgaaggtatgacaccatctatgctccttaatcgcacagagcttatttacaatatagtttgcacattgtccttcgccctccattgtacccattacacaacaataaaataactgacacacactttaagtgcaacggatcttctctttttatttgtgtacaggtagctgtttttgcatacctatgaaggacatcgtcacttttgaatcaagaatgcttttgtatacatataacccaactgctgatgcctttctacctctgtatatgttcatgcgacccctctaattaactcttgacatacgctactttaatgctacttaatatgcattgtaatctcagtttacaactggtgtaagcgcttgaattatcgtctcaatttagtcgatagctgctgaaatacagtaagttgggtcttgcacttatgtatttatgtgctccataataactgctcttaatgtatatatgatcacttccaatgtatatatgatcgcgacacaatatctaattagacattgttggggaccttcggcttccgaaggtcctcaaaaacagaatttaacaatatttctggagtatgatgtgtgaacaggtatcttcggactcaagtcggcatcacagtagaccagaataatacgaaggttggtacagcgccgaaggtgtgagcaagaaagcttcggcgtggcagcgaaaagtgaaaccgacttaaagatgaaaaggctatttagacctcgaca

SEQ ID NO: 215540 - DNA, 663 bp, Zea Mays
cacatgcacagatgctcgacccgatgaaatgctgcagtgcatcctcgcgctccacgtgtccccagccgtcttgtcgtcgttgcgtcttctctggtgctccttctcacgctccgccttagcctgccaccattgtcgtctcgctcgctgctcgccaacgccctgccttgccgacggttgtaggctcctccgctcgctccaccgtctccaccacatcctcgcgatctggcaccgtgtcccttccggttccgatttcggctatgattcattatctcagtatcggtgtctccaagtgcctcttcatgatgttttgcatcgacgagtgtgacagatggctggaatggctagagtaggagatgttgttgttggagaattatggttttctttgctatatgacccaattattcacaattcgaacaaaatcattatgccagcttctacgtacgaatcacacagtatttgtcagtcttattcaattcaattttacagctggaacaataacaatgaacaatcttatgcaggtatcttcggactcaagtcggcatcacagtagaccagaataatacgaaggttggtacagcgccgaaggtgtgagcaagaaagcttcggcgtggcagcgaaaagtgaaaccgacttaaagatgaaaaggctatttagacctcgaca

SEQ ID NO: 215541 - DNA, 2957 bp, Zea Mays
ccacatgcacagatgctcgacccgatgaaatgctgcagtgcatcctcgcgctccacgtgtccccagccgtcttgtcgtcgttgcgtcttctctggtgctccttctcacgctccgccttagcctgccaccattgtcgtctcgctcgctgctcgccaacgccctgccttgccgacggttgtaggctcctccgctcgctccaccgtctccaccacatcctcgcgatctggcaccgtgtcccttccggttccgatttcggctatgattcattatctcagtatcggtgtctccaagtgcctcttcatgatgttttgcatcgacgagtgtgacagatggctggaatggctagagtaggagatgttgttgttggagaattatggttttctttgctatatgacccaattattcacaattcgaacaaaatcattatgccagcttctacgtacgaatcacacagtatttgtcagtcttattcaattcaattttacagctggaacaataacaatgaacaatcttatgcagttatactcgatatgtactcttagaattttgacatagagactgaaaaggaatctgaaccaacctagttactcatttaatgagacttttcatcattatacgtatattatcttgcttaacaatgtgtaaatattttaaggtaatcactaagccgtatgtaaggtccttgagtcatgttacctgtggcatgtatttttccttgcgttccttttttttgctcccaagacctgctcttctctgatattgtgttgatagttacctagctcatctaatactccaataatatcatttttcaaataaagctagaattatagaatttcatcaccattacttcttgcagacctcccataaaatattaaaagttcacagttctcttttccatggacaattaagcaaccactactgctccaactaataacattacatgaacatcattttttcacaactattgcagaggaaaaacagttgtgatttccaaaaggcttacataattgcactgagacttggtaccatctcattatagttgtcacgttatctataggttacaaaacatcaaactccggctgatgcaacccacaacagttgatgaggaaattcaagtttgtcaatcgcctagcttcaaagacaagactgttgaagaactacttgatatagatccagacatattccctataaccactatgaaattctcttgtgttcgactaatttcatacatcaacaataagtttattctatttgcaatatcctttttttcttccactatacagccacaaggttacatatgcactatcactatctcactcctcgtacaagatagtggatggtggtttccatcttgcaccaagtgcaacaagtctttagctcagacctccactggataccgctacacaccatgcgactgggcagacattaaatttaggtagctctccacacaaacacttggtttatcatgcttcgtttggagaaaaaatatttttttatttcctacatacctaatcactgctataaagcactaacatttccaattcacagatacaaacttgacttcattggtaatgatggaacatccaaagcataattcttttgtttcgataatatagacaaacgaatactatgaaagccttatgaaacccttgttagaataacgaaagcctctcagggtcctctagtcgacctggccgccattgtattgcttaagtttacctttgcatttatcattaacatgtcagaattctctgtcacaaatagtcttttaagttctctctgtgttaacaaatcatggaagacaaagatcagtaccatctaccatgcttaattatccccaactagaattgctgacccaagacgacatatttggccttacaaccacacaggactctccaccgacatcgtttgctagactatccacttctaccaattaaaaaatgttgtaagaaattcctttttagtagcgtctgaaactacatgtgtagagcctgattccggtgcgcatcagagtacaaaggtaaatttggtataatagtgtatttaacttttgtaataatagcatatattataatctattcccccatatacatctttttgtaaaggaaaaatgagagaactactaaacttctactttaaaccagcaaaaatgatttgacagctcttatccacttaatcacagggtgatgagcaatatacaagtcagcttaaacaggacgaagtacatattacataggagattatttgggaaaaatacaaatagcaaatagcttgatattttatagctataacttatacttcataatgatgcaacaaagcacatacatgatatatacatgatcaaacctagccaacttcacaaactcctacccgcatatcccaaaaagaacaacggttagatcgtcatgaattgcatgaaggtatgacaccatctatgctccttaatcgcacagagcttatttacaatatagtttgcacattgtccttcgccctccattgtacccattacacaacaataaaataactgacacacactttaagtgcaacggatcttctctttttatttgtgtacaggtagctgtttttgcatacctatgaaggacatcgtcacttttgaatcaagaatgcttttgtatacatataacccaactgctgatgcctttctacctctgtatatgttcatgcgacccctctaattaactcttgacatacgctactttaatgctacttaatatgcattgtaatctcagtttacaactggtgtaagcgcttgaattatcgtctcaatttagtcgatagctgctgaaatacagtatcttcggactcaagtcggcatcacagtagaccagaataatacgaaggttggtacagcgccgaaggtgtgagcaagaaagcttcggcgtggcagcgaaaagtgaaaccgacttaaagatgaaaaggctatttagacctcgaca

SEQ ID NO: 215542 - DNA, 1583 bp, Zea Mays
gaaaaaggttttatttctagtcatccgaaaaggctgtcagctaaattcttcggaacccccgttgccagccggcgatcgcgccgtgggatctcatcgaggcgacgacggcgatgtcaagggaggcggcgaggacgaggagccgggtcctggtggttggcgccaccggccgcctcggtggaagcatcgctcgggccagcctcgccgcgggtcaccccaccttcgcgctcgttcggccccaccacttcgcacgccccgattcccccgtgcttgggccgctcgtagccgccggcgccactctgctccaggggtcactggaagattactcgagcctgctcgaggcggtgtgtcaggtggacgttgtcatctgcgcggtgtccacgaagcaggtgctcgagcagaagcctctgattcgggctataaaggaagctggatgcgtgaagagatttattccggcagaatttggagcagatccaacaaaggttcaaatttgtggcatggattatggcttctatgagaagaaaattgaaatccgtcattcaatagagagtgaaggcattcctcatacttacatatgctgcaacttctttatgcgctatttgcttccttcactggtgcaacctgggctagatgctcctcctagagatgaaatcaaaatatttggtgaaggaaatactaaaggtgtttttgttaaagagaatgatgttgctaaatttacaatatgcaccatagaggatcccagaacattgaacaagacgttgtatctgagacctccaggaaatgtcttctcaatgaatgaattggctgacctctgggagtcaaaactcaagaaatccctgaaaaggttatatgtaacagaagagcaacttcttaaagaaatccatgatgctccatttcccttgaagatggatttaatctttatatattcagcgtttgttaagggtgaccacacgtattttgaaattgacttgtcaatggaaggaactcaactgtatccccatatggctggaatggctagagtaggagatgttgttgttggagaattatggttttctttgctatatgacccaattattcacaattcgaacaaaatcattatgccagcttctacgtacgaatcacacagtatttgtcagtcttattcaattcaattttacagctggaacaataacaatgaacaatcttatgcagtttacaactggtgtaagcgcttgaattatcgtctcaatttagtcgatagctgctgaaatacagtaagttgggtcttgcacttatgtatttatgtgctccataataactgctcttaatgtatatatgatcacttccaatgtatatatgatcgcgacacaatatctaattagacattgttggggaccttcggcttccgaaggtcctcaaaaacagaatttaacaatatttctggagtatgatgtgtgaacaggtatcttcggactcaagtcggcatcacagtagaccagaataatacgaaggttggtacagcgccgaaggtgtgagcaagaaagcttcggcgtggcagcgaaaagtgaaaccgacttaaagatgaaaaggctatttagacctcgaca

SEQ ID NO: 215543 - DNA, 427 bp, Zea Mays
gaccaattcaacatggttttacctctcactctggacctggatggatcaacagaagctggctactagttttattgggagcacaacatgatggcattcctttcatgctgttgggaagaaaaacgcttgttgacgattatgaatacatcatgcttggaaagcttttcaaggtctcaaaagacagtactaaagacgattatttatgtacggacatacaaaggcgaagggtaggcataatacagcggtgaaagttgtctcaccgagtcagaagcagcctctctgcatttgaagagaaaagtttatcacttttccagactttactcatggcctcacggggatcctccaacactaaatttgcttttttttatgaacatataaaggcaattgtgagctaccgcaggctgttttgtgtagacgaccttgcagttac

SEQ ID NO: 215544 - DNA, 2468 bp, Zea Mays
ctctgcactacccgaaacccacgcccaacggccgtttcccgcaccccctatccgggaaggaagaaagccagaactcacccctgcttcgtctggcggcgccgtttcccgcacgcgatgccgtcgacggcggaggatttcccggcgataaggaagctggggaagctcttccggcttaccgaagtgtacctctgggacgattcgtatggcgctggacctcacgatggacagaagaacgggcgctcggcggaggctgctctcgtggactctcatacagataaaacatgcaatgaagcatccaatagcactgacaaaggccatttctttgttgaagatttggaattggtcaatctcatgggttctttggggcttcctgtttcattcagcacaagtaaagtgaacaagaacacatgcaacaagggaaagaaaaaaggaagacaagcaccgctcaaagcagcaaacactcaaatcaatgatgctgtgaggatatgtatcaatactgaagatagagaaaattctgttgaatcattggatgctatggagcaaacgcactcatgcaatttatttgtgacaccactgggtcaaaatgaaccctcccgtgatgacactgacaagaggcttagggaagacagctcttgtgttgaagaacaagaagagtctggctgtagcaccatctactctgctggcaaagcccctggctgtgatgctaaaaatcatctcactgaacttggggcttttgagctttctgataacttggccaactcagcaaaagaagaatactcaattcaagaaaatcaagcttatgaaagtgtgttgctagattctgaagagatgtcaaggaatgactgtgttgatgatgaatctacacattcctgtgttggcatttatcaggatgaaagagtgtccacaaggggagatcaaacatctgaagaaactctatcagtaccccatgattacaatgatgttggcagagaagctagtctaagtttggcagagccatcatctattgatgagcatgcacaaagctctgccaacaacttttactatgactatggtgaatggagggttatctgggatccattctataatcggtattatttttacaacatccagacacaagagtccacatggtgtcctcctgaaggactggaggattttgcatcatattgtagcccagataccactaaagagctagctgaactgggatctcagtgttcaagcatggcaccacaagagaacaatctggctactcatgtcaatcatttagaagcacaggagcaagatcactgcattcatgatttatctgacattcctgttgaaaagccaatatatcaaagtatgataactacctctgacaaagcacagcacactgaaaataagtacagcgattcaacaactactgtgttagagatgaaccaggaagttgctagcaccaaaacgaaaaagagagtaaggagatctcgatcgtatcattcatgccaagacatggcagggaacgtctctaatgacatcatcaagtactgggctcagcggagttggtggaaatgccatccaatttgccaaaaagtgcaagcatgtaattgcagttgatattgatccacaaaagattgattgcgcgcatcataatgcatccatttatggagtaaatgatcacatagatttcattgtaggtgattttatacatatagctcctcatctgaagggagaaactgctttcatgtcgcctccttggggtggccctgactatgccaaagttgatgtttatgatatgaaaagcatgcttattccttgtgatgggtactctctttttaaactcggaaccatgatagcttcaagagtagtgatgtttcttcctcgcaacattgacctaaaccaattggcggacatgtccttgtctgtggatcccccgtgggcagttgaggtcgagaagaacttcctcaacggaaagctgaaagccataacagcttactttgaagaacaggatcgttgaaccaagcatcggcgctgaaagaagcggtttatcatcttcaccgagcatagataatttatttgcagagatgagtcattggtatcatacaaaagcagctcagcttatctcaattcacagcaagtgaaactgtcgaaggaaaactacaaggctgacagtcgaacgcgtgggagttagcttaattttgccttatgataagcaagcatgcttcctggtttatttcatacagctactagtagtttcagctgcaacagttgtgcgttggtgtgcgtgtgattctcacatatctggtcctgcggatgtgagtgatgcaaatgtatgtgtcatcatcccatgtaagggtttgtttgtttgctctcaatctatgtagattgagtgggattaagtgagtttaaatctcagacaagtcaaaaaaaaatgttttcaatctcatccaatccacatatgatagtaatacccgagtaaggcttagatgtaatagttg

SEQ ID NO: 215545 - DNA, 1722 bp, Zea Mays
cacgcccaacggccgtttcccgcaccccctatccgggaaggaagaaagccagaactcacccctgcttcgtctggcggcgccgtttcccgcacgcgatgccgtcgacggcggaggatttcccggcgataaggaagctggggaagctcttccggcttaccgaagtgtacctctgggacgattcgtatggcgctggacctcacgatggacagaagaacgggcgctcggcggaggctgctctcgtggactctcatacagataaaacatgcaatgaagcatccaatagcactgacaaagatctggctactcatgtcaatcatttagaagcacaggagcaagatcactgcattcatgatttatctgacattcctgttgaaaagccaatatatcaaagtatgataactacctctgacaaagcacagcacactgaaaataagtacagcgattcaacaactactgtgttagagatgaaccaggaagttgctagcaccaaaacgaaaaagagaatcattcatgccaagacatggcagggaacgtctctaatgacatcatcaagtactgggctcagcggtattcacttttctcactttttgatagtggtataaagatggatgaagtagggtggttttcagttacgccagagccaattgcaaagcatcatgcatctcgtgtgggtgcgggagtaatgattgattgtttcacaggagttggtggaaatgccatccaatttgccaaaaagtgcaagcatgtaattgcagttgatattgatccacaaaagattgattgcgcgcatcataatgcatccatttatggagtaaatgatcacatagatttcattgtaggtgattttatacatatagctcctcatctgaagggagaaactgctttcatgtcgcctccttggggtggccctgactatgccaaagttgatgtttatgatatgaaaagcatgcttattccttgtgatgggtactctctttttaaactcggaaccatgatagcttcaagagtagtgatgtttcttcctcgcaacattgacctaaaccaattggcggacatgtccttgtctgtggatcccccgtgggcagttgaggtcgagaagaacttcctcaacggaaagctgaaagccataacagcttactttgaagaacaggatcgttgaaccaagcatcggcgctggtgatacaaatcatcttgttagctatgactcacgacaaatttttgtggtgaccctaaacagaacctttgtgttcggagacagaaagaagcggtttatcatcttcaccgagcatagataatttatttgcagagatgagtcattggtatcatacaaaagcagctcagcttatctcaattcacagcaagtgaaactgtcgaaggaaaactacaaggctgacagtcgaacgcgtgggagttagcttaattttgccttatgataagcaagcatgcttcctggtttatttcatacagctactagtagtttcagctgcaacagttgtgcgttggtgtgcgtgtgattctcacatatctggtcctgcggatgtgagtgatgcaaatgtatgtgtcatcatcccatgtaagggtttgtttgtttgctctcaatctatgtagattgagtgggattaagtgagtttaaatctcagacaagtcaaaaaaaaatgttttcaatctcatccaatccacatatgatagtaatacccgagtaaggcttagatgtaatagttg

SEQ ID NO: 215546 - DNA, 2633 bp, Zea Mays
cacgcccaacggccgtttcccgcaccccctatccgggaaggaagaaagccagaactcacccctgcttcgtctggcggcgccgtttcccgcacgcgatgccgtcgacggcggaggatttcccggcgataaggaagctggggaagctcttccggcttaccgaagtgtacctctgggacgattcgtatggcgctggacctcacgatggacagaagaacgggcgctcggcggaggctgctctcgtggactctcatacagataaaacatgcaatgaagcatccaatagcactgacaaaggccatttctttgttgaagatttggaattggtcaatctcatgggttctttggggcttcctgtttcattcagcacaagtaaagtgaacaagaacacatgcaacaagggaaagaaaaaaggaagacaagcaccgctcaaagcagcaaacactcaaatcaatgatgctgtgaggatatgtatcaatactgaagatagagaaaattctgttgaatcattggatgctatggagcaaacgcactcatgcaatttatttgtgacaccactgggtcaaaatgaaccctcccgtgatgacactgacaagaggcttagggaagacagctcttgtgttgaagaacaagaagagtctggctgtagcaccatctactctgctggcaaagcccctggctgtgatgctaaaaatcatctcactgaacttggggcttttgagctttctgataacttggccaactcagcaaaagaagaatactcaattcaagaaaatcaagcttatgaaagtgtgttgctagattctgaagagatgtcaaggaatgactgtgttgatgatgaatctacacattcctgtgttggcatttatcaggatgaaagagtgtccacaaggggagatcaaacatctgaagaaactctatcagtaccccatgattacaatgatgttggcagagaagctagtctaagtttggcagagccatcatctattgatgagcatgcacaaagctctgccaacaacttttactatgactatggtgaatggagggttatctgggatccattctataatcggtattatttttacaacatccagacacaagagtccacatggtgtcctcctgaaggactggaggattttgcatcatattgtagcccagataccactaaagagctagctgaactgggatctcagtgttcaagcatggcaccacaagagaacaatctggctactcatgtcaatcatttagaagcacaggagcaagatcactgcattcatgatttatctgacattcctgttgaaaagccaatatatcaaagtatgataactacctctgacaaagcacagcacactgaaaataagtacagcgattcaacaactactgtgttagagatgaaccaggaagttgctagcaccaaaacgaaaaagagagtaaggagatctcgatcgtatcattcatgccaagacatggcagggaacgtctctaatgacatcatcaagtactgggctcagcggtattcacttttctcactttttgatagtggtataaagatggatgaagtagggtggttttcagttacgccagagccaattgcaaagcatcatgcatctcgtgtgggtgcgggagtaatgattgattgtttcacaggagttggtggaaatgccatccaatttgccaaaaagtgcaagcatgtaattgcagttgatattgatccacaaaagattgattgcgcgcatcataatgcatccatttatggagtaaatgatcacatagatttcattgtaggtgattttatacatatagctcctcatctgaagggagaaactgctttcatgtcgcctccttggggtggccctgactatgccaaagttgatgtttatgatatgaaaagcatgcttattccttgtgatggcttcaagagtagtgatgtttcttcctcgcaacattgacctaaaccaattggcggacatgtccttgtctgtggatcccccgtgggcagttgaggtcgagaagaacttcctcaacggaaagctgaaagccataacagcttactttgaagaacaggatcgttgaaccaagcatcggcgctggtgatacaaatcatcttgttagctatgactcacgacaaatttttgtggtgaccctaaacagaacctttgtgttcggagacagaaagaagcggtttatcatcttcaccgagcatagataatttatttgcagagatgagtcattggtatcatacaaaagcagctcagcttatctcaattcacagcaagtgaaactgtcgaaggaaaactacaaggctgacagtcgaacgcgtgggagttagcttaattttgccttatgataagcaagcatgcttcctggtttatttcatacagctactagtagtttcagctgcaacagttgtgcgttggtgtgcgtgtgattctcacatatctggtcctgcggatgtgagtgatgcaaatgtatgtgtcatcatcccatgtaagggtttgtttgtttgctctcaatctatgtagattgagtgggattaagtgagtttaaatctcagacaagtcaaaaaaaaatgttttcaatctcatccaatccacatatgatagtaatacccgagtaaggcttagatgtaatagttg

SEQ ID NO: 215547 - DNA, 2534 bp, Zea Mays
cacgcccaacggccgtttcccgcaccccctatccgggaaggaagaaagccagaactcacccctgcttcgtctggcggcgccgtttcccgcacgcgatgccgtcgacggcggaggatttcccggcgataaggaagctggggaagctcttccggcttaccgaagtgtacctctgggacgattcgtatggcgctggacctcacgatggacagaagaacgggcgctcggcggaggctgctctcgtggactctcatacagataaaacatgcaatgaagcatccaatagcactgacaaaggccatttctttgttgaagatttggaattggtcaatctcatgggttctttggggcttcctgtttcattcagcacaagtaaagtgaacaagaacacatgcaacaagggaaagaaaaaaggaagacaagcaccgctcaaagcagcaaacactcaaatcaatgatgctgtgaggatatgtatcaatactgaagatagagaaaattctgttgaatcattggatgctatggagcaaacgcactcatgcaatttatttgtgacaccactgggtcaaaatgaaccctcccgtgatgacactgacaagaggcttagggaagacagctcttgtgttgaagaacaagaagagtctggctgtagcaccatctactctgctggcaaagcccctggctgtgatgctaaaaatcatctcactgaacttggggcttttgagctttctgataacttggccaactcagcaaaagaagaatactcaattcaagaaaatcaagcttatgaaagtgtgttgctagattctgaagagatgtcaaggaatgactgtgttgatgatgaatctacacattcctgtgttggcatttatcaggatgaaagagtgtccacaaggggagatcaaacatctgaagaaactctatcagtaccccatgattacaatgatgttggcagagaagctagtctaagtttggcagagccatcatctattgatgagcatgcacaaagctctgccaacaacttttactatgactatggtgaatggagggttatctgggatccattctataatcggtattatttttacaacatccagacacaagagtccacatggtgtcctcctgaaggactggaggattttgcatcatattgtagcccagataccactaaagagctagctgaactgggatctcagtgttcaagcatggcaccacaagagaacaatctggctactcatgtcaatcatttagaagcacaggagcaagatcactgcattcatgatttatctgacattcctgttgaaaagccaatatatcaaagatcattcatgccaagacatggcagggaacgtctctaatgacatcatcaagtactgggctcagcggtattcacttttctcactttttgatagtggtataaagatggatgaagtagggtggttttcagttacgccagagccaattgcaaagcatcatgcatctcgtgtgggtgcgggagtaatgattgattgtttcacaggagttggtggaaatgccatccaatttgccaaaaagtgcaagcatgtaattgcagttgatattgatccacaaaagattgattgcgcgcatcataatgcatccatttatggagtaaatgatcacatagatttcattgtaggtgattttatacatatagctcctcatctgaagggagaaactgctttcatgtcgcctccttggggtggccctgactatgccaaagttgatgtttatgatatgaaaagcatgcttattccttgtgatgggtactctctttttaaactcggaaccatgatagcttcaagagtagtgatgtttcttcctcgcaacattgacctaaaccaattggcggacatgtccttgtctgtggatcccccgtgggcagttgaggtcgagaagaacttcctcaacggaaagctgaaagccataacagcttactttgaagaacaggatcgttgaaccaagcatcggcgctggtgatacaaatcatcttgttagctatgactcacgacaaatttttgtggtgaccctaaacagaacctttgtgttcggagacagaaagaagcggtttatcatcttcaccgagcatagataatttatttgcagagatgagtcattggtatcatacaaaagcagctcagcttatctcaattcacagcaagtgaaactgtcgaaggaaaactacaaggctgacagtcgaacgcgtgggagttagcttaattttgccttatgataagcaagcatgcttcctggtttatttcatacagctactagtagtttcagctgcaacagttgtgcgttggtgtgcgtgtgattctcacatatctggtcctgcggatgtgagtgatgcaaatgtatgtgtcatcatcccatgtaagggtttgtttgtttgctctcaatctatgtagattgagtgggattaagtgagtttaaatctcagacaagtcaaaaaaaaatgttttcaatctcatccaatccacatatgatagtaatacccgagtaaggcttagatgtaatagttg

SEQ ID NO: 215548 - DNA, 2652 bp, Zea Mays
cacgcccaacggccgtttcccgcaccccctatccgggaaggaagaaagccagaactcacccctgcttcgtctggcggcgccgtttcccgcacgcgatgccgtcgacggcggaggatttcccggcgataaggaagctggggaagctcttccggcttaccgaagtgtacctctgggacgattcgtatggcgctggacctcacgatggacagaagaacgggcgctcggcggaggctgctctcgtgataaaacatgcaatgaagcatccaatagcactgacaaaggccatttctttgttgaagatttggaattggtcaatctcatgggttctttggggcttcctgtttcattcagcacaagtaaagtgaacaagaacacatgcaacaagggaaagaaaaaaggaagacaagcaccgctcaaagcagcaaacactcaaatcaatgatgctgtgaggatatgtatcaatactgaagatagagaaaattctgttgaatcattggatgctatggagcaaacgcactcatgcaatttatttgtgacaccactgggtcaaaatgaaccctcccgtgatgacactgacaagaggcttagggaagacagctcttgtgttgaagaacaagaagagtctggctgtagcaccatctactctgctggcaaagcccctggctgtgatgctaaaaatcatctcactgaacttggggcttttgagctttctgataacttggccaactcagcaaaagaagaatactcaattcaagaaaatcaagcttatgaaagtgtgttgctagattctgaagagatgtcaaggaatgactgtgttgatgatgaatctacacattcctgtgttggcatttatcaggatgaaagagtgtccacaaggggagatcaaacatctgaagaaactctatcagtaccccatgattacaatgatgttggcagagaagctagtctaagtttggcagagccatcatctattgatgagcatgcacaaagctctgccaacaacttttactatgactatggtgaatggagggttatctgggatccattctataatcggtattatttttacaacatccagacacaagagtccacatggtgtcctcctgaaggactggaggattttgcatcatattgtagcccagataccactaaagagctagctgaactgggatctcagtgttcaagcatggcaccacaagagaacaatctggctactcatgtcaatcatttagaagcacaggagcaagatcactgcattcatgatttatctgacattcctgttgaaaagccaatatatcaaagtatgataactacctctgacaaagcacagcacactgaaaataagtacagcgattcaacaactactgtgttagagatgaaccaggaagttgctagcaccaaaacgaaaaagagagtaaggagatctcgatcgtatcattcatgccaagacatggcagggaacgtctctaatgacatcatcaagtactgggctcagcggtattcacttttctcactttttgatagtggtataaagatggatgaagtagggtggttttcagttacgccagagccaattgcaaagcatcatgcatctcgtgtgggtgcgggagtaatgattgattgtttcacaggagttggtggaaatgccatccaatttgccaaaaagtgcaagcatgtaattgcagttgatattgatccacaaaagattgattgcgcgcatcataatgcatccatttatggagtaaatgatcacatagatttcattgtaggtgattttatacatatagctcctcatctgaagggagaaactgctttcatgtcgcctccttggggtggccctgactatgccaaagttgatgtttatgatatgaaaagcatgcttattccttgtgatgggtactctctttttaaactcggaaccatgatagcttcaagagtagtgatgtttcttcctcgcaacattgacctaaaccaattggcggacatgtccttgtctgtggatcccccgtgggcagttgaggtcgagaagaacttcctcaacggaaagctgaaagccataacagcttactttgaagaacaggatcgttgaaccaagcatcggcgctggtgatacaaatcatcttgttagctatgactcacgacaaatttttgtggtgaccctaaacagaacctttgtgttcggagacagaaagaagcggtttatcatcttcaccgagcatagataatttatttgcagagatgagtcattggtatcatacaaaagcagctcagcttatctcaattcacagcaagtgaaactgtcgaaggaaaactacaaggctgacagtcgaacgcgtgggagttagcttaattttgccttatgataagcaagcatgcttcctggtttatttcatacagctactagtagtttcagctgcaacagttgtgcgttggtgtgcgtgtgattctcacatatctggtcctgcggatgtgagtgatgcaaatgtatgtgtcatcatcccatgtaagggtttgtttgtttgctctcaatctatgtagattgagtgggattaagtgagtttaaatctcagacaagtcaaaaaaaaatgttttcaatctcatccaatccacatatgatagtaatacccgagtaaggcttagatgtaatagttg

SEQ ID NO: 215549 - DNA, 1289 bp, Zea Mays
gtgccctccgtcctcacagcttctcctccagtcatcccggtcccggccgcggccattttctatcccgtcaaccacatcagggcaacctgccaaacaccgcgattgcgcaatccgtccaaaccccgtcaacttcctgattccctctcccggagccatcgagatgctctcttcctccgttagttcagctaccgccgcgctgtctcgcgggtcgccgccgctccaagaagcatgccccgcctattgcttccatctccatcgcctcgcccctgtctgaacgactcggtgcgccgtccaccactctccaaatatcggttcttcctgcccaggactcggaggcggccaagtccgcggcttggcgtgcgaatggcagagatgaccaaggttgggagcgccggggaaccggccgaggttggggtttccatggagagtgacccgattgtgggaggggaggcgccgtcccgcccggggtgggaagcgagccggtgggcgcccgtggaggctgcgctgaatcggatgatgctaaaccatgaaagacccgcaccagctttgcggtctggccctgggatgccatcgtcccatgcacagtccatattctatgctgcgaccatcctggctctttcattgtactactggcttgggacaaattatctgaccatgattcttgggcctgcaactctgtcggtggctgcctatctgtcttggctacgggtgtctcggcgccttcatacactaaaccaggtcatggcgggagctgttgtaggatctgtcgtcggtgctctatggtttgtgctctggcattcgcttgtgcaggaggcttttgcttcttctctgctggtcaggattgcagtcgttcttggatcatcagcattttgtgttggctttgtcatctacatgattcgtcactggctcaaggatgagtaatgtacttcttagccgcaatgggagatcgactgataggcacggtgcgtttggatgagtgaatccgttccaattgttatcagaatcgcttgaaatggtgtcaaatgggttgtgagtggagcgattcacgagtgaaaccatttttaattaaaattcaatctagtagttaaatgatttcacgaagtgattctagttcgtgatcagaaacatttcaagaatttagatccaaaatgtttctatacccatcatggtgcaaagacctctaaacgcacatttgatttctgttgtgaattagacctttttatttaacactgaaggaaagttaaagcatggattcttgtggtaccgaataatcggccacttggtttcct

SEQ ID NO: 215550 - DNA, 1183 bp, Zea Mays
gtgccctccgtcctcacagcttctcctccagtcatcccggtcccggccgcggccattttctatcccgtcaaccacatcagggcaacctgccaaacaccgcgattgcgcaatccgtccaaaccccgtcaacttcctgattccctctcccggagccatcgagatgctctcttcctccgttagttcagctaccgccgcgctgtctcgcgggtcgccgccgctccaagaagcatgccccgcctattgcttccatctccatcgcctcgcccctgtctgaacgactcggtgcgccgtccaccactctccaaatatcggttcttcctgcccaggactcggaggcggccaagtccgcggcttggcgtgcgaatggcagagatgaccaaggttgggagcgccggggaaccggccgaggttggggtttccatggagagtgacccgattgtgggaggggaggcgccgtcccgcccggggtgggaagcgagccggtgggcgcccgtggaggctgcgctgaatcggatgtgtactactggcttgggacaaattatctgaccatgattcttgggcctgcaactctgtcggtggctgcctatctgtcttggctacgggtgtctcggcgccttcatacactaaaccaggtcatggcgggagctgttgtaggatctgtcgtcggtgctctatggtttgtgctctggcattcgcttgtgcaggaggcttttgcttcttctctgctggtcaggattgcagtcgttcttggatcatcagcattttgtgttggctttgtcatctacatgattcgtcactggctcaaggatgagtaatgtacttcttagccgcaatgggagatcgactgataggcacggtgcgtttggatgagtgaatccgttccaattgttatcagaatcgcttgaaatggtgtcaaatgggttgtgagtggagcgattcacgagtgaaaccatttttaattaaaattcaatctagtagttaaatgatttcacgaagtgattctagttcgtgatcagaaacatttcaagaatttagatccaaaatgtttctatacccatcatggtgcaaagacctctaaacgcacatttgatttctgttgtgaattagacctttttatttaacactgaaggaaagttaaagcatggattcttgtggtaccgaataatcggccacttggtttcct

SEQ ID NO: 215551 - DNA, 1372 bp, Zea Mays
gtgccctccgtcctcacagcttctcctccagtcatcccggtcccggccgcggccattttctatcccgtcaaccacatcagggcaacctgccaaacaccgcgattgcgcaatccgtccaaaccccgtcaacttcctgattccctctcccggagccatcgagatgctctcttcctccgttagttcagctaccgccgcgctgtctcgcgggtcgccgccgctccaagaagcatgccccgcctattgcttccatctccatcgcctcgcccctgtctgaacgactcggtgcgccgtccaccactctccaaatatcggttcttcctgcccaggactcggaggcggccaagtccgcggcttggcgtgcgaatggcagagatgaccaaggttgggagcgccggggaaccggccgaggttggggtttccatggagagtgacccgattgtgggaggggaggcgccgtcccgcccggggtgggaagcgagccggtgggcgcccgtggaggctgcgctgaatcggatgctatttggaagcgtgatgctgaaattatgtggtttttgctgggtgcggttggcaactctctgctttcgatggttcttaaaaagatgctaaaccatgaaagacccgcaccagctttgcggtctggccctgggatgccatcgtcccatgcacagtccatattctatgctgcgaccatcctggctctttcattgtactactggcttgggacaaattatctgaccatgattcttgggcctgcaactctgtcggtggctgcctatctgtcttggctacgggtgtctcggcgccttcatacactaaaccaggtcatggcgggagctgttgtaggatctgtcgtcggtgctctatggtttgtgctctggcattcgcttgtgcaggaggcttttgcttcttctctgctggtcaggattgcagtcgttcttggatcatcagcattttgtgttggctttgtcatctacatgattcgtcactggctcaaggatgagtaatgtacttcttagccgcaatgggagatcgactgataggcacggtgcgtttggatgagtgaatccgttccaattgttatcagaatcgcttgaaatggtgtcaaatgggttgtgagtggagcgattcacgagtgaaaccatttttaattaaaattcaatctagtagttaaatgatttcacgaagtgattctagttcgtgatcagaaacatttcaagaatttagatccaaaatgtttctatacccatcatggtgcaaagacctctaaacgcacatttgatttctgttgtgaattagacctttttatttaacactgaaggaaagttaaagcatggattcttgtggtaccgaataatcggccacttggtttcct

SEQ ID NO: 215552 - DNA, 876 bp, Zea Mays
gtgccctccgtcctcacagcttctcctccagtcatcccggtcccggccgcggccattttctatcccgtcaaccacatcagggcaacctgccaaacaccgcgattgcgcaatccgtccaaaccccgtcaacttcctgattccctctcccggagccatcgagatgctctcttcctccgttagttcagctaccgccgcgctgtctcgcgggtcgccgccgctccaagaagcatgccccgcctattgcttccatctccatcgcctcgcccctgtctgaacgactcggtgcgccgtccaccactctccaaatatcggttcttcctgcccaggactcggaggcggccaagtccgcggcttggcgtgcgaatggcagagatgaccaaggttgggagcgccggggaaccggccgaggttggggtttccatggagagtgacccgattgtgggaggggaggcgccgtcccgcccggggtgggaagcgagccggtgggcgcccgtggaggctgcgctgaatcggatgtgtactactggcttgggacaaattatctgaccatgattcttgggcctgcaactctgtcggtggctgcctatctgtcttggctacgggtgtctcggcgccttcatacactaaaccaggtcatggcgggagctgttgtaggatctgtcgtcggtgctctatggtttgtgctctggcattcgcttgtgcaggaggcttttgcttcttctctgctggtcaggattgcagtcgttcttggatcatcagcattttgtgttggctttgtcatctacatgattcgtcactggctcaaggatgagtaatgtacttcttagccgcaatgggagatcgactgataggcacgagatttacggtgattggaat

SEQ ID NO: 215553 - DNA, 1102 bp, Zea Mays
caggcaatgaattctgcttttatgagctggacggtttccatatggacctacttcgttggcatgtagaatcattaatctgatgcagatgccaaagtttcagtcaaccattacaatatttgaaaatggcctttccactagaacatgagctcgctttgtgatattaattggaattccggcccctctactgaaaccgtaatactgtgcgccagagtaaatggctggtggctggttctcttgcttttgcagctatttggaagcgtgatgctgaaattatgtggtttttgctgggtgcggttggcaactctctgctttcgatggttcttaaaaagatgctaaaccatgaaagacccgcaccagctttgcggtctggccctgggatgccatcgtcccatgcacagtccatattctatgctgcgaccatcctggctctttcattgtactactggcttgggacaaattatctgaccatgattcttgggcctgcaactctgtcggtggctgcctatctgtcttggctacgggtgtctcggcgccttcatacactaaaccaggtcatggcgggagctgttgtaggatctgtcgtcggtgctctatggtttgtgctctggcattcgcttgtgcaggaggcttttgcttcttctctgctggtcaggattgcagtcgttcttggatcatcagcattttgtgttggctttgtcatctacatgattcgtcactggctcaaggatgagtaatgtacttcttagccgcaatgggagatcgactgataggcacggtgcgtttggatgagtgaatccgttccaattgttatcagaatcgcttgaaatggtgtcaaatgggttgtgagtggagcgattcacgagtgaaaccatttttaattaaaattcaatctagtagttaaatgatttcacgaagtgattctagttcgtgatcagaaacatttcaagaatttagatccaaaatgtttctatacccatcatggtgcaaagacctctaaacgcacatttgatttctgttgtgaattagacctttttatttaacactgaaggaaagttaaagcatggattcttgtggtaccgaataatcggccacttggtttcct

SEQ ID NO: 215554 - DNA, 2243 bp, Zea Mays
ctctgttccaaccgttaggcccaggtttcaaccgttaggcccaggtaggcaccccctcaaccgtaaaccctaatcgtatccagccacggagccaccattccccttcaacaacaggtagccaccccctcgcccaccacatcttcaccgcaatccacgattgagtcggacgcactctgccatgacgaaacgggagaggaaggatccaggtcgcatgacaagcttgggatccctgaccaagcagccgaatctatcatgggttccgcccgggtatagaggattctgcaaagcaaagaagtgcaattggaggatccatgcatcacaattgcctgatggtaaaacttggcaggtaaagaagatgtcaaagaggcactactgcaggagcagaagcaagatggagaagaattgcatggccaatcagtattgggttagagacaaggtagtgccgatgcttagggaaaatcctaacctaggtgctggagctctggtgaaaaagctacaagagaaatatctcatccaggtttcatattgtgttgcatggaaaggaaaggagctagcacttgatgagctgatgggcaaatgggaagacagctttgaccatatctatgctttcaaggctgcaatagagaaggagtctcctggtagtgtagtggagatacaaacagagaaggttggggaaaagatcagattctgcaaaatgtttgttgcattcaaggcttgtattgatggttttttgcaagggtgcaggccctatttaggcattgactcaactgtgctcacaggtaggtggaaaggccaacttgcttctgcagttgcaatagatggccacaattggatgtttcctgtggcacttgggctgtttgaatctgaaagtaaggatagttggaaatggttcatggagaagttgcagacagctataggatcaccccatggtctagtaatatccacagatgcaggaaaaggcatagacagtgcattaaccaatgccttcaacaatggtgttgagcaccgagaatgtgtgagacatctatttaagaattttcagaaaaggtttcatggtgaagtgtttgaaagaaacctttggccagcagcaagagcatataggaggacagtccatgataagcactataatatcatgaaaatagcatcacctgcagccattaagtggttggaagacactcacaaacatttgtgggccagatgttatttttctacagcaagcaagtgtgactatgtaaccaataatattgctgaaacgtttaactgttggattaaagatgagaagtctttaccaccagtggagctaattgatagaatcaggcaaaagattttggagaagttttttgtgaggaagaaccttgcagataagttgactggcacaattttaccatctgtcatgaaacaacttcatgatgctggcagaggtttggttggttatgtggttcacaagggtcctgatcatacagctgaagtgtctggtgttcataaggatttgactccatggagacacactattgatctggtaaatagggagtgcagctgcaagaaatggcagctaactggtttgccttgcactcatgcattgagcgttataggttgtttcaggaacctgaaattggaagattatgttgactcctactactctgtggaaaaattcaagactgcttatgttgggaagatacctactttgacagataagactgagtgggagcaaccagaggtaggttacaaggtatggcctcccatactaaagagagctgctggtagccaaggacaagaaggttcattggagtagaatgagggtcggggaaaaagaggcacaaatgcaagagatgtggtcagtttggtcaccaaatgaggacatgtaatgaaccagtatatgactcagatgcaccaccaccaactgctccaaagcctaagagggtgagacagaagaaaaagaaggtggtggtggtagaagatgatcctctgtcattgcctgcaccatcaagtccagtgtagaagaaaaagaaccagaggggaaccaagagcaagtagtgttacttatgttactcattatactacgttctgtaatgtgccatgaagtggtactatgttctgttagtcatgtttcttatgtaagacatgtgcaatttgttttctgttgaacatgtgtaatgtgtcctctgttggacatgtgcaatatgtcattgaactacgttctataatatctaagtttcatggagtttcatctacttcgatcaact

SEQ ID NO: 215555 - DNA, 2188 bp, Zea Mays
caccccctcaaccgtaaaccctaatcgtatccagccacggagccaccattccccttcaacaacaggtagccaccccctcgcccaccacatcttcaccgcaatccacgattgagtcggacgcactctgccatgacgaaacgggagaggaaggatccaggtcgcatgacaagcttgggatccctgaccaagcagccgaatctatcatgggttccgcccggaggattctgcaaagcaaagaagtgcaattggaggatccatgcatcacaattgcctgatggtaaaacttggcaggtaaagaagatgtcaaagaggcactactgcaggagcagaagcaagatggagaagaattgcatggccaatcagtattgggttagagacaaggtagtgccgatgcttagggaaaatcctaacctaggtgctggagctctggtgaaaaagctacaagagaaatatctcatccaggtttcatattgtgttgcatggaaaggaaaggagctagcacttgatgagctgatgggcaaatgggaagacagctttgaccatatctatgctttcaaggctgcaatagagaaggagtctcctggtagtgtagtggagatacaaacagagaaggttggggaaaagatcagattctgcaaaatgtttgttgcattcaaggcttgtattgatggttttttgcaagggtgcaggccctatttaggcattgactcaactgtgctcacaggtaggtggaaaggccaacttgcttctgcagttgcaatagatggccacaattggatgtttcctgtggcacttgggctgtttgaatctgaaagtaaggatagttggaaatggttcatggagaagttgcagacagctataggatcaccccatggtctagtaatatccacagatgcaggaaaaggcatagacagtgcattaaccaatgccttcaacaatggtgttgagcaccgagaatgtgtgagacatctatttaagaattttcagaaaaggtttcatggtgaagtgtttgaaagaaacctttggccagcagcaagagcatataggaggacagtccatgataagcactataatatcatgaaaatagcatcacctgcagccattaagtggttggaagacactcacaaacatttgtgggccagatgttatttttctacagcaagcaagtgtgactatgtaaccaataatattgctgaaacgtttaactgttggattaaagatgagaagtctttaccaccagtggagctaattgatagaatcaggcaaaagattttggagaagttttttgtgaggaagaaccttgcagataagttgactggcacaattttaccatctgtcatgaaacaacttcatgatgctggcagaggtttggttggttatgtggttcacaagggtcctgatcatacagctgaagtgtctggtgttcataaggatttgactccatggagacacactattgatctggtaaatagggagtgcagctgcaagaaatggcagctaactggtttgccttgcactcatgcattgagcgttataggttgtttcaggaacctgaaattggaagattatgttgactcctactactctgtggaaaaattcaagactgcttatgttgggaagatacctactttgacagataagactgagtgggagcaaccagaggtaggttacaaggtatggcctcccatactaaagagagctgctggtagccaaggacaagaaggttcattggagtagaatgagggtcggggaaaaagaggcacaaatgcaagagatgtggtcagtttggtcaccaaatgaggacatgtaatgaaccagtatatgactcagatgcaccaccaccaactgctccaaagcctaagagggtgagacagaagaaaaagaaggtggtggtggtagaagatgatcctctgtcattgcctgcaccatcaagtccagtgtagaagaaaaagaaccagaggggaaccaagagcaagtagtgttacttatgttactcattatactacgttctgtaatgtgccatgaagtggtactatgttctgttagtcatgtttcttatgtaagacatgtgcaatttgttttctgttgaacatgtgtaatgtgtcctctgttggacatgtgcaatatgtcattgaactacgttctataatatctaagtttcatggagtttcatctacttcgatcaact

SEQ ID NO: 215556 - DNA, 2078 bp, Zea Mays
cggagccaccattccccttcaacaacaggtagccaccccctcgcccaccacatcttcaccgcaatccacgattgagtcggacgcactctgccatgacgaaacgggagaggaaggatccaggtcgcatgacaagcttgggatccctgaccaagcagccgaatctatcatgggttccgcccgggtaaagaagatgtcaaagaggcactactgcaggagcagaagcaagatggagaagaattgcatggccaatcagtattgggttagagacaaggtagtgccgatgcttagggaaaatcctaacctaggtgctggagctctggtgaaaaagctacaagagaaatatctcatccaggtttcatattgtgttgcatggaaaggaaaggagctagcacttgatgagctgatgggcaaatgggaagacagctttgaccatatctatgctttcaaggctgcaatagagaaggagtctcctggtagtgtagtggagatacaaacagagaaggttggggaaaagatcagattctgcaaaatgtttgttgcattcaaggcttgtattgatggttttttgcaagggtgcaggccctatttaggcattgactcaactgtgctcacaggtaggtggaaaggccaacttgcttctgcagttgcaatagatggccacaattggatgtttcctgtggcacttgggctgtttgaatctgaaagtaaggatagttggaaatggttcatggagaagttgcagacagctataggatcaccccatggtctagtaatatccacagatgcaggaaaaggcatagacagtgcattaaccaatgccttcaacaatggtgttgagcaccgagaatgtgtgagacatctatttaagaattttcagaaaaggtttcatggtgaagtgtttgaaagaaacctttggccagcagcaagagcatataggaggacagtccatgataagcactataatatcatgaaaatagcatcacctgcagccattaagtggttggaagacactcacaaacatttgtgggccagatgttatttttctacagcaagcaagtgtgactatgtaaccaataatattgctgaaacgtttaactgttggattaaagatgagaagtctttaccaccagtggagctaattgatagaatcaggcaaaagattttggagaagttttttgtgaggaagaaccttgcagataagttgactggcacaattttaccatctgtcatgaaacaacttcatgatgctggcagaggtttggttggttatgtggttcacaagggtcctgatcatacagctgaagtgtctggtgttcataaggatttgactccatggagacacactattgatctggtaaatagggagtgcagctgcaagaaatggcagctaactggtttgccttgcactcatgcattgagcgttataggttgtttcaggaacctgaaattggaagattatgttgactcctactactctgtggaaaaattcaagactgcttatgttgggaagatacctactttgacagataagactgagtgggagcaaccagaggtaggttacaaggtatggcctcccatactaaagagagctgctggtagccaaggacaagaaggttcattggagtagaatgagggtcggggaaaaagaggcacaaatgcaagagatgtggtcagtttggtcaccaaatgaggacatgtaatgaaccagtatatgactcagatgcaccaccaccaactgctccaaagcctaagagggtgagacagaagaaaaagaaggtggtggtggtagaagatgatcctctgtcattgcctgcaccatcaagtccagtgtagaagaaaaagaaccagaggggaaccaagagcaagtagtgttacttatgttactcattatactacgttctgtaatgtgccatgaagtggtactatgttctgttagtcatgtttcttatgtaagacatgtgcaatttgttttctgttgaacatgtgtaatgtgtcctctgttggacatgtgcaatatgtcattgaactacgttctataatatctaagtttcatggagtttcatctacttcgatcaact

SEQ ID NO: 215557 - DNA, 2312 bp, Zea Mays
gagctcaagcctcaagcaagcagagcgccgtgacatcacgaaacatatagagctagctgctctgcctctgcttcaccaatcacctcgcggaggggaaggtttccccctttgacacagccgagctcccctccatcagcagccagctcctcgtcgcaaagcaagaagatgatgctcgcgtacatggaccgcgcgacggcggccgccgagccagaggacgccggccgcgagcccgccaccacggcgggcgggtgcgcggcggcggcggcgacggatttcggcgggctggcgagcgccatgcccgcggccgtggtccgcccggcgagcgcggacgacgtggccagcgccatccgcgcggcggcgctgacgccgcacctcaccgtggccgcccgcgggaacgggcactcggtggccggccaggccatggccgagggcgggctggtcctcgacatgcgctcgctcgcggcgccgtcccggcgcgcgcagatgcagctcgtcgtgcagtgccccgacggcggcggcggccgccgctgcttcgccgacgtccccggcggcgcgctctgggaggaggtgctccactgggccgtcgacaaccacgggctcgccccggcgtcctggacggactacctccgcctcaccgtgggcggcacgctctccaatggcggcgtcagcggccagtccttccgctacgggccccaggtgtccaacgtggccgagctcgaggtggtcaccggcgacggcgagcgccgcgtctgctcgccctcctcccacccggacctcttcttcgccgtgctcggcgggctcggccagttcggcgtcatcacgcgcgcccgcatcccgctccacagggcgccccaggcggtgagcgcgcggacatcgggtcggggcgaaagctaaagcttgctttttgcttgggcactactaactgactgacgttgccattcaggtgcggtggacgcgcgtggtgtacgcgagcatcgcggactacacggcggacgcggagtggctggtgacgcggccccccgacgcggcgttcgactacgtggagggcttcgcgttcgtgaacagcgacgaccccgtgaacggctggccgtccgtgcccatccccggcggcgcccgcttcgacccgtccctcctccccgccggcgccggccccgtcctctactgcctggaggtggccctgtaccagtacgcgcaccggcccgacgacgtcgacgacgacgatgaggaggaccaggtgggaccccaacacgtcggtggcgctgccggagggcgaggtcttctacctggtggcgctgctgcggttctgccggagcggcgggccggcggtggacgagctggtggcgcagaacggcgccatcctccgcgcctgccgcgccaacggctacgactacaaggcctacttcccgagctaccgcggcgaggccgactgggcgcgccacttcggcgccgccaggtggaggcgcttcgtggaccgcaaggcccggtacgacccgctggcgatcctcgcgccgggccagaagatcttccctcgggtcccggcgtccgtcgccgtgtagagcaaggggggaggaccagccagctgccagccaagacaggaggaggaggaggaggggaggctgatggatcgccgctgctgttgccggacctgccctgccaggataccagccggagagctttcaggcgacaaaagccgcggcgaggggatcagcgaggatctgccgggccaccgccaccgccgccgccccgcgttttatactggagggtgggtgtgctccaagtggtgcctttctgacaacgcgatctaggctatgagtagtgtcgtccaagcgaccgtatccacaatccatcaaccttagcgatcttttgagttcaaaaaaagaaaaaaaaaaccttagcaatctttttttaagttccttccgataaataaaacaggagatcaaggaaagacagagacggccacgacggtatatttttttttggtgccgtgttcgattcataggatccaactgttttgcccacaaacgacaagggaccgcgctgccgccggtgagctccgcttggatggacgtcctgtcgctgcggcccggggtccggacggacgaaagaaatggacgcgagggggggtggcggccatgcactattgaagaggtcggatttgcaactgatgcatgctcctaagttgtatgtagctgtcctagatgattgtttattttcttatatatgtttgggtgagagcgacttgacagagaagcgtgttttgtttttcggttggtgtttgtgggcagcgttagtcacgactcaggacctaattg

SEQ ID NO: 215558 - DNA, 2830 bp, Zea Mays
cagagcgccgtgacatcacgaaacatatagagctagctgctctgcctctgcttcaccaatcacctcgcggaggggaaggtttccccctttgacacagccgagctcccctccatcagcagccagctcctcgtcgcaaagcaagaagatgatgctcgcgtacatggaccgcgcgacggcggccgccgagccagaggacgccggccgcgagcccgccaccacggcgggcgggtgcgcggcggcggcggcgacggatttcggcgggctggcgagcgccatgcccgcggccgtggtccgcccggcgagcgcggacgacgtggccagcgccatccgcgcggcggcgctgacgccgcacctcaccgtggccgcccgcgggaacgggcactcggtggccggccaggccatggccgagggcgggctggtcctcgacatgcgctcgctcgcggcgccgtcccggcgcgcgcagatgcagctcgtcgtgcagtgccccgacggcggcggcggccgccgctgcttcgccgacgtccccggcggcgcgctctgggaggaggtgctccactgggccgtcgacaaccacgggctcgccccggcgtcctggacggactacctccgcctcaccgtgggcggcacgctctccaatggcggcgtcagcggccagtccttccgctacgggccccaggtgtccaacgtggccgagctcgaggtggtcaccggcgacggcgagcgccgcgtctgctcgccctcctcccacccggacctcttcttcgccgtgctcggcgggctcggccagttcggcgtcatcacgcgcgcccgcatcccgctccacagggcgccccaggcggtgcggtggacgcgcgtggtgtacgcgagcatcgcggactacacggcggacgcggagtggctggtgacgcggccccccgacgcggcgttcgactacgtggagggcttcgcgttcgtgaacagcgacgaccccgtgaacggctggccgtccgtgcccatccccggcggcgcccgcttcgacccgtccctcctccccgccggcgccggccccgtcctctactgcctggaggtggccctgtaccagtacgcgcaccggcccgacgacgtcgacgacgacgatgaggaggaccaggcggcggtgaccgtgagccggatgatggcgccgctcaagcacgtgcggggcctggagttcgcggcggacgtcgggtacgtggacttcctgtcccgcgtgaaccgggtggaggaggaggcccggcgcaacggcagctgggacgcgccgcacccgtggctcaacctcttcgtctccgcgcgcgacatcgccgacttcgaccgcgccgtcatcaagggcatgctcgccgacggcatcgacgggcccatgctcgtctaccctatgctcaagagcaatgtgcagttgccgtttgcggcccgccaagctagctaggggccgggacgcatgtgagccgccctgccttctctctgctcgtcgtgtcactgacgcctggtcctccgggacagttgctgagccggcccgtacgtacctgtaagacgacggtcccgagcctccaccgccgcttctgttttggatttagccgtgtcacacagatcttacggaggaggaggagtactatgattgacaaattattgcttcgcccgacccgaggctagcgcacagtccatgtcatgtgggcctggctgtgtggtttccgtcctgatgctgatgcctgaagggacctgcgtgcgtgtgcgtgcgtgcaggtgggaccccaacacgtcggtggcgctgccggagggcgaggtcttctacctggtggcgctgctgcggttctgccggagcggcgggccggcggtggacgagctggtggcgcagaacggcgccatcctccgcgcctgccgcgccaacggctacgactacaaggcctacttcccgagctaccgcggcgaggccgactgggcgcgccacttcggcgccgccaggtggaggcgcttcgtggaccgcaaggcccggtacgacccgctggcgatcctcgcgccgggccagaagatcttccctcgggtcccggcgtccgtcgccgtgtagagcaaggggggaggaccagccagctgccagccaagacaggaggaggaggaggaggggaggctgatggatcgccgctgctgttgccggacctgccctgccaggataccagccggagagctttcaggcgacaaaagccgcggcgaggggatcagcgaggatctgccgggccaccgccaccgccgccgccccgcgttttatactggagggtgggtgtgctccaagtggtgcctttctgacaacgcgatctaggctatgagtagtgtcgtccaagcgaccgtatccacaatccatcaaccttagcgatcttttgagttcaaaaaaagaaaaaaaaaaccttagcaatctttttttaagttccttccgataaataaaacaggagatcaaggaaagacagagacggccacgacggtatatttttttttggtgccgtgttcgattcataggatccaactgttttgcccacaaacgacaagggaccgcgctgccgccggtgagctccgcttggatggacgtcctgtcgctgcggcccggggtccggacggacgaaagaaatggacgcgagggggggtggcggccatgcactattgaagaggtcggatttgcaactgatgcatgctcctaagttgtatgtagctgtcctagatgattgtttattttcttatatatgtttgggtgagagcgacttgacagagaagcgtgttttgtttttcggttggtgtttgtgggcagcgttagtcacgactcaggacctaattg

SEQ ID NO: 215559 - DNA, 1170 bp, Zea Mays
accatcctgcacacactgcaatctccgtccatccctccgtttccttttttcctctgttgccatcagttcagtagtagcctgcagctctcccaccttctcgctgcgctgtactgtgctggcaggggaggggccatggacgaccccgtcgagcgcttgaaggacgggttccacaagttcaagaccgaggtctatgacaagaagccggagctgttcgagcctctcaaggccggccaggcccccaagtacgtggtgttcgcctgctccgactcccgcgtgtgcccgtcggtgaccctgggcctgcagcccggcgaggccttcaccgtccgcaacatcgccgccatggtcccagcctacgacaagaccaagtacaccggcatcgggtccgccatcgagtacgccgtgtgcgcgctcaaggtggaggtcctcgtggtcattggccacagctgctgcggtggcatcagggcgctcctctccctccaggacggcgcacctgacaacttccacttcgttgagaactgggttaagatcggcttccctgccaagattaaggtgaagaaagaccacgcatcggtgccgttcgatgaccagtgctctattctagagaaggaggccgtgaacctgtccctggagaacctcaagacctaccccttcgtcaaggaagggctggccaacgggacgctcaagctggtcggcggccgtcaacgtgtcccttgagaacctcaagtcctacccgttcgtcaaggaagggctggagaaagggaccctcaagctggtcggcggccattacgacttcgtcaatggaaagttcgagacatgggaaccctaagtggccatatacgtacaaatacgccccaccggacttattagctgcgtggagtgcttaattatttgccgctatatatacacatataccggaatttaccggtgagaactatactgttgtaataataatagcgggaaaaaatattctttgcatctgggatacaaacacacttttttacgaatagaagaaaaataaattagtaagggattaatttataaatttgatctgtttttgtgggtttgcctctaggtagtggatgtgagaggcttcaaaagagtgtttgtatcccgaatacaaagaattttttcaataaggaatacctgtgttatttgacttctaatgctgag

SEQ ID NO: 215560 - DNA, 463 bp, Zea Mays
atggcggagcggctggcactcccaacagcttatgaggccataataattgcacatcagaacctgcaaaatcccaagatacaaaaattgatagaaccaatatctcgccgtgcctccagacctgtggttgtcaatggtctcctgcaaagggaggactgggaaacagcaataacagtgccacttgggatcattccagcaggtactggaaatggaatggcacgatctctactgcatgctgctggtgaaccattctctatatctaatgttgtgttcgcaatcatcagaggtcataaacgtgcccttgatgttacttctgttgtgcagggaaaggcgaggttctttagtgtcctgatgcttacatggggtctggtggctgatgttgatattgaatctgagaagtataggtggatgggaagtgctcgccttgatttttatggtcgactcttgctttactacttagttgcaa

SEQ ID NO: 215561 - DNA, 1646 bp, Zea Mays
ctgggcccaccgtaactgactgggtgttctttacagacacgtgacgtcgcgcaccgggcccgtctatcgagtattcggtcccattcgtcagtgctcggacacctgactaataacaaaagaactcgctccattcagagattcagagaagacccgcctctcccgtgaggccgtgacgcgacgccggatcgtcctcgtctcctagctcgtggaatgaagggaggtggcgtcatcagggccgccggcggaggtgccggcggtgcgggtctgttgcgaacgcgactgcggcttcccgtggtgctcctctcctgctccctcttcttcctcgccggcttcttcggctcgctcctcttcacccaggatccggaggaggcggatatgccggtgccgagagagcggctgttggaggcggcgtggccggagatgccttacggcgagtccggcgaggctgcgccgtccttgatcccataccagattttgagctggcagcctcgtgctttgtactttccacaatttgcgacatcagaacagtgtgaaaatatagtaaaaacggcaaaggagagacttaagccatcaacattagccctgaggaaaggagaaaccgcagagagtacaaaaggaatcaggacaagttcgggaacattccttagtgctaatgaagacccaactgaaacccttgcggaaatcgagaagaagattgcaagggctaccatgttacccagaaatcatggggagccatttaatgtcctgcggtataatattggacaaaggtatgcttcacattatgacgcatttgacccagctcagtatggtccacaaaaaaatcaaagggtggcatctttcttgctttatctcacggatgtcgaagaagggggagaaactatgttcccatacgagtgagaatatggatataggctatgactatgagaagtgcattggcctaaaggtaaaaccaaggaagggtgacggactcttgttttactcccttatggtaaatgggaccattgaccgggtacgtgctggcctatcaaagtggccctgtacttgtgcttcccgttctctaagttgtacacggagtagaactcacgttcgttcttttatttgaatatatattgtctctgcccacgaatatataaggtatacacctggacttttatatttgtgaacggaggtagtaaaaaaattctttgcgacgccatggaaatcaatttagagttaccaatggaagtcttgatgctgctaacttgcatttgcacatgctgtcgcagacttcacttcatggtagctgccccgtcatcaaaggcgagaaatgggtcgccaccaaatggatcagagacaatatagtgtagaaatcgaaaggctcaggtgtcatgtgccctccaaaaaaatagatcatgcgcacatatactgaccatatacttcagtgtttgttcaattgccatggacagttggaccaacggaaggaaagtgtaaccaatctatttgcatcgtgtcaatatatagcctacaacttacatgtggccaagtggcaagtggacattccatgatctctttccttttccgagatccctttttcttttccgaattcgtgctgtattgtcatacccttccatcggcactaaatagtagaaacgttcgattgcactgcc

SEQ ID NO: 215562 - DNA, 966 bp, Zea Mays
cacagttgtatatctgtttctgccatcatttacctaatgtagattttgagctggcagcctcgtgctttgtactttccacaatttgcgacatcagaacagtgtgaaaatatagtaaaaacggcaaaggagagacttaagccatcaacattagccctgaggaaaggagaaaccgcagagagtacaaaaggaatcaggacaagttcgggaacattccttagtgctaatgaagacccaactgaaacccttgcggaaatcgagaagaagattgcaagggctaccatgttacccagaaatcatggggagccatttaatgtcctgcggtataatattggacaaaggtatgcttcacattatgacgcatttgacccagctcagtatggtccacaaaaaaatcaaagggtggcatctttcttgctttatctcacggatgtcgaagaagggggagaaactatgttcccatacgagaacagtgagaatatggatataggctatgactatgagaagtgcattggcctaaaggtaaaaccaaggaagggtgacggactcttgttttactcccttatggtaaatgggaccattgaccggacttcacttcatggtagctgccccgtcatcaaaggcgagaaatgggtcgccaccaaatggatcagagacaatatagtgtagaaatcgaaaggctcaggtgtcatgtgccctccaaaaaaatagatcatgcgcacatatactgaccatatacttcagtgtttgttcaattgccatggacagttggaccaacggaaggaaagtgtaaccaatctatttgcatcgtgtcaatatatagcctacaacttacatgtggccaagtggcaagtggacattccatgatctctttccttttccgagatccctttttcttttccgaattcgtgctgtattgtcatacccttccatcggcactaaatagtagaaacgttcgattgcactgcc

SEQ ID NO: 215563 - DNA, 3657 bp, Zea Mays
gaaaaaaccgcgttcggattcggaccctccgtagcacgtgagcatagcttcagctggccactaaaccctcgtcttccccttccaagcgaatcccattccctacctttcgccgccgcctacgcaccatcgctcgaaaccctagccccattccccgtctcgctcggaatcccagctacctccagcgccgccgcgactgcaggataggaggccatggacgacgtgtgcgaggggaaggacttctccttcccggagcaggaggagggggtgatcgagctgtgggcgaagctcgacgccttccacgagcagctccggcgcacggagggcggcgaggagttcgtattctacgacggtccccccttcgccacgggcctgccccattacggccacatactcgccggtaccatcaaggacgtggtcacccggcaccagtcgatgcgaggccgccacgtctcgcgacggttcggatgggactgtcacggactccccgtcgagttcgagatcgataaggcgctcggcatcaccaaccggcagcaggtgttcgacctcggcatcggcaagtacaacgagacgtgccgcagcatcgtcaccaagtacgtctccgagtgggaggccatggttacacgcacggggaggtggattgacttcaagaacgactacaaaaccatggacctcaacttcatggagagcgtctggtgggtgtttgcccagctatgggagaaggacctcgtctataggggtttcaaggtcatgccttacagcacaggatgcaaaactgcactgtcaaactttgaggcagcactggactataggactgttcctgacccagcggtgatggtatccttccctattgttggcgatgcggacaatgcagctcttgttgcatggactacaacaccctggacacttccaagtaacctagcgctgtgtgtcaatgccaatcttacatatgcaaaggttaaagacaaatcaaatggagcagtatatgttattgcagaatccaggcttgggcagttaccagttaaggccaaagcttcaggaaagaagcaggcaccttcaaagggaagcaatattgaagctgttcaggatggtttggacaaggaatcatatgagctgttgtcaaagattcctggggtatccttggttggcttaaaatatactcctctatttgactttttcattgaacttcaagggactgcctttagagtgattgcggataactatgtcacggatgatagtggaacgggtgttgttcattgtgctcctgcttttggtgaagacgaccatcgtgtttgccttgctgctgggatatttgagactgctggacttgttgttgctgttgatgacgacggatgttttattgaaaaaatatctgattttaaagggcgatatgtcaaagaagccgacaaggatatcatcaatgctgttaaggataaaggaagactcattagtaaagggagtattgagcactcttatccattttgttggcgatcgggcactcctcttatttatcgggctgttccaagctggtttgtcaaggttgagaagattaaagaccagttgctggaatgtaacaaggagacttactgggtgcctgactatgttaaggaaaaaagatttcacaactggcttgaaggtgctcgtgattgggctgttagcagaagtagattctggggtactccacttccactgtggataagtcaagatggtgaagaaattgttgttatggattctatagagaagcttgaaaaattatctggagtcaaggtcactgatcttcaccgacactatgttgatgatattacaattccctctaagagaggacctgagtttggggtgctcaaacgtgttgatgatgttttcgactgctggttcgagagtgggtcaatgccatatgcctacattcactatccatttgagaatcgggaactatttgaaaagaactttcctggcaattttgtggcagagggtttagatcaaacccgtggatggttctatactctgatggttctctcaacagcactgtttgggaagcctgcatttaagaatcttatatgcaatgggcttgtcttggctgaggatggtaagaaaatgagcaagagtaaaaagaactatcctccacccaaggatctcattgatgagtttggagcggatgctctgcgactatatttggtaaactccccagttgtacgtgcagagtctctacgattcaaacgtactggtgtctttgctgttgtgaaagatgtcttcctcccatggtataacgcatatagattttttgtccaaaatgcaaagagactggaagttgagggtcttgcctcattttctccgatggaacaagtggtacttctgaagtcatccaatgtgttggatcactggataaactctgcaactgaaagtctagttgtgccgtatttggtaaaatacattgactatcttactaacatatatgtgcgtttgaaccgcaaacggttcaaagggcgtactggagaagaagactgcagaatttctctttcaacactctaccatgttcttgtaacaacttgcgtggtgatggctccatttacaccattctttactgaagttctttatcaaaatttgcggaaggtgtcaagtaattctgaggagagcatccacttttgcaagttcccttccacaactggcgagagagatgagcgtgttgagcaaagtgtaaagaggatggtgaccataattgatcttgcacgtaatattcgtgagcggcataacaaagctctcaaaacaccactcaaggaaatggtggttgtgcatccagacaatgacttccttgaagacatcactggcaaactaaaggagtatgtcatggaggaaatcaatgttaagaatgtcactccatgtaatgaccccttgatgtatgcttctctgcgagccgagcctaatttcagcgtgctaggaaaaagacttggaaaagacatgggaaaagtatcaaatgtggtgaagaagatgactcaggagcagatcttagcatttgaaaaaagtggagaggtttcattcttcggccattgcttgaagctagatgatatcaaggttgtccgacaattcaagcgtcctgaaaatgtgtcagagaaggagattgatgctgcaggagatggtgatgttttagtcattttggatctacgaaccgaccagtcattgtttgaagctggagtggctcgagaggttgtgaacaggatccagaaattacgaaagactgctcagcttgaacctgctgatccagttgatgtgtattacgaatctgtgggcaatgacaaaaacactctggaagagatattgaagtcacaggatcagtatattagagacgcacttggctcaccaatcgttccaaaggaaatggcaccaacagatgtcgtagtacttggcgaggaatcgcacaacgtacatgacatgtcatttgtcatatgcatcgcaaggtccaccccgattatttcaccagatcttctttctcatgcctcaggcaacagcaatcatgtcgaggcgttgagagtatatcttctgtcaaaatctctatccagattgaagaaccagttccaaagtggaaatggcgtgattacggtcgactgcatcgaaggttatccactaatcagtgatcaggcacctatggttcttgctcaagctttaaca

SEQ ID NO: 215564 - DNA, 3922 bp, Zea Mays
gtagcacgtgagcatagcttcagctggccactaaaccctcgtcttccccttccaagcgaatcccattccctacctttcgccgccgcctacgcaccatcgctcgaaaccctagccccattccccgtctcgctcggaatcccagctacctccagcgccgccgcgactgcaggataggaggccatggacgacgtgtgcgaggggaaggacttctccttcccggagcaggaggagggggtgatcgagctgtgggcgaagctcgacgccttccacgagcagctccggcgcacggagggcggcgaggagttcgtattctacgacggtccccccttcgccacgggcctgccccattacggccacatactcgccggtaccatcaaggacgtggtcacccggcaccagtcgatgcgaggccgccacgtctcgcgacggttcggatgggactgtcacggactccccgtcgagttcgagatcgataaggcgctcggcatcaccaaccggcagcaggtgttcgacctcggcatcggcaagtacaacgagacgtgccgcagcatcgtcaccaagtacgtctccgagtgggaggccatggttacacgcacggggaggtggattgacttcaagaacgactacaaaaccatggacctcaacttcatggagagcgtctggtgggtgtttgcccagctatgggagaaggacctcgtctataggggtttcaaggtcatgccttacagcacaggatgcaaaactgcactgtcaaactttgaggcagcactggactataggctcttgttgcatggactacaacaccctggacacttccaagtaacctagcgctgtgtgtcaatgccaatcttacatatgcaaaggttaaagacaaatcaaatggagcagtatatgttattgcagaatccaggcttgggcagttaccagttaaggccaaagcttcaggaaagaagcaggcaccttcaaagggaagcaatattgaagctgttcaggatggtttggacaaggaatcatatgagctgttgtcaaagattcctggggtatccttggttggcttaaaatatactcctctatttgactttttcattgaacttcaagggactgcctttagagtgattgcggataactatgtcacggatgatagtggaacgggtgttgttcattgtgctcctgcttttggtgaagacgaccatcgtgtttgccttgctgctgggatatttgagactgctggacttgttgttgctgttgatgacgacggatgttttattgaaaaaatatctgattttaaagggcgatatgtcaaagaagccgacaaggatatcatcaatgctgttaaggataaaggaagactcattagtaaagggagtattgagcactcttatccattttgttggcgatcgggcactcctcttatttatcgggctgttccaagctggtttgtcaaggttgagaagattaaagaccagttgctggaatgtaacaaggagacttactgggtgcctgactatgttaaggaaaaaagatttcacaactggcttgaaggtgctcgtgattgggctgttagcagaagtagattctggggtactccacttccactgtggataagtcaagatggtgaagaaattgttgttatggattctatagagaagcttgaaaaattatctggagtcaaggtcactgatcttcaccgacactatgttgatgatattacaattccctctaagagaggacctgagtttggggtgctcaaacgtgttgatgatgttttcgactgctggttcgagagtgggtcaatgccatatgcctacattcactatccatttgagaatcgggaactatttgaaaagaactttcctggcaattttgtggcagagggtttagatcaaacccgtggatggttctatactctgatggttctctcaacagcactgtttgggaagcctgcatttaagaatcttatatgcaatgggcttgtcttggctgaggatggtaagaaaatgagcaagagtaaaaagaactatcctccacccaaggatctcattgatgagtttggagcggatgctctgcgactatatttggtaaactccccagttgtacgtgcagagtctctacgattcaaacgtactggtgtctttgctgttgtgaaagatgtcttcctcccatggtataacgcatatagattttttgtccaaaatgcaaagagactggaagttgagggtcttgcctcattttctccgatggaacaagtggtacttctgaagtcatccaatgtgttggatcactggataaactctgcaactgaaagtctagttagctttgttcaccaggagatggatgcatatcggctttacacggttgtgccgtatttggtaaaatacattgactatcttactaacatatatgtgcgtttgaaccgcaaacggttcaaagggcgtactggagaagaagactgcagaatttctctttcaacactctaccatgttcttgtaacaacttgcgtggtgatggctccatttacaccattctttactgaagttctttatcaaaatttgcggaaggtgtcaagtaattctgaggagagcatccacttttgcaagttcccttccacaactggcgagggaaatggtggttgtgcatccagacaatgacttccttgaagacatcactggcaaactaaaggagtatgtcatggaggaaatcaatgttaagaatgtcactccatgtaatgaccccttgatgtatgcttctctgcgagccgagcctaatttcagcgtgctaggaaaaagacttggaaaagacatgggaaaagtatcaaatgtggtgaagaagatgactcaggagcagatcttagcatttgaaaaaagtggagaggtttcattcttcggccattgcttgaagctagatgatatcaaggttgtccgacaattcaagcgtcctgaaaatgtgtcagagaaggagattgatgctgcaggagatggtgatgttttagtcattttggatctacgaaccgaccagtcattgtttgaagctggagtggctcgagaggttgtgaacaggatccagaaattacgaaagactgctcagcttgaacctgctgatccagttgatgtgtattacgaatctgtgggcaatgacaaaaacactctggaagagatattgaagtcacaggatcagtatattagagacgcacttggctcaccaatcgttccaaaggaaatggcaccaacagatgtcgtagtacttggcgaggaatcgcacaacgtacatgacatgtcatttgtcatatgcatcgcaaggtccaccccgattatttcaccagatcttctttctcatgcctcaggcaacagcaatcatgtcgaggcgttgagagtatatcttctgtcaaaatctctatccagattgaagaaccagttccaaagtggaaatggcgtgattacggtcgactgcatcgaaggttatccactaatcaggttacagctaggaaagcatgtttttctaagtgcaggggatttttatctggctagtcgatcctaatttttgtgtgcagcatcccaattttgactgattcacccatcattttgccgcaatcggcttaaacagcttggttccatttatgcattcagattcacttgttaaaggtgaaaaatcccaatttatgatataccatggtactctccgttctttttttatttgtcgtgttttagttcaaaaatgaactagccggtgacaaatatttttttttattttgtcgtgttttagttcaaaaataattagccggtgacaaatattcgagtaagctataggttcccatacccctagtgaattatgagtagataacatgtatgtttgtaatctcttgggtgtttggtttttgaggattgatgtggtccatcagattttgatgaatgaatgcatttcattt

SEQ ID NO: 215565 - DNA, 4049 bp, Zea Mays
gtagcacgtgagcatagcttcagctggccactaaaccctcgtcttccccttccaagcgaatcccattccctacctttcgccgccgcctacgcaccatcgctcgaaaccctagccccattccccgtctcgctcggaatcccagctacctccagcgccgccgcgactgcaggataggaggccatggacgacgtgtgcgaggggaaggacttctccttcccggagcaggaggagggggtgatcgagctgtgggcgaagctcgacgccttccacgagcagctccggcgcacggagggcggcgaggagttcgtattctacgacggtccccccttcgccacgggcctgccccattacggccacatactcgccggtaccatcaaggacgtggtcacccggcaccagtcgatgcgaggccgccacgtctcgcgacggttcggatgggactgtcacggactccccgtcgagttcgagatcgataaggcgctcggcatcaccaaccggcagcaggtgttcgacctcggcatcggcaagtacaacgagacgtgccgcagcatcgtcaccaagtacgtctccgagtgggaggccatggttacacgcacggggaggtggattgacttcaagaacgactacaaaaccatggacctcaacttcatggagagcgtctggtgggtgtttgcccagctatgggagaaggacctcgtctataggggtttcaaggtcatgccttacagcacaggatgcaaaactgcactgtcaaactttgaggcagcactggactataggactgttcctgacccagcggtgatggtatccttccctattgttggcgatgcggacaatgcagctcttgttgcatggactacaacaccctggacacttccaagtaacctagcgctgtgtgtcaatgccaatcttacatatgcaaaggttaaagacaaatcaaatggagcagtatatgttattgcagaatccaggcttgggcagttaccagttaaggccaaagcttcaggaaagaagcaggcaccttcaaagggaagcaatattgaagctgttcaggatggtttggacaaggaatcatatgagctgttgtcaaagattcctggggtatccttggttggcttaaaggactgcctttagagtgattgcggataactatgtcacggatgatagtggaacgggtgttgttcattgtgctcctgcttttggtgaagacgaccatcgtgtttgccttgctgctgggatatttgagactgctggacttgttgttgctgttgatgacgacggatgttttattgaaaaaatatctgattttaaagggcgatatgtcaaagaagccgacaaggatatcatcaatgctgttaaggataaaggaagactcattagtaaagggagtattgagcactcttatccattttgttggcgatcgggcactcctcttatttatcgggctgttccaagctggtttgtcaaggttgagaagattaaagaccagttgctggaatgtaacaaggagacttactgggtgcctgactatgttaaggaaaaaagatttcacaactggcttgaaggtgctcgtgattgggctgttagcagaagtagattctggggtactccacttccactgtggataagtcaagatggtgaagaaattgttgttatggattctatagagaagcttgaaaaattatctggagtcaaggtcactgatcttcaccgacactatgttgatgatattacaattccctctaagagaggacctgagtttggggtgctcaaacgtgttgatgatgttttcgactgctggttcgagagtgggtcaatgccatatgcctacattcactatccatttgagaatcgggaactatttgaaaagaactttcctggcaattttgtggcagagggtttagatcaaacccgtggatggttctatactctgatggttctctcaacagcactgtttgggaagcctgcatttaagaatcttatatgcaatgggcttgtcttggctgaggatggtaagaaaatgagcaagagtaaaaagaactatcctccacccaaggatctcattgatgagtttggagcggatgctctgcgactatatttggtaaactccccagttgtacgtgcagagtctctacgattcaaacgtactggtgtctttgctgttgtgaaagatgtcttcctcccatggtataacgcatatagattttttgtccaaaatgcaaagagactggaagttgagggtcttgcctcattttctccgatggaacaagtggtacttctgaagtcatccaatgtgttggatcactggataaactctgcaactgaaagtctagttagctttgttcaccaggagatggatgcatatcggctttacacggttgtgccgtatttggtaaaatacattgactatcttactaacatatatgtgcgtttgaaccgcaaacggttcaaagggcgtactggagaagaagactgcagaatttctctttcaacactctaccatgttcttgtaacaacttgcgtggtgatggctccatttacaccattctttactgaagttctttatcaaaatttgcggaaggtgtcaagtaattctgaggagagcatccacttttgcaagttcccttccacaactggcgagagagatgagcgtgttgagcaaagtgtaaagaggatggtgaccataattgatcttgcacgtaatattcgtgagcggcataacaaagctctcaaaacaccactcaaggaaatggtggttgtgcatccagacaatgacttccttgaagacatcactggcaaactaaaggagtatgtcatggaggaaatcaatgttaagaatgtcactccatgtaatgaccccttgatgtatgcttctctgcgagccgagcctaatttcagcgtgctaggaaaaagacttggaaaagacatgggaaaagtatcaaatgtggtgaagaagatgactcaggagcagatcttagcatttgaaaaaagtggagaggtttcattcttcggccattgcttgaagctagatgatatcaaggttgtccgacaattcaagcgtcctgaaaatgtgtcagagaaggagattgatgctgcaggagatggtgatgttttagtcattttggatctacgaaccgaccagtcattgtttgaagctggagtggctcgagaggttgtgaacaggatccagaaattacgaaagactgctcagcttgaacctgctgatccagttgatgtgtattacgaatctgtgggcaatgacaaaaacactctggaagagatattgaagtcacaggatcagtatattagagacgcacttggctcaccaatcgttccaaaggaaatggcaccaacagatgtcgtagtacttggcgaggaatcgcacaacgtacatgacatgtcatttgtcatatgcatcgcaaggtccaccccgattatttcaccagatcttctttctcatgcctcaggcaacagcaatcatgtcgaggcgttgagagtatatcttctgtcaaaatctctatccagattgaagaaccagttccaaagtggaaatggcgtgattacggtcgactgcatcgaaggttatccactaatcaggttacagctaggaaagcatgtttttctaagtgcaggggatttttatctggctagtcgatcctaatttttgtgtgcagcatcccaattttgactgattcacccatcattttgccgcaatcggcttaaacagcttggttccatttatgcattcagattcacttgttaaaggtgaaaaatcccaatttatgatataccatggtactctccgttctttttttatttgtcgtgttttagttcaaaaatgaactagccggtgacaaatatttttttttattttgtcgtgttttagttcaaaaataattagccggtgacaaatattcgagtaagctataggttcccatacccctagtgaattatgagtagataacatgtatgtttgtaatctcttgggtgtttggtttttgaggattgatgtggtccatcagattttgatgaatgaatgcatttcattt

SEQ ID NO: 215566 - DNA, 3849 bp, Zea Mays
gtagcacgtgagcatagcttcagctggccactaaaccctcgtcttccccttccaagcgaatcccattccctacctttcgccgccgcctacgcaccatcgctcgaaaccctagccccattccccgtctcgctcggaatcccagctacctccagcgccgccgcgactgcaggataggaggccatggacgacgtgtgcgaggggaaggacttctccttcccggagcaggaggagggggtgatcgagctgtgggcgaagctcgacgccttccacgagcagctccggcgcacggagggcggcgaggagttcgtattctacgacggtccccccttcgccacgggcctgccccattacggccacatactcgccggtaccatcaaggacgtggtcacccggcaccagtcgatgcgaggccgccacgtctcgcgacggttcggatgggactgtcacggactccccgtcgagttcgagatcgataaggcgctcggcatcaccaaccggcagcaggtgttcgacctcggcatcggcaagtacaacgagacgtgccgcagcatcgtcaccaagtacgtctccgagtgggaggccatggttacacgcacggggaggtggattgacttcaagaacgactacaaaaccatggacctcaacttcatggagagcgtctggtgggtgtttgcccagctatgggagaaggacctcgtctataggggtttcaaggtcatgccttacagcacaggatgcaaaactgcactgtcaaactttgaggcagcactggactataggactgttcctgacccagcggtgatggtatccttccctattgttggcgatgcggacaatgcagctcttgttgcatggactacaacaccctggacacttccaagtaacctagcgctgtgtgtcaatgccaatcttacatatgcaaaggttaaagacaaatcaaatggagcagtatatgttattgcagaatccaggcttgggcagttaccagttaaggccaaagcttcaggaaagaagcaggcaccttcaaagggaagcaatattgaagctgttcaggatggtttggacaaggaatcatatgagctgttgtcaaagattcctggggtatccttggttggcttaaaatatactcctctatttgactttttcattgaacttcaagggactgcctttagagtgattgcggataactatgtcacggatgatagtggaacgggtgttgttcattgtgctcctgcttttggtgaagacgaccatcgtgtttgccttgctgctgggatatttgagactgctggacttgttgttgctgttgatgacgacggatgttttattgaaaaaatatctgattttaaagggcgatatgtcaaagaagccgacaaggatatcatcaatgctgttaaggataaaggaagactcattagtaaagggagtattgagcactcttatccattttgttggcgatcgggcactcctcttatttatcgggctgttccaagctggtttgtcaaggttgagaagattaaagaccagttgctggaatgtaacaaggagacttactgggtgcctgactatgttaaggaaaaaagatttcacaactggcttgaaggtgctcgtgattgggctgttagcagaagtagattctggggtactccacttccactgtggataagtcaagatggtgaagaaattgttgttatggattctatagagaagcttgaaaaattatctggagtcaaggtcactgatcttcaccgacactatgttgatgatattacaattccctctaagagaggacctgagtttggggtgctcaaacgtgttgatgatgttctatactctgatggttctctcaacagcactgtttgggaagcctgcatttaagaatcttatatgcaatgggcttgtcttggctgaggatggtaagaaaatgagcaagagtaaaaagaactatcctccacccaaggatctcattgatgagtttggagcggatgctctgcgactatatttggtaaactccccagttgtacgtgcagagtctctacgattcaaacgtactggtgtctttgctgttgtgaaagatgtcttcctcccatggtataacgcatatagattttttgtccaaaatgcaaagagactggaagttgagggtcttgcctcattttctccgatggaacaagtggtacttctgaagtcatccaatgtgttggatcactggataaactctgcaactgaaagtctagttagctttgttcaccaggagatggatgcatatcggctttacacggttgtgccgtatttggtaaaatacattgactatcttactaacatatatgtgcgtttgaaccgcaaacggttcaaagggcgtactggagaagaagactgcagaatttctctttcaacactctaccatgttcttgtaacaacttgcgtggtgatggctccatttacaccattctttactgaagttctttatcaaaatttgcggaaggtgtcaagtaattctgaggagagcatccacttttgcaagttcccttccacaactggcgagggaaatggtggttgtgcatccagacaatgacttccttgaagacatcactggcaaactaaaggagtatgtcatggaggaaatcaatgttaagaatgtcactccatgtaatgaccccttgatgtatgcttctctgcgagccgagcctaatttcagcgtgctaggaaaaagacttggaaaagacatgggaaaagtatcaaatgtggtgaagaagatgactcaggagcagatcttagcatttgaaaaaagtggagaggtttcattcttcggccattgcttgaagctagatgatatcaaggttgtccgacaattcaagcgtcctgaaaatgtgtcagagaaggagattgatgctgcaggagatggtgatgttttagtcattttggatctacgaaccgaccagtcattgtttgaagctggagtggctcgagaggttgtgaacaggatccagaaattacgaaagactgctcagcttgaacctgctgatccagttgatgtgtattacgaatctgtgggcaatgacaaaaacactctggaagagatattgaagtcacaggatcagtatattagagacgcacttggctcaccaatcgttccaaaggaaatggcaccaacagatgtcgtagtacttggcgaggaatcgcacaacgtacatgacatgtcatttgtcatatgcatcgcaaggtccaccccgattatttcaccagatcttctttctcatgcctcaggcaacagcaatcatgtcgaggcgttgagagtatatcttctgtcaaaatctctatccagattgaagaaccagttccaaagtggaaatggcgtgattacggtcgactgcatcgaaggttatccactaatcaggttacagctaggaaagcatgtttttctaagtgcaggggatttttatctggctagtcgatcctaatttttgtgtgcagcatcccaattttgactgattcacccatcattttgccgcaatcggcttaaacagcttggttccatttatgcattcagattcacttgttaaaggtgaaaaatcccaatttatgatataccatggtactctccgttctttttttatttgtcgtgttttagttcaaaaatgaactagccggtgacaaatatttttttttattttgtcgtgttttagttcaaaaataattagccggtgacaaatattcgagtaagctataggttcccatacccctagtgaattatgagtagataacatgtatgtttgtaatctcttgggtgtttggtttttgaggattgatgtggtccatcagattttgatgaatgaatgcatttcattt

SEQ ID NO: 215567 - DNA, 4159 bp, Zea Mays
aaatcgttaaaagttattcgatatacattttcacagttccatctaaaagtcactaaaaacaggtctagtggtgctttcaattttgcactgcgagaaagtcagttttttgaaaaaagctgctttcttgatccagtcctttgatttagcttttgacttttaggggataaaagtcaaaaccaaaagtcaaaccaaacacactcttaatctttgtgagtacgaatgatctatatctatatgatataggtacgctcaggagtgacagacgagagactattttttttggtgtgtgtatgatatgcgatatagccggtggcggtggggttgccatctctatctcggcgtgcagtcagtcagtcacagactccagcgagcgagggaccaaaaccctagctgaaccctcccggcccgcgcagcaactgcgtccatggaggtggacccctcgccgtcgtcgcgctcgcccaggccgccgcctccgccgctggcggcgatgccgagctacttcgacccggagtcgtccggccgtcgggaggagtaccgccgctacaggaagaggttgtcttcttcaaatgtctctcctctgctgggaagatcactctccaagacctctggaccaaggctgttatatgatggagaaagcatcccaagacagcctaatgccggtttactccttgaagacataaagcaggaagctgccgattattccaacgtagaaagcttggatggattgagactgttcggttcgccgaaaaggacatctctcgatggcggttctgcatcaggcgcagcttacagttcgggcaggcaagcagtgaggcagacgctgaagccagtcaaactggaggacgatatgtatgtgccacatgaaggagaaacgccttctacaatgtttgcaactctccttgattctgggatccaaggtttgatgcacttccctgatgtaattcaacaatttgagaggacatgtcgaaatgcttcggagtcaatcagatctgctgcaactggaaagcttcgtgtggtggaagagaaacttatgcagcaaaatgctcaacttttactggacgaagctgcttcctggtcacttctttggcacatatatggcaaagaacatgaggagctttctggagagctgttggtgccgccaattacatctcatcaggaggcttgccgctttgttgcagcagacattacagcacaactgtgtctgcggatcatactttggcttgaaggtcttgcttctgaagctcttgatttggagaagaaggtgagaggacctcatgttggttcgtacctaccaagttctggtgtttggcaccgtacacagaggtacctaaaaaggaacaatgctgattctactatagtgaagcatgtggattttgatgctccaactcgtgaaggggcccaacttcttcctgatgacaagaagcaagatgaattgcttctagaagatatatggactcttttaagagcaggaagattagaagaggcatctgacttgtgccgttctgctggccaggcatggagagttgccactctttgtccttttggcggcataaatatgttcccttccctgaatgcattgcacaaaaatggaaagtacagaacactacaagccatggaattagaaagtggtgttgggcggcagtggcgtctttggaaatgggcatcatattgtgcttcagagaaaatcgctgagcaagatggaggccgttatgagatggctgtatatgctttacaatgcagtaacttaaagcgtgtcttgccaatctgtactgactgggagtcagcttgttgggcaatggcaagatcctggctagatgttcaagtggatctagaattatctcagtaccaaacaagtagaccagaaaagcaacttgatgacgacatgaatggagcccaaagttcagttggtccagaaagttggccataccatgttcttgatcagcaacctcatgatttaactgctcttctgcagaaactccactcaagtgaccttgttcatgaaactgtctctcgagcatgccgagagcagcatcgacaaattcagatgaatctcatgagtggaaatatatctcatcttcttgaccttctatggtcatggttatcacctgctgaagagaaccataataatactgcaaggccccttgatgaccctgagatgatacggttcggggcgcatattgttcttgtgctgaggcaccttttcagtgatgggatggatgatgagttagatgaaaaactggttactgtcggtgatctcatcatcaacatgtacgtgaggtatttgttctcagaggatcaagaggagttggttggaatatatgcctcacagcttcaacatgacctttgcattactttgtttgtagaaatgatggaactaaggttaaatagcagtttgcatactatgtacaagctcttcctttctgctgtggagtatctgccattctcatctgataatgtatccaaggcttgttttgaagagatcatcgagagggtgctttcaagatctcggcaaacaaaacccactaagtatgatggggatttctctgatgttgcgcatcaacatcacctgcaatcacttcaaaaggctatggttattcagtggctttgcttcacaccaccatcctcgattccagactttcaaatgatcagttggaagcttctgatacgggcattgacacatagcaatacactgttcagggagttttctctgatatcaatgaggagagtccctgagctaccagcagggccacacaagttgcttgccattttagctgaaccgttaaagcaaaaagaaaatttaatttcacgggaagatccggaggtatctgataacttgccggagtttgaagattggcatgaatattactcccttgacgcgacttaccgcagttggcttaaaattgagatgatgaatgccgctgtttctcctgagatgctttcggcagaggaaaagggtcaagctgttgctgcagctaaagaaacactgaacttggcatgttcgttactacgcacaaaatcaggggatggaagaccatggctgtatgctgtcgagagcagtccatttgaatcccccgatgttattttccttgagctgcatgcttctgcaatgctctgcctaccttctggagaatgtatgttaccagatgcaacatcatgcacagctttgacaagtgcactatattcaactgtcagtgaagatgatgtgctgcatcgcctgttgaaggtggatgtccaggtctcttctagagacccctgctgtattgaagtcgctcttcgctgcttagcagcagaaggtgatggatatgggcttcatgaagccaacgatggaggtcttcttgctgcagtcatggctgctggctttaaaggtgaactcagtcggttccaacctggagtttcgatggcaatttcacggcttgatgcttggtattctgaccggagtggttccgtggagagcaccgctgcttacataattcgagggctgtgtcggaggtgctgccttcctgaaacaattctaagatctatgcaggcatgtatcgcactctccgcggctggtgatgatctagattactctctagataaatgtgacgaacttgttgagttagttggttcagccgagtctggaatgatgcatttgttcagccagcagcagttgcaggagttcctgattttcgagagggaatatctcatatgtacaatggagtttgaggaggaccggttgccttgtgatggctaagctttttccccacttgctgactaatccatgagacatgaccggcatgtgcattttgtggcgccgtgacccaagaacctgctgtgatgtatcgctacaccatttcaaagcgaaaagatggaatttagtgcgtaacgtggttctgcccgtttgtgcacgagaattggcccgttttggagagtcaatataagattattcaagtcgaaatccaagatttttgttcatgataaaaacaatgttcggcaagcctttttgtcccgcccgtgctacgcgcactccgcctcggctgcttttgcatcgatccgatctgccgtccctggacacgctgcagctgacaagggtcaccggcagcatcctctcaagtcaactcccagaacgacttcgtttcctgacttctgagcactgcctggacgcagtatgacaagccga

SEQ ID NO: 215568 - DNA, 3564 bp, Zea Mays
aaatcgttaaaagttattcgatatacattttcacagttccatctaaaagtcactaaaaacaggtctagtggtgctttcaattttgcactgcgagaaagtcagttttttgaaaaaagctgctttcttgatccagtcctttgatttagcttttgacttttaggggataaaagtcaaaaccaaaagtcaaaccaaacacactcttaatctttgtgagtacgaatgatctatatctatatgatataggtacgctcaggagtgacagacgagagactattttttttggtgtgtgtatgatatgcgatatagccggtggcggtggggttgccatctctatctcggcgtgcagtcagtcagtcacagactccagcgagcgagggaccaaaaccctagctgaaccctcccggcccgcgcagcaactgcgtccatggaggtggacccctcgccgtcgtcgcgctcgcccaggccgccgcctccgccgctggcggcgatgccgagctacttcgacccggagtcgtccggccgtcgggaggagtaccgccgctacaggaagaggttgtcttcttcaaatgtctctcctctgctgggaagatcactctccaagacctctggaccaaggctgttatatgatggagaaagcatcccaagacagcctaatgccggtttactccttgaagacataaagcaggaagctgccgattattccaacgtagaaagcttggatggattgagactgttcggttcgccgaaaaggacatctctcgatggcggttctgcatcaggcgcagcttacagttcgggcaggcaagcagtgaggcagacgctgaagccagtcaaactggaggacgatatgtatgtgccacatgaaggagaaacgccttctacaatgtttgcaactctccttgattctgggatccaaggtttgatgcacttccctgatgtaattcaacaatttgagaggacatgtcgaaatgcttcggagtcaatcagatctgctgcaactggaaagcttcgtgtggtggaagagaaacttatgcagcaaaatgctcaacttttactggacgaagctgcttcctggtcacttctttggcacatatatggcaaagaacatgaggagctttctggagagctgttggtgccgccaattacatctcatcaggaggcttgccgctttgttgcagcagacattacagcacaactgtgtctgcggatcatactttggcttgaaggtcttgcttctgaagctcttgatttggagaagaaggtgagaggacctcatgttggttcgtacctaccaagttctggtgtttggcaccgtacacagaggtacctaaaaaggaacaatgctgattctactatagtgaagcatgtggattttgatgctccaactcgtgaaggggcccaacttcttcctgatgacaagaagcaagatgaattgcttctagaagatatatggactcttttaagagcaggaagattagaagaggcatctgacttgtgccgttctgctggccaggcatggagagttgccactctttgtccttttggcggcataaatatgttcccttccctgaatgcattgcacaaaaatggaaagtacagaacactacaagccatggaattagaaagtggtgttgggcggcagtggcgtctttggaaatgggcatcatattgtgcttcagagaaaatcgctgagcaagatggaggccgttatgagatggctgtatatgctttacaatgcagtaacttaaagcgtgtcttgccaatctgtactgactgggagcttgttgggcaatggcaagatcctggctagatgttcaagtggatctagaattatctcagtaccaaacaagtagaccagaaaagcaacttgatgacgacatgaatggagcccaaagttcagttggtccagaaagttggccataccatgttcttgatcagcaacctcatgatttaactgctcttctgcagaaactccactcaagtgaccttgttcatgaaactgtctctcgagcatgccgagagcagcatcgacaaattcagatgaatctcatgagtggaaatatatctcatcttcttgaccttctatggtcatggttatcacctgctgaagagaaccataataatactgcaaggccccttgatgaccctgagatgatacggttcggggcgcatattgttcttgtgctgaggcaccttttcagtgatgggatggatgatgagttagatgaaaaactggttactgtcggtgatctcatcatcaacatgtacgtgaggtatttgttctcagaggatcaagaggagttggttggaatatatgcctcacagcttcaacatgacctttgcattactttgtttgtagaaatgatggaactaaggttaaatagcagtttgcatactatgtacaagctcttcctttctgctgtggagtatctgccattctcatctgataatgtatccaaggcttgttttgaagagatcatcgagagggtgctttcaagatctcggcaaacaaaacccactaagtatgatggggatttctctgatgttgcgcatcaacatcacctgcaatcacttcaaaaggctatggttattcagtggctttgcttcacaccaccatcctcgattccagactttcaaatgatcagttggaagcttctgatacgggcattgacacatagcaatacactgttcagggagttttctctgatatcaatgaggagagtccctgagctaccagcagggccacacaagttgcttgccattttagctgaaccgttaaagcaaaaagaaaatttaatttcacgggaagatccggagcatgaatattactcccttgacgcgacttaccgcagttggcttaaaattgagatgatgaatgccgctgtttctcctgagatgctttcggcagaggaaaagggtcaagctgttgctgcagctaaagaaacactgaacttggcatgttcgttactacgcaatgcaacatcatgcacagctttgacaagtgcactatattcaactgtcagtgaagatgatgtgctgcatcgcctgttgaaggtggatgtccaggtctcttctagagacccctgctgtattgaagttgctcttcgctgcttagcagcagaaggtgatggatatgggcttcatgaagccaacgatggaggtcttcttgctgcagtcatggctgctggctttaaaggtgaactcagtcggttccaacctggagtttcgatggcaatttcacggcttgatgcttggtattctgaccggagtggttccgtggagagcaccgctgcttacataattcgagggctgtgtcggaggtgctgccttcctgaaacaattctaagatctatgcaggcatgtatcgcactctccgcggctggtgatgatctagattactctctagataaatgtgacgaacttgttgagttagttggttcagccgagtctggaatgatgcatttgttcagccagcagcagttgcaggagttcctgattttcgagagggaatatctcatatgtacaatggagtttgaggaggaccggttgccttgtgatggctaa

SEQ ID NO: 215569 - DNA, 7414 bp, Zea Mays
aaatcgttaaaagttattcgatatacattttcacagttccatctaaaagtcactaaaaacaggtctagtggtgctttcaattttgcactgcgagaaagtcagttttttgaaaaaagctgctttcttgatccagtcctttgatttagcttttgacttttaggggataaaagtcaaaaccaaaagtcaaaccaaacacactcttaatctttgtgagtacgaatgatctatatctatatgatataggtacgctcaggagtgacagacgagagactattttttttggtgtgtgtatgatatgcgatatagccggtggcggtggggttgccatctctatctcggcgtgcagtcagtcagtcacagactccagcgagcgagggaccaaaaccctagctgaaccctcccggcccgcgcagcaactgcgtccatggaggtggacccctcgccgtcgtcgcgctcgcccaggccgccgcctccgccgctggcggcgatgccgagctacttcgacccggagtcgtccggccgtcgggaggagtaccgccgctacaggaagaggttgtcttcttcaaatgtctctcctctgctgggaagatcactctccaagacctctggaccaaggctgttatatgatggagaaagcatcccaagacagcctaatgccggtttactccttgaagacataaagcaggaagctgccgattattccaacgtagaaagcttggatggattgagactgttcggttcgccgaaaaggacatctctcgatggcggttctgcatcaggcgcagcttacagttcgggcaggcaagcagtgaggcagacgctgaagccagtcaaactggaggacgatatgtatgtgccacatgaaggagaaacgccttctacaatgtttgcaactctccttgattctgggatccaaggtttgatgcacttccctgatgtaattcaacaatttgagaggacatgtcgaaatgcttcggagtcaatcagatctgctgcaactggaaagcttcgtgtggtggaagagaaacttatgcagcaaaatgctcaacttttactggacgaagctgcttcctggtcacttctttggcacatatatggcaaagaacatgaggagctttctggagagctgttggtgccgccaattacatctcatcaggaggcttgccgctttgttgcagcagacattacagcacaactgtgtctgcggatcatactttggcttgaaggtcttgcttctgaagctcttgatttggagaagaaggtgagaggacctcatgttggttcgtacctaccaagttctggtgtttggcaccgtacacagaggtacctaaaaaggaacaatgctgattctactatagtgaagcatgtggattttgatgctccaactcgtgaaggggcccaacttcttcctgatgacaagaagcaagatgaattgcttctagaagatatatggactcttttaagagcaggaagattagaagaggcatctgacttgtgccgttctgctggccaggcatggagagttgccactctttgtccttttggcggcataaatatgttcccttccctgaatgcattgcacaaaaatggaaagtacagaacactacaagccatggaattagaaagtggtgttgggcggcagtggcgtctttggaaatgggcatcatattgtgcttcagagaaaatcgctgagcaagatggaggccgttatgagatggctgtatatgctttacaatgcagtaacttaaagcgtgtcttgccaatctgtactgactgggagtcagcttgttgggcaatggcaagatcctggctagatgttcaagtggatctagaattatctcagtaccaaacaagtagaccagaaaagcaacttgatgacgacatgaatggagcccaaagttcagttggtccagaaagttggccataccatgttcttgatcagcaacctcatgatttaactgctcttctgcagaaactccactcaagtgaccttgttcatgaaactgtctctcgagcatgccgagagcagcatcgacaaattcagatgaatctcatgagtggaaatatatctcatcttcttgaccttctatggtcatggttatcacctgctgaagagaaccataataatactgcaaggccccttgatgaccctgagatgatacggttcggggcgcatattgttcttgtgctgaggcaccttttcagtgatgggatggatgatgagttagatgaaaaactggttactgtcggtgatctcatcatcaacatgtacgtgaggtatttgttctcagaggatcaagaggagttggttggaatatatgcctcacagcttcaacatgacctttgcattactttgtttgtagaaatgatggaactaaggttaaatagcagtttgcatactatgtacaagctcttcctttctgctgtggagtatctgccattctcatctgataatgtatccaaggcttgttttgaagagatcatcgagagggtgctttcaagatctcggcaaacaaaacccactaagtatgatggggatttctctgatgttgcgcatcaacatcacctgcaatcacttcaaaaggctatggttattcagtggctttgcttcacaccaccatcctcgattccagactttcaaatgatcagttggaagcttctgatacgggcattgacacatagcaatacactgttcagggagttttctctgatatcaatgaggagagtccctgagctaccagcagggccacacaagttgcttgccattttagctgaaccgttaaagcaaaaagaaaatttaatttcacgggaagatccggaggtatctgataacttgccggagtttgaagattggcatgaatattactcccttgacgcgacttaccgcagttggcttaaaattgagatgatgaatgccgctgtttctcctgagatgctttcggcagaggaaaagggtcaagctgttgctgcagctaaagaaacactgaacttggcatgttcgttactacgcacaaaatcaggggatggaagaccatggctgtatgctgtcgagagcagtccatttgaatcccccgatgttattttccttgagctgcatgcttctgcaatgctctgcctaccttctggagaatgtatgttaccagatgcaacatcatgcacagctttgacaagtgcactatattcaactgtcagtgaagatgatgtgctgcatcgcctgttgaaggtggatgtccaggtctcttctagagacccctgctgtattgaagtcgctcttcgctgcttagcagcagaaggtgatggatatgggcttcatgaagccaacgatggaggtcttcttgctgcagtcatggctgctggctttaaaggtgaactcagtcggttccaacctggagtttcgatggcaatttcacggcttgatgcttggtattctgaccggagtggttccgtggagagcaccgctgcttacataattcgagggctgtgtcggaggtgctgccttcctgaaacaattctaagatctatgcaggcatgtatcgcactctccgcggctggtgatgatctagattactctctagataaatgtgacgaacttgttgagttagttggttcagccgagtctggaatgatgcatttgttcagccagcagcagttgcaggagttcctgattttcgagagggaatatctcatatgtacaatggagtttgaggaggaccggttgccttgtgatggctaagctttttccccacttgctgactaatccatgagacatgaccggcatgtgcattttgtggcgccgtgacccaagaacctgctgtgatgtatcgctacaccatttcaaagcgaaaagatggaatttagtgcgtaacgtggttctgcccgtttgtgcacgagaattggcccgttttggagagtcaatataagattattcaagtcgaaatccaagatttttgttcatgataaaaacaatgttcggcaagcctttttgtcccgcccgtgctacgcgcactccgcctcggctgcttttgcatcgatccgatctgccgtccctggacacgctgcagctgacaagggtcaccggcagttccatcccaaaggctgcgaaggcgcacacaagccaagttctactcaacatcgttccctaatcatggtagtaagcacactctgcagccgcttgccacttctacccaacatcatcgtcctcctcttgttcacaaccatttccgactccacgaacagcaacagcgatctcaatgcactcttgtcattcaaatccctcataacaaaggacccaatgggtgcactgtcatcttgggatggggacgcttctaacaggagcgctcctcatttctgccggtggaacggcgtgacgtgcagcagcgaccagcacggcagccatgtcactgccttgcgcctgcgagccttcggtctggaaggcaacatctcccagtcgcttgggaatcttagccacctccaaaccctggatctgtcgaacaacaacctagagggcgagataccttccagtatcggtttgatgcacttccctgatgtaattcaacaatttgagaggacatgtcgaaatgcttcggagtcaatcagatctgctgcaactggaaagcttcgtgtggtggaagagaaacttatgcagcaaaatgctcaacttttactggacgaagctgcttcctggtcactttggcacatatatggcaaagaacatgaggagctttctggagagctgttggtgccgccaattacatctcatcaggaggcttgccgctttgttgcagcagacattacagcacaactgtgtctgcggatcatactttggcttgaaggtcttgcttctgaagctcttgatttggagaagaaggtgagaggacctcatgttggttcgtacctaccaagttctggtgtttggcaccgtacacagaggtacctaaaaaggaacaatgctgattctactatagtgaagcatgtggattttgatgctccaactcgtgaaggggcccaacttcttcctgatgacaagacgtgctcaccattgccgacgcattgggctgctgcgctttgtccttgcattgggagcggcgcactgcacagatggatgttcctgccgaacattgtgactggaaacgacgccatcaccgctggaatcctcctggacatcaagccggtacaggcggtgcaacacccccagcgatggtggaattgggtcagacagctcgttccccatgaggaacagcaacctcagccccgtgagtggcgaaagaagcaagatgaattgcttctagaagatatatggactcttttaagagcaggaagattagaagaggcatctgacttgtgccgttctgctggccaggcatggagagttgccactctttgtccttttggcggcataaatatgttcccttccctgaatgcattgcacaaaaatggaaagtacagaacactacaagccatggaattagaaagtggtgttgggcggcagtggcgtctttggaaatgggcatcatattgtgcttcagagaaaatcgctgagcaagatggaggccgttatgagatggctgtatatgctttacaatgcagtaacttaaagcgtgtcttgccaatctgtactgactgggagtcagcttgttgggcaatggcaagatcctggctagatgttcaagtggatctagaattatctcagtaccaaacaagtagaccagaaaagcaacttgatgacgacatgaatggagcccaaagttcagttggtccagaaagttggccataccatgttcttgatcagcaacctcatgatttaactgctcttctgcagaaactccactcaagtgaccttgttcatgaaactgtctctcgagcatgccgagagcagcatcgacaaattcagatgaatctcatgagtggaaatatatctcatcttcttgaccttctatggtcatggttatcacctgctgaagagaaccataataatactgcaaggccccttgatgaccctgagatgatacggttcggggcgcatattgttcttgtgctgaggcaccttttcagtgatgggatggatgatgagttagatgaaaaactggttactgtcggtgatctcatcatcaacatgtacgtgaggtatttgttctcagaggatcaagaggagttggttggaatatatgcctcacagcttcaacatgacctttgcattactttgtttgtagaaatgatggaactaaggttaaatagcagtttgcatactatgtacaagctcttcctttctgctgtggagtatctgccattctcatctgataatgtatccaaggcttgttttgaagagatcatcgagagggtgctttcaagatctcggcaaacaaaacccactaagtatgatggggatttctctgatgttgcgcatcaacatcacctgcaatcacttcaaaaggctatggttattcagtggctttgcttcacaccaccatcctcgattccagactttcaaatgatcagttggaagcttctgatacgggcattgacacatagcaatacactgttcagggagttttctctgatatcaatgaggagagtccctgagctaccagcagggccacacaagttgcttgccattttagctgaaccgttaaagcaaaaagaaaatttaatttcacgggaagatccggagcatgaatattactcccttgacgcgacttaccgcagttggcttaaaattgagatgatgaatgccgctgtttctcctgagatgctttcggcagaggaaaagggtcaagctgttgctgcagctaaagaaacactgaacttggcatgttcgttactacgcaatgcaacatcatgcacagctttgacaagtgcactatattcaactgtcagtgaagatgatgtgctgcatcgcctgttgaaggtggatgtccaggtctcttctagagacccctgctgtattgaagttgctcttcgctgcttagcagcagaaggtgatggatatgggcttcatgaagccaacgatggaggtcttcttgctgcagtcatggctgctggctttaaaggtgaactcagtcggttccaacctggagtttcgatggcaatttcacggcttgatgcttggtattctgaccggagtggttccgtggagagcaccgctgcttacataattcgagggctgtgtcggaggtgctgccttcctgaaacaattctaagatctatgcaggcatgtatcgcactctccgcggctggtgatgatctagattactctctagataaatgtgacgaacttgttgagttagttggttcagccgagtctggaatgatgcatttgttcagccagcagcagttgcaggagttcctgattttcgagagggaatatctcatatgtacaatggagtttgaggaggaccggttgccttgtgatggctaa

SEQ ID NO: 215570 - DNA, 7702 bp, Zea Mays
aaatcgttaaaagttattcgatatacattttcacagttccatctaaaagtcactaaaaacaggtctagtggtgctttcaattttgcactgcgagaaagtcagttttttgaaaaaagctgctttcttgatccagtcctttgatttagcttttgacttttaggggataaaagtcaaaaccaaaagtcaaaccaaacacactcttaatctttgtgagtacgaatgatctatatctatatgatataggtacgctcaggagtgacagacgagagactattttttttggtgtgtgtatgatatgcgatatagccggtggcggtggggttgccatctctatctcggcgtgcagtcagtcagtcacagactccagcgagcgagggaccaaaaccctagctgaaccctcccggcccgcgcagcaactgcgtccatggaggtggacccctcgccgtcgtcgcgctcgcccaggccgccgcctccgccgctggcggcgatgccgagctacttcgacccggagtcgtccggccgtcgggaggagtaccgccgctacaggaagaggttgtcttcttcaaatgtctctcctctgctgggaagatcactctccaagacctctggaccaaggctgttatatgatggagaaagcatcccaagacagcctaatgccggtttactccttgaagacataaagcaggaagctgccgattattccaacgtagaaagcttggatggattgagactgttcggttcgccgaaaaggacatctctcgatggcggttctgcatcaggcgcagcttacagttcgggcaggcaagcagtgaggcagacgctgaagccagtcaaactggaggacgatatgtatgtgccacatgaaggagaaacgccttctacaatgtttgcaactctccttgattctgggatccaaggtttgatgcacttccctgatgtaattcaacaatttgagaggacatgtcgaaatgcttcggagtcaatcagatctgctgcaactggaaagcttcgtgtggtggaagagaaacttatgcagcaaaatgctcaacttttactggacgaagctgcttcctggtcacttctttggcacatatatggcaaagaacatgaggagctttctggagagctgttggtgccgccaattacatctcatcaggaggcttgccgctttgttgcagcagacattacagcacaactgtgtctgcggatcatactttggcttgaaggtcttgcttctgaagctcttgatttggagaagaaggtgagaggacctcatgttggttcgtacctaccaagttctggtgtttggcaccgtacacagaggtacctaaaaaggaacaatgctgattctactatagtgaagcatgtggattttgatgctccaactcgtgaaggggcccaacttcttcctgatgacaagaagcaagatgaattgcttctagaagatatatggactcttttaagagcaggaagattagaagaggcatctgacttgtgccgttctgctggccaggcatggagagttgccactctttgtccttttggcggcataaatatgttcccttccctgaatgcattgcacaaaaatggaaagtacagaacactacaagccatggaattagaaagtggtgttgggcggcagtggcgtctttggaaatgggcatcatattgtgcttcagagaaaatcgctgagcaagatggaggccgttatgagatggctgtatatgctttacaatgcagtaacttaaagcgtgtcttgccaatctgtactgactgggagtcagcttgttgggcaatggcaagatcctggctagatgttcaagtggatctagaattatctcagtaccaaacaagtagaccagaaaagcaacttgatgacgacatgaatggagcccaaagttcagttggtccagaaagttggccataccatgttcttgatcagcaacctcatgatttaactgctcttctgcagaaactccactcaagtgaccttgttcatgaaactgtctctcgagcatgccgagagcagcatcgacaaattcagatgaatctcatgagtggaaatatatctcatcttcttgaccttctatggtcatggttatcacctgctgaagagaaccataataatactgcaaggccccttgatgaccctgagatgatacggttcggggcgcatattgttcttgtgctgaggcaccttttcagtgatgggatggatgatgagttagatgaaaaactggttactgtcggtgatctcatcatcaacatgtacgtgaggtatttgttctcagaggatcaagaggagttggttggaatatatgcctcacagcttcaacatgacctttgcattactttgtttgtagaaatgatggaactaaggttaaatagcagtttgcatactatgtacaagctcttcctttctgctgtggagtatctgccattctcatctgataatgtatccaaggcttgttttgaagagatcatcgagagggtgctttcaagatctcggcaaacaaaacccactaagtatgatggggatttctctgatgttgcgcatcaacatcacctgcaatcacttcaaaaggctatggttattcagtggctttgcttcacaccaccatcctcgattccagactttcaaatgatcagttggaagcttctgatacgggcattgacacatagcaatacactgttcagggagttttctctgatatcaatgaggagagtccctgagctaccagcagggccacacaagttgcttgccattttagctgaaccgttaaagcaaaaagaaaatttaatttcacgggaagatccggaggtatctgataacttgccggagtttgaagattggcatgaatattactcccttgacgcgacttaccgcagttggcttaaaattgagatgatgaatgccgctgtttctcctgagatgctttcggcagaggaaaagggtcaagctgttgctgcagctaaagaaacactgaacttggcatgttcgttactacgcacaaaatcaggggatggaagaccatggctgtatgctgtcgagagcagtccatttgaatcccccgatgttattttccttgagctgcatgcttctgcaatgctctgcctaccttctggagaatgtatgttaccagatgcaacatcatgcacagctttgacaagtgcactatattcaactgtcagtgaagatgatgtgctgcatcgcctgttgaaggtggatgtccaggtctcttctagagacccctgctgtattgaagtcgctcttcgctgcttagcagcagaaggtgatggatatgggcttcatgaagccaacgatggaggtcttcttgctgcagtcatggctgctggctttaaaggtgaactcagtcggttccaacctggagtttcgatggcaatttcacggcttgatgcttggtattctgaccggagtggttccgtggagagcaccgctgcttacataattcgagggctgtgtcggaggtgctgccttcctgaaacaattctaagatctatgcaggcatgtatcgcactctccgcggctggtgatgatctagattactctctagataaatgtgacgaacttgttgagttagttggttcagccgagtctggaatgatgcatttgttcagccagcagcagttgcaggagttcctgattttcgagagggaatatctcatatgtacaatggagtttgaggaggaccggttgccttgtgatggctaagctttttccccacttgctgactaatccatgagacatgaccggcatgtgcattttgtggcgccgtgacccaagaacctgctgtgatgtatcgctacaccatttcaaagcgaaaagatggaatttagtgcgtaacgtggttctgcccgtttgtgcacgagaattggcccgttttggagagtcaatataagattattcaagtcgaaatccaagatttttgttcatgataaaaacaatgttcggcaagcctttttgtcccgcccgtgctacgcgcactccgcctcggctgcttttgcatcgatccgatctgccgtccctggacacgctgcagctgacaagggtcaccggcagttccatcccaaaggctgcgaaggcgcacacaagccaagttctactcaacatcgttccctaatcatggtagtaagcacactctgcagccgcttgccacttctacccaacatcatcgtcctcctcttgttcacaaccatttccgactccacgaacagcaacagcgatctcaatgcactcttgtcattcaaatccctcataacaaaggacccaatgggtgcactgtcatcttgggatggggacgcttctaacaggagcgctcctcatttctgccggtggaacggcgtgacgtgcagcagcgaccagcacggcagccatgtcactgccttgcgcctgcgagccttcggtctggaaggcaacatctcccagtcgcttgggaatcttagccacctccaaaccctggatctgtcgaacaacaacctagagggcgagataccttccagtatcggtaacttgtttgctctccattttctcaacctaagtgttaaccacctgtccgggaacgttcctcagtccatcggccgtctttccgaactcgaaattctgaatttccgcgacaatgacatcgtaggaagcatcccttcttcagtgctgaaccttacaggactcacaatgcttagtgccaccgaaaactacatgacagggaggattccagattggttggggaacttgacagatctgacagatttgaacttggcatggaataacttcagtggacagatcccacaagctttaggtttgatgcacttccctgatgtaattcaacaatttgagaggacatgtcgaaatgcttcggagtcaatcagatctgctgcaactggaaagcttcgtgtggtggaagagaaacttatgcagcaaaatgctcaacttttactggacgaagctgcttcctggtcactttggcacatatatggcaaagaacatgaggagctttctggagagctgttggtgccgccaattacatctcatcaggaggcttgccgctttgttgcagcagacattacagcacaactgtgtctgcggatcatactttggcttgaaggtcttgcttctgaagctcttgatttggagaagaaggtgagaggacctcatgttggttcgtacctaccaagttctggtgtttggcaccgtacacagaggtacctaaaaaggaacaatgctgattctactatagtgaagcatgtggattttgatgctccaactcgtgaaggggcccaacttcttcctgatgacaagacgtgctcaccattgccgacgcattgggctgctgcgctttgtccttgcattgggagcggcgcactgcacagatggatgttcctgccgaacattgtgactggaaacgacgccatcaccgctggaatcctcctggacatcaagccggtacaggcggtgcaacacccccagcgatggtggaattgggtcagacagctcgttccccatgaggaacagcaacctcagccccgtgagtggcgaaagaagcaagatgaattgcttctagaagatatatggactcttttaagagcaggaagattagaagaggcatctgacttgtgccgttctgctggccaggcatggagagttgccactctttgtccttttggcggcataaatatgttcccttccctgaatgcattgcacaaaaatggaaagtacagaacactacaagccatggaattagaaagtggtgttgggcggcagtggcgtctttggaaatgggcatcatattgtgcttcagagaaaatcgctgagcaagatggaggccgttatgagatggctgtatatgctttacaatgcagtaacttaaagcgtgtcttgccaatctgtactgactgggagtcagcttgttgggcaatggcaagatcctggctagatgttcaagtggatctagaattatctcagtaccaaacaagtagaccagaaaagcaacttgatgacgacatgaatggagcccaaagttcagttggtccagaaagttggccataccatgttcttgatcagcaacctcatgatttaactgctcttctgcagaaactccactcaagtgaccttgttcatgaaactgtctctcgagcatgccgagagcagcatcgacaaattcagatgaatctcatgagtggaaatatatctcatcttcttgaccttctatggtcatggttatcacctgctgaagagaaccataataatactgcaaggccccttgatgaccctgagatgatacggttcggggcgcatattgttcttgtgctgaggcaccttttcagtgatgggatggatgatgagttagatgaaaaactggttactgtcggtgatctcatcatcaacatgtacgtgaggtatttgttctcagaggatcaagaggagttggttggaatatatgcctcacagcttcaacatgacctttgcattactttgtttgtagaaatgatggaactaaggttaaatagcagtttgcatactatgtacaagctcttcctttctgctgtggagtatctgccattctcatctgataatgtatccaaggcttgttttgaagagatcatcgagagggtgctttcaagatctcggcaaacaaaacccactaagtatgatggggatttctctgatgttgcgcatcaacatcacctgcaatcacttcaaaaggctatggttattcagtggctttgcttcacaccaccatcctcgattccagactttcaaatgatcagttggaagcttctgatacgggcattgacacatagcaatacactgttcagggagttttctctgatatcaatgaggagagtccctgagctaccagcagggccacacaagttgcttgccattttagctgaaccgttaaagcaaaaagaaaatttaatttcacgggaagatccggagcatgaatattactcccttgacgcgacttaccgcagttggcttaaaattgagatgatgaatgccgctgtttctcctgagatgctttcggcagaggaaaagggtcaagctgttgctgcagctaaagaaacactgaacttggcatgttcgttactacgcaatgcaacatcatgcacagctttgacaagtgcactatattcaactgtcagtgaagatgatgtgctgcatcgcctgttgaaggtggatgtccaggtctcttctagagacccctgctgtattgaagttgctcttcgctgcttagcagcagaaggtgatggatatgggcttcatgaagccaacgatggaggtcttcttgctgcagtcatggctgctggctttaaaggtgaactcagtcggttccaacctggagtttcgatggcaatttcacggcttgatgcttggtattctgaccggagtggttccgtggagagcaccgctgcttacataattcgagggctgtgtcggaggtgctgccttcctgaaacaattctaagatctatgcaggcatgtatcgcactctccgcggctggtgatgatctagattactctctagataaatgtgacgaacttgttgagttagttggttcagccgagtctggaatgatgcatttgttcagccagcagcagttgcaggagttcctgattttcgagagggaatatctcatatgtacaatggagtttgaggaggaccggttgccttgtgatggctaa

SEQ ID NO: 215571 - DNA, 2551 bp, Zea Mays
cacaggggcacgcgaagagcagcgggaaaaagaaacctagtctcatgataccatgaaagcaatgtaattgcacaagaaattagtagatttattaggaggcaatagacactggtacatatattggcaaggaggacccaagagagtgaccgattgggtatctcagtgcaaggaatttcttgagagaagaacatctcctgaagcaacaaaagccttagaattgatctccaatgcattgcacatatgtccacattcggacagcgtcaaggagatgaaagcagaggcattgttgatgctacgaagatatgaagaagtgattcaactatgccaagagtctgtgaatctgactgaaagaaattcagttttattcaaagacaatggagaaccaaagaattccagagtctctgaacggatgcagttttctggaaggtattggcggccctacctcatttgcaagtcttatttcctttcaggcaagcttgatgaggctcttgaattgttaaagaaacatgagcaagtcacacctgtcaaagaaagtgaagtgaacacatatgaagaaaaattctcatcattgtcagcgactataagagaactactttctcttaaggctgctggaaatgaatcatttcaagctggtagatattcagatgctgtcaaacagtattcagcagctttggcatggaatagtgaatcacgcccattttcagctgtatgtttttgcaatcgtgcagcggcttatcaagcactcggtcaagttactgatgcaatatcagattgttcacttgccatggttcttgatacaaattatccaaaggcaatttcaagacgagccaccttatacaagatgataagggattatgaccaagctgctaatgatgtaaggaagctaatctctcttcttgaaaagaaagtcaatgtgtctggagtatcaccaaaagcttttaacaagcacaatgatctcaagcaagcacatgtgaggctttcatccatagaggatgaagcaaaaaatgacacccccctgaatttgtatttaatcttgggagtggagccatcctgctcttcagaagatattaagaaggcataccggaaagcagcattgagacatcacccagacaaggctactcaattattaataaggaacgagaacgcagaagatggattttggagggatgttgtcaaggaagtctatgcagacgctgatcatctgttcaaaacaattggggaggcatataatgttctttctgacccggccaagcgtgaagagtacaactttgaagaggatctaagaaatgccaggaggagagtatctagttctaggagcatgcataggtcacctgaacagaactacagcaacagaggctttaatccacgccagcggcagtcaagcagagcatcacgttcacgttggtacagcaattcagacgattactggtaaagaagccattacatatggagtgggcatgtggtgcgaagcaacttttgcatgtgtggagcaaaaggcctccttgcaccaagatggcacctgcctttctggggttttttaggtgccggtgctgacgcaccagccttcgcagtctcagctttcgtgtctgtttgctgtgtttcttttccagagggtcagccttcgcagtctcagctttcgtgtctgtttgctgtgtttcttttccagagggtgaaaatattaggattgatcaactggggatctgggatgattggttgacacttgattagcacagaaaatacgtgggattaggaagtggtacatcaaattatcttttgttggcctggtgatttctgaacactgactgcttgggagtggctggcatgatggtatccactcttgaggagttgaacactgagaacaacttcgaaggttaggagcaaggataaagatgttggttcctcgaatatctgcaggcactcttttgctggatgcatggctactgtttagcacgggcagtttgcagcagatcaactggaaggagacatgctcagatgctcctgtttggcgcgtgcagttctgttctgttgcttctgtttaatccaaacgacgtagcgctggaaacagagtggctacatattacaactggctaactgctcaatgtcggaactcggaatcacgattttttatttattcattgttattagaggttttagctagcccaatgttgagagtattttattcagatcaaggttccttcgaagaaaaaagaggctcgggttacggtgacattggccaattgcaggttctgtcatgttgcttatgatgaaatatttggaacgacttaaacccttggactgctgcatatgtttttttttgcgtgaacgtttcgttgataaacgggatatatacacatattcgaaggccttaaggcacaaagaaaaggagactaattaagggtgtgtttggttggagagtcaactaaaatgagcgaaatgagcggctgtattacagtttttgagaatgaatctattctattttatgtttggcaaacagaatttagccgctctattttttatttgattgaagagtatatttagttggaaagctgga

SEQ ID NO: 215572 - DNA, 5240 bp, Zea Mays
ccaccggcggtagcgctcgcttcgccgcgccaaaaacctagcggctccgagctccccgccgcctccgtggcttatatggcgaacccgggcctagggcttggactcgcgccaccgggcgccgagccctccgccggagcgccgccctcttcacgtcgcgcgccgcgcttggccaaacggcgccacgcgcccgcctcctcccgctcccgcatgccgcagacctcagccggaatatggaacccgtttggtggtggcggaggtacggatagacagaccggaggctttgtgtttggtgctgcttcggcagtgagccaacagcctttggagccagcagtgtcagtagcttcacccactgaggcgcccttcgtgtttgggagcgtgagggagagcctgcctcggtttgacgagggatcgcccgcttcatcaaagctccctgataagatggagaagttgaacctgcgaacatcaagtgaggttgacgatggtctcggtcaggggagggatcgaaaggatggaagttcggtatttggtgctgatatatctggtttgttttctagtaacaaggaatctaatgtgctccaggagaagcttacacagttgaatttaggccacaaagaacccttgcaaagtaagaagagggatagtgctaatggtgtgccgcaagcatttgtgtttggaggtaatggagctgggagttttgctgactgtaagaacaaagccgcccctggtgcacattcagatgatcctagttcagttcatggcactgatgcaaaaggtatggctgggaagtcgatgcagttcaatataggcagtcaagcaccttccaggggtggggggattgatcgtactaatggagcaccagaagctttcacgtttcgaagtaccacattaagtggtcatgtggataatataaacaatgttgactctggtgccaataccagttcttccactgttgctaaatgtgtttgtgatgcagattttcctctggaaaagataacacggttgtgtataggaagtgacatgcccttgcatgagacgaaaagtggttatcaacccaaagtgtttacgtttggaagtggaggaatcccaggcgctgtttttgggaaggaaactggcagcacatcagataggagcagtgaattcctctctgcaaatagcaatacttctagttcaagcagtgattttttctctacagcaaatagcaacgtttctaattccgctaatggcacttattgtttgccaccagagaagacaccagatttgaatgcaggagacagagtcatgtcacagagcttggaaggtgataattctaattgtccaacagagacctttctatttgaaagaaatgaaacccgaagctctgtttcgcactctgcaagcatagccatggatgacggtgggaattttgtcaatgatgaaaatactgacacctgtagttcagctcacagtacagtggagtgtgcaggtgctctcccagagaagatgacaaagttaggtataggatgcagaattccacatcatagcaggaaagatgaaactgctaccgatccaccagaagtatatgtatttggatgtaatctttctagcttttcttctgcccagacttcaagtaaatcgaatgatcgcacgactcctgaattttgttttcaaagcaaaacaggggcaacttcaggatatggtgctgttccccaaaccaaagttcaggattcatacccatttacaattttgaataattcatgtactttctctacttttgagaatgcagttcctgctttcagttttgggacactgaatgcagaaacagaaacagctccagatgatcctttttctttttctgtcaaacatgatttgcctgggtattccagagagaccttatttggtttagacagtataaaatctgcatacaaggacaaaagggaagcatgtaaaggaaaaatgaaaaacaagaggccaactaggctaaagcaacatgctcagctccatcaggttatttctaaggaagcctgtaccagtggagaagcatcagatttagcaggtgactgttcaccaatggattgttcgccatatcctgcagaatctgaacatgtgccaacagaggcatatgtggcttctgatcagcccgttcacataggtgatactgttatctcgaacgggaacaccagttgtgctgaggatgatgtagtttctgcagccgagcacttggttactgatgcagacctactgatgtttggagatgaaggtagaggaccgaaactagatgcatctgagagcaattttggtagcagcgtttctagttttgaaggagatcaaagcaatgcatcacaacattctttcactaatattgggcaaaactgtaatgagaatacctacagaactccccatgattttgttgaggctgctgcttttcaatcaaactcatcaaatttcagtgggctgaactttagattcggtgtgtcatcctctccacaaatctctgctgcggcacaaagacgtagcacaagaaggaagttaagaacaaagggtagtctagcatcgaaaccttcaactatcgactctttagaacagccaaaatcttcacaagatactaagggcatgcagtttttctgtgaagcaagtaaaaatgaagactcagtgaaagcgcaacaatcaagagattcttctacttctgtggccttggagacttgtgaaacctggcgtactagtggaaataaagcctatgcaaatggacattttactgctgcagaggattattatacccgtggaataaactctgttacccacaatggcgtttctggacaatgttcccgtgcattgatgctgtgttacagcaaccgtgcagctacaagaatgtcacttggcatgatgtgggaggcgcttcaggattgtttgactgctacatcaattgaccccacttttcttaaagctaaagttagagctgccaagtgccagcttgcattgggcgatcttgaagatgcatcaatgagttacatgtcctgtttgaacagtaacaccgagagctctgaccctaaaatatttgctgaggcttctgatggtttggaaggagtcaagagagtgaccgattgggtatctcagtgcaaggaatttcttgagagaagaacatctcctgaagcaacaaaagccttagaattgatctccaatgcattgcacatatgtccacattcggacagcgtcaaggagatgaaagcagaggcattgttgatgctacgaagatatgaagaagtgattcaactatgccaagagtctgtgaatctgactgaaagaaattcagttttattcaaagacaatggagaaccaaagaattccagagtctctgaacggatgcagttttctggaaggtattggcggccctacctcatttgcaagtcttatttcctttcaggcaagcttgatgaggctcttgaattgttaaagaaacatgagcaagtcacacctgtcaaagaaagtgaagtgaacacatatgaagaaaaattctcatcattgtcagcgactataagagaactactttctcttaaggctgctggaaatgaatcatttcaagctggtagatattcagatgctgtcaaacagtattcagcagctttggcatggaatagtgaatcacgcccattttcagctgtatgtttttgcaatcgtgcagcggcttatcaagcactcggtcaagttactgatgcaatatcagattgttcacttgccatggttcttgatacaaattatccaaaggcaatttcaagacgagccaccttatacaagatgataagggattatgaccaagctgctaatgatgtaaggaagctaatctctcttcttgaaaagaaagtcaatgtgtctggagtatcaccaaaagcttttaacaagcacaatgatctcaagcaagcacatgtgaggctttcatccatagaggatgaagcaaaaaatgacacccccctgaatttgtatttaatcttgggagtggagccatcctgctcttcagaagatattaagaaggcataccggaaagcagcattgagacatcacccagacaaggctactcaattattaataaggaacgagaacgcagaagatggattttggagggatgttgtcaaggaagtctatgcagacgctgatcatctgttcaaaacaattggggaggcatataatgttctttctgacccggccaagcgtgaagagtacaactttgaagaggatctaagaaatgccaggaggagagtatctagttctaggagcatgcataggtcacctgaacagaactacagcaacagaggctttaatccacgccagcggcagtcaagcagagcatcacgttcacgttggtacagcaattcagacgattactgagggtgaaaatattaggattgatcaactggggatctgggatgattggttgacacttgattagcacagaaaatacgtgggattaggaagtggtacatcaaattatcttttgttggcctggtgatttctgaacactgactgcttgggagtggctggcatgatggtatccactcttgaggagttgaacactgagaacaacttcgaaggttaggagcaaggataaagatgttggttcctcgaatatctgcaggcactcttttgctggatgcatggctactgtttagcacgggcagtttgcagcagatcaactggaaggagacatgctcagatgctcctgtttggcgcgtgcagttctgttctgttgcttctgtttaatccaaacgacgtagcgctggaaacagagtggctacatattacaactggctaactgctcaatgtcggaactcggaatcacgattttttatttattcattgttattagaggttttagctagcccaatgttgagagtattttattcagatcaaggttccttcgaagaaaaaagaggctcgggttacggtgacattggccaattgcaggttctgtcatgttgcttatgatgaaatatttggaacgacttaaacccttggactgctgcatatgtttttttttgcgtgaacgtttcgttgataaacgggatatatacacatattcgaaggccttaaggcacaaagaaaaggagactaattaagggtgtgtttggttggagagtcaactaaaatgagcgaaatgagcggctgtattacagtttttgagaatgaatctattctattttatgtttggcaaacagaatttagccgctctattttttatttgattgaagagtatatttagttggaaagctgga

SEQ ID NO: 215573 - DNA, 5492 bp, Zea Mays
gtcctcgcctcctcggccccctcgaatcacacgcgccccgcctcattcgtccattccccagccttccagagcccgccgccgccggccgctgctcccccgacgcgggggaagccaccggcggtagcgctcgcttcgccgcgccaaaaacctagcggctccgagctccccgccgcctccgtggcttatatggcgaacccgggcctagggcttggactcgcgccaccgggcgccgagccctccgccggagcgccgccctcttcacgtcgcgcgccgcgcttggccaaacggcgccacgcgcccgcctcctcccgctcccgcatgccgcagacctcagccggaatatggaacccgtttggtggtggcggaggtacggatagacagaccggaggctttgtgtttggtgctgcttcggcagtgagccaacagcctttggagccagcagtgtcagtagcttcacccactgaggcgcccttcgtgtttgggagcgtgagggagagcctgcctcggtttgacgagggatcgcccgcttcatcaaagctccctgataagatggagaagttgaacctgcgaacatcaagtgaggttgacgatggtctcggtcaggggagggatcgaaaggatggaagttcggtatttggtgctgatatatctggtttgttttctagtaacaaggaatctaatgtgctccaggagaagcttacacagttgaatttaggccacaaagaacccttgcaaagtaagaagagggatagtgctaatggtgtgccgcaagcatttgtgtttggaggtaatggagctgggagttttgctgactgtaagaacaaagccgcccctggtgcacattcagatgatcctagttcagttcatggcactgatgcaaaaggtatggctgggaagtcgatgcagttcaatataggcagtcaagcaccttccaggggtggggggattgatcgtactaatggagcaccagaagctttcacgtttcgaagtaccacattaagtggtcatgtggataatataaacaatgttgactctggtgccaataccagttcttccactgttgctaaatgtgtttgtgatgcagattttcctctggaaaagataacacggttgtgtataggaagtgacatgcccttgcatgagacgaaaagtggttatcaacccaaagtgtttacgtttggaagtggaggaatcccaggcgctgtttttgggaaggaaactggcagcacatcagataggagcagtgaattcctctctgcaaatagcaatacttctagttcaagcagtgattttttctctacagcaaatagcaacgtttctaattccgctaatggcacttattgtttgccaccagagaagacaccagatttgaatgcaggagacagagtcatgtcacagagcttggaaggtgataattctaattgtccaacagagacctttctatttgaaagaaatgaaacccgaagctctgtttcgcactctgcaagcatagccatggatgacggtgggaattttgtcaatgatgaaaatactgacacctgtagttcagctcacagtacagtggagtgtgcaggtgctctcccagagaagatgacaaagttaggtataggatgcagaattccacatcatagcaggaaagatgaaactgctaccgatccaccagaagtatatgtatttggatgtaatctttctagcttttcttctgcccagacttcaagtaaatcgaatgatcgcacgactcctgaattttgttttcaaagcaaaacaggggcaacttcaggatatggtgctgttccccaaaccaaagttcaggattcatacccatttacaattttgaataattcatgtactttctctacttttgagaatgcagttcctgctttcagttttgggacactgaatgcagaaacagaaacagctccagatgatcctttttctttttctgtcaaacatgatttgcctgggtattccagagagaccttatttggtttagacagtataaaatctgcatacaaggacaaaagggaagcatgtaaaggaaaaatgaaaaacaagaggccaactaggctaaagcaacatgctcagctccatcaggttatttctaaggaagcctgtaccagtggagaagcatcagatttagcaggtgactgttcaccaatggattgttcgccatatcctgcagaatctgaacatgtgccaacagaggcatatgtggcttctgatcagcccgttcacataggtgatactgttatctcgaacgggaacaccagttgtgctgaggatgatgtagtttctgcagccgagcacttggttactgatgcagacctactgatgtttggagatgaaggtagaggaccgaaactagatgcatctgagagcaattttggtagcagcgtttctagttttgaaggagatcaaagcaatgcatcacaacattctttcactaatattgggcaaaactgtaatgagaatacctacagaactccccatgattttgttgaggctgctgcttttcaatcaaactcatcaaatttcagtgggctgaactttagattcggtgtgtcatcctctccacaaatctctgctgcggcacaaagacgtagcacaagaaggaagttaagaacaaagggtagtctagcatcgaaaccttcaactatcgactctttagaacagccaaaatcttcacaagatactaagggcatgcagtttttctgtgaagcaagtaaaaatgaagactcagtgaaagcgcaacaatcaagagattcttctacttctgtggccttggagacttgtgaaacctggcgtactagaggattattatacccgtggaataaactctgttacccacaatggcgtttctggacaatgttcccgtgcattgatgctgtgttacagcaaccgtgcagctacaagaatgtcacttggcatgatgtgggaggcgcttcaggattgtttgactgctacatcaattgaccccacttttcttaaagctaaagttagagctgccaagtgccagcttgcattgggcgatcttgaagatgcatcaatgagttacatgtcctgtttgaacagtaacaccgagagctctgaccctaaaatatttgctgaggcttctgatggtttggaaggagtcaagagagtgaccgattgggtatctcagtgcaaggaatttcttgagagaagaacatctcctgaagcaacaaaagccttagaattgatctccaatgcattgcacatatgtccacattcggacagcgtcaaggagatgaaagcagaggcattgttgatgctacgaagatatgaagaagtgattcaactatgccaagagtctgtgaatctgactgaaagaaattcagttttattcaaagacaatggagaaccaaagaattccagagtctctgaacggatgcagttttctggaaggtattggcggccctacctcatttgcaagtcttatttcctttcaggcaagcttgatgaggctcttgaattgttaaagaaacatgagcaagtcacacctgtcaaagaaagtgaagtgaacacatatgaagaaaaattctcatcattgtcagcgactataagagaactactttctcttaaggctgctggaaatgaatcatttcaagctggtagatattcagatgctgtcaaacagtattcagcagctttggcatggaatagtgaatcacgcccattttcagctgtatgtttttgcaatcgtgcagcggcttatcaagcactcggtcaagttactgatgcaatatcagattgttcacttgccatggttcttgatacaaattatccaaaggcaatttcaagacgagccaccttatacaagatgataagggattatgaccaagctgctaatgatgtaaggaagctaatctctcttcttgaaaagaaagtcaatgtgtctggagtatcaccaaaagcttttaacaagcacaatgatctcaagcaagcacatgtgaggctttcatccatagaggatgaagcaaaaaatgacacccccctgaatttgtatttaatcttgggagtggagccatcctgctcttcagaagatattaagaaggcataccggaaagcagcattgagacatcacccagacaaggctactcaattattaataaggaacgagaacgcagaagatggattttggagggatgttgtcaaggaagtctatgcagacgctgatcatctgttcaaaacaattggggaggcatataatgttctttctgacccggccaagcgtgaagagtacaactttgaagaggatctaagaaatgccaggaggagagtatctagttctaggagcatgcataggtcacctgaacagaactacagcaacagaggctttaatccacgccagcggcagtcaagcagagcatcacgttcacgttggtacagcaattcagacgattactggtaaagaagccattacatatggagtgggcatgtggtgcgaagcaacttttgcatgtgtggagcaaaaggcctccttgcaccaagatggcacctgcctttctggggttttttaggtgccggtgctgacgcaccagccttcgcagtctcagctttcgtgtctgtttgctgtgtttcttttccagagggtgaaaatattaggattgatcaactggggatctgggatgattggttgacacttgattagcacagaaaatacgtgggattaggaagtggtacatcaaattatcttttgttggcctggtgatttctgaacactgactgcttgggagtggctggcatgatggtatccactcttgaggagttgaacactgagaacaacttcgaaggttaggagcaaggataaagatgttggttcctcgaatatctgcaggcactcttttgctggatgcatggctactgtttagcacgggcagtttgcagcagatcaactggaaggagacatgctcagatgctcctgtttggcgcgtgcagttctgttctgttgcttctgtttaatccaaacgacgtagcgctggaaacagagtggctacatattacaactggctaactgctcaatgtcggaactcggaatcacgattttttatttattcattgttattagaggttttagctagcccaatgttgagagtattttattcagatcaaggttccttcgaagaaaaaagaggctcgggttacggtgacattggccaattgcaggttctgtcatgttgcttatgatgaaatatttggaacgacttaaacccttggactgctgcatatgtttttttttgcgtgaacgtttcgttgataaacgggatatatacacatattcgaaggccttaaggcacaaagaaaaggagactaattaagggtgtgtttggttggagagtcaactaaaatgagcgaaatgagcggctgtattacagtttttgagaatgaatctattctattttatgtttggcaaacagaatttagccgctctattttttatttgattgaagagtatatttagttggaaagctgga

SEQ ID NO: 215574 - DNA, 5598 bp, Zea Mays
gtcctcgcctcctcggccccctcgaatcacacgcgccccgcctcattcgtccattccccagccttccagagcccgccgccgccggccgctgctcccccgacgcgggggaagccaccggcggtagcgctcgcttcgccgcgccaaaaacctagcggctccgagctccccgccgcctccgtggcttatatggcgaacccgggcctagggcttggactcgcgccaccgggcgccgagccctccgccggagcgccgccctcttcacgtcgcgcgccgcgcttggccaaacggcgccacgcgcccgcctcctcccgctcccgcatgccgcagacctcagccggaatatggaacccgtttggtggtggcggaggtacggatagacagaccggaggctttgtgtttggtgctgcttcggcagtgagccaacagcctttggagccagcagtgtcagtagcttcacccactgaggcgcccttcgtgtttgggagcgtgagggagagcctgcctcggtttgacgagggatcgcccgcttcatcaaagctccctgataagatggagaagttgaacctgcgaacatcaagtgaggttgacgatggtctcggtcaggggagggatcgaaaggatggaagttcggtatttggtgctgatatatctggtttgttttctagtaacaaggaatctaatgtgctccaggagaagcttacacagttgaatttaggccacaaagaacccttgcaaagtaagaagagggatagtgctaatggtgtgccgcaagcatttgtgtttggaggtaatggagctgggagttttgctgactgtaagaacaaagccgcccctggtgcacattcagatgatcctagttcagttcatggcactgatgcaaaaggtatggctgggaagtcgatgcagttcaatataggcagtcaagcaccttccaggggtggggggattgatcgtactaatggagcaccagaagctttcacgtttcgaagtaccacattaagtggtcatgtggataatataaacaatgttgactctggtgccaataccagttcttccactgttgctaaatgtgtttgtgatgcagattttcctctggaaaagataacacggttgtgtataggaagtgacatgcccttgcatgagacgaaaagtggttatcaacccaaagtgtttacgtttggaagtggaggaatcccaggcgctgtttttgggaaggaaactggcagcacatcagataggagcagtgaattcctctctgcaaatagcaatacttctagttcaagcagtgattttttctctacagcaaatagcaacgtttctaattccgctaatggcacttattgtttgccaccagagaagacaccagatttgaatgcaggagacagagtcatgtcacagagcttggaaggtgataattctaattgtccaacagagacctttctatttgaaagaaatgaaacccgaagctctgtttcgcactctgcaagcatagccatggatgacggtgggaattttgtcaatgatgaaaatactgacacctgtagttcagctcacagtacagtggagtgtgcaggtgctctcccagagaagatgacaaagttaggtataggatgcagaattccacatcatagcaggaaagatgaaactgctaccgatccaccagaagtatatgtatttggatgtaatctttctagcttttcttctgcccagacttcaagtaaatcgaatgatcgcacgactcctgaattttgttttcaaagcaaaacaggggcaacttcaggatatggtgctgttccccaaaccaaagttcaggattcatacccatttacaattttgaataattcatgtactttctctacttttgagaatgcagttcctgctttcagttttgggacactgaatgcagaaacagaaacagctccagatgatcctttttctttttctgtcaaacatgatttgcctgggtattccagagagaccttatttggtttagacagtataaaatctgcatacaaggacaaaagggaagcatgtaaaggaaaaatgaaaaacaagaggccaactaggctaaagcaacatgctcagctccatcaggttatttctaaggaagcctgtaccagtggagaagcatcagatttagcaggtgactgttcaccaatggattgttcgccatatcctgcagaatctgaacatgtgccaacagaggcatatgtggcttctgatcagcccgttcacataggtgatactgttatctcgaacgggaacaccagttgtgctgaggatgatgtagtttctgcagccgagcacttggttactgatgcagacctactgatgtttggagatgaaggtagaggaccgaaactagatgcatctgagagcaattttggtagcagcgtttctagttttgaaggagatcaaagcaatgcatcacaacattctttcactaatattgggcaaaactgtaatgagaatacctacagaactccccatgattttgttgaggctgctgcttttcaatcaaactcatcaaatttcagtgggctgaactttagattcggtgtgtcatcctctccacaaatctctgctgcggcacaaagacgtagcacaagaaggaagttaagaacaaagggtagtctagcatcgaaaccttcaactatcgactctttagaacagccaaaatcttcacaagatactaagggcatgcagtttttctgtgaagcaagtaaaaatgaagactcagtgaaagcgcaacaatcaagagattcttctacttctgtggccttggagacttgtgaaacctggcgtactagtggaaataaagcctatgcaaatggacattttactgctgcagaggattattatacccgtggaataaactctgttacccacaatggcgtttctggacaatgttcccgtgcattgatgctgtgttacagcaaccgtgcagctacaagaatgtcacttggcatgatgtgggaggcgcttcaggattgtttgactgctacatcaattgaccccacttttcttaaagctaaagttagagctgccaagtgccagcttgcattgggcgatcttgaagatgcatcaatgagttacatgtcctgtttgaacagtaacaccgagagctctgaccctaaaatatttgctgaggcttctgatggtttggaaggagtcaagagagtgaccgattgggtatctcagtgcaaggaatttcttgagagaagaacatctcctgaagcaacaaaagccttagaattgatctccaatgcattgcacatatgtccacattcggacagcgtcaaggagatgaaagcagaggcattgttgatgctacgaagatatgaagaagtgattcaactatgccaagagtctgtgaatctgactgaaagaaattcagttttattcaaagacaatggagaaccaaagaattccagagtctctgaacggatgcagttttctggaaggtattggcggccctacctcatttgcaagtcttatttcctttcaggcaagcttgatgaggctcttgaattgttaaagaaacatgagcaagtcacacctgtcaaagaaaggtaaacttgtgaagtgaacacatatgaagaaaaattctcatcattgtcagcgactataagagaactactttctcttaaggctgctggaaatgaatcatttcaagctggtagatattcagatgctgtcaaacagtattcagcagctttggcatggaatagtgaatcacgcccattttcagctgtatgtttttgcaatcgtgcagcggcttatcaagcactcggtcaagttactgatgcaatatcagattgttcacttgccatggttcttgatacaaattatccaaaggcaatttcaagacgagccaccttatacaagatgataagggattatgaccaagctgctaatgatgtaaggaagctaatctctcttcttgaaaagaaagtcaatgtgtctggagtatcaccaaaagcttttaacaagcacaatgatctcaagcaagcacatgtgaggctttcatccatagaggatgaagcaaaaaatgacacccccctgaatttgtatttaatcttgggagtggagccatcctgctcttcagaagatattaagaaggcataccggaaagcagcattgagacatcacccagacaaggctactcaattattaataaggaacgagaacgcagaagatggattttggagggatgttgtcaaggaagtctatgcagacgctgatcatctgttcaaaacaattggggaggcatataatgttctttctgacccggccaagcgtgaagagtacaactttgaagaggatctaagaaatgccaggaggagagtatctagttctaggagcatgcataggtcacctgaacagaactacagcaacagaggctttaatccacgccagcggcagtcaagcagagcatcacgttcacgttggtacagcaattcagacgattactggtaaagaagccattacatatggagtgggcatgtggtgcgaagcaacttttgcatgtgtggagcaaaaggcctccttgcaccaagatggcacctgcctttctggggttttttaggtgccggtgctgacgcaccagccttcgcagtctcagctttcgtgtctgtttgctgtgtttcttttccagagggtcagccttcgcagtctcagctttcgtgtctgtttgctgtgtttcttttccagagggtgaaaatattaggattgatcaactggggatctgggatgattggttgacacttgattagcacagaaaatacgtgggattaggaagtggtacatcaaattatcttttgttggcctggtgatttctgaacactgactgcttgggagtggctggcatgatggtatccactcttgaggagttgaacactgagaacaacttcgaaggttaggagcaaggataaagatgttggttcctcgaatatctgcaggcactcttttgctggatgcatggctactgtttagcacgggcagtttgcagcagatcaactggaaggagacatgctcagatgctcctgtttggcgcgtgcagttctgttctgttgcttctgtttaatccaaacgacgtagcgctggaaacagagtggctacatattacaactggctaactgctcaatgtcggaactcggaatcacgattttttatttattcattgttattagaggttttagctagcccaatgttgagagtattttattcagatcaaggttccttcgaagaaaaaagaggctcgggttacggtgacattggccaattgcaggttctgtcatgttgcttatgatgaaatatttggaacgacttaaacccttggactgctgcatatgtttttttttgcgtgaacgtttcgttgataaacgggatatatacacatattcgaaggccttaaggcacaaagaaaaggagactaattaagggtgtgtttggttggagagtcaactaaaatgagcgaaatgagcggctgtattacagtttttgagaatgaatctattctattttatgtttggcaaacagaatttagccgctctattttttatttgattgaagagtatatttagttggaaagctgga

SEQ ID NO: 215575 - DNA, 4237 bp, Zea Mays
  misc_feature (4236)..(4237): n is a, c, g, or t
cgccgcgccgcgccgcgccgcctttgccccttcccttccatcgcgacttgcgaggggagagtttgggactcgctgcccctcttcgcttcccaccaacctcctcttctccgtcgattccattcgattcgaattcgcgatcgcccaccaccgcaccaagcgccaaaccctgaccctgatcctaatcctgtgcgccacaatggcggagtcggagaagggcgccgccgcaaccaccaccgccgccgccgagcctgggtccggcccgccgcacgaggacgaggatgcgctgctcgcccgtgcccacactgtcatctccaggatcctcgaccgcgagctcgaccccaaccctcgcctcctccacaccctcgccaccatgtgcgagctccacgaagccagatatcttgagttacgtgcagctgacccaacgttcaataacacgaacacaaggagcacatttacaattgggaagctggccaatttgctccgggtgcatagcctattctggagttctttatgcaccaatttagttttattttgcccgttaattgtatgactaagcgatgttacttcaaacctatcaacaggacaatgacgagttttatgagttggtgttttgtaaattcttgtccgacacctcctactctgttgctgtacaagccgctgctgctaggctgctcttgagctgtcactctgcctggacgcctccgtatcctcatgtctttgaagactctatcatagataatattaaaaagtgggtaatgaaggatcctgaagcatctaatgaatgtgagtggaagtatctaggaaaaaataaacccacagatgctgagatgctgagaacatatgcgattgggttgcttgctatggcattgtgcagtggtgggcaattggtagaggatgtcttgactttgggggtgccagcaaagctcatgcactttctgcgcataagagtccttggtgatgcctcatcttctcaaagagatgctaatcatccacaagacaccaaatatcctcgaggcagagacgataataggggtaaatcacgtctggcccaagatggttctcggttggatggaacaagggttgggtatggaatattgaccaacccaacagcagagaaggacaatgaacctggtgttgtaatgaggcaagcatatggagaaaggtcattggatggcacttttgcctcatcagataattctgacgtccctgaggttgattggaccaatgataactcttatggcacaattgtttgtgacacaaagtcaaaatatggggaaaagacttctgtgacaagggctcttaaagatgaagagatcagcgaaaatggtgaactgttgaagagaaagctgagtcgagccccctctcgacttagagtgaagggaaaagcaggagacaacttgcctgaatgtgaaatgacacctttatcaccaacctctggattgagaatcggaggtcgggcttccagagacaggaatgtggtgagggttgatgacccaaagaaggcaactgatgtgaacaatagttctgcaggcctcgagttgtttagcgctatttccaaagaagaatatgaagatcgtttgagggattgcattattggcttgaaggatatatctgacatcgttttgaaggcagtgagagctgctgaggctgaggccagatctgcaaatgcacctgatgaagctgtgaaagcagcaggtgatgctgctgccgagcttgtgaaatctgctgctttggaggtttggaaagccgaaaataatagtgatgcggttatagtagcggcagagaaagctgcatctgcagttgtagaggctgcagtgtcgactagtgtctcacgaagcacaaatcaagttggtgaagaacgtgcagcggaagaagctgtacaaaccagcgaagaccaggatttggaaaattttgttatcagtgacaaatcacagctcttacaacttagagaaaaatatagcatccagtgtctacagattttgggagagtatgttgaagctttgggtcctgttctccatgaaaaaggtgttgatgtttgcctcacattattgcaaatgagcatgaaagaccaggagggatgtgaccactttgctcaactccctgatgttcttaaattaatttgtgcattggctgcccatcgaaaatttgctgcactctttgttgatcgtggtggtatacagaagatcctctctattcctagaattacccagacatatatgggtctttctgcctgcttattcactttcgggtctcttcagtctaccatggaacgtgtttgtgcgctctcctctgacacacttgacagtgttgttgaattagcacttcaacttcttgagtgcccacaagatttagctagaaaaaatgtgggcatctttttcgctgctgcttttgtgttcaaagctgttcttgatctatttgatgcacgagatgggatgcaaaagcttctcgatatcctatatggttgcgcatctggaagatctggcagtaattctggaggagcaggatcctccaatgtaaatcaagggaatgatcggtcacctgctgaagctttgactgcatcagagaagcaagttgcataccatacttgtgttgctctacggcaatactttagagctcatctccttcagcttgttgactccattcggccaagcaaaagcatccgcagtattgctcggaacacttctagtgcacgagctggctacaaaccttttgacattagcaatgaagctatggatgctgtctttcgtcagatccagcgggacagaaagttaggccttgctcttgtgagagttcgttggcctgtgttagacaaattttttgcctcaaatggtcacgtgactatgctggagttgtgtaaggcacatggtgatcgctatttgcgtgatttaactcaatatgcaattggagttcttcacatcataacacttatgccacaaccacatgtccgcaaatcaatagtgcagggaacattaagcaacaatcgtgctggtatggctgtcttattagacacggtgaaaagttttgactacattgatcatgaggtgatctgtccagcactgaatgtcctcgtcaatcttgtatgcccgcctccttctatcagcaacaaaccattgtcaactgccaatcagcaacctgcagccgcgcaagcacttgcttcagaaagcagagataggaacttcgaaaaaagtatttcagataggaatctactagcaaatcagggtgaatatcgtgaaagatctggtgatggcaaccctgctgaaaggaacaataccttgcatcaaggaactcctaacacacctgttgtgacatctggagtagtcggtgatcgaagaataacattaggtgttggaggtggtggtcctggtcttgctgctcaattggagcaaggataccgtcaagctcgagaagttgtaagagccaataatggcataaaaattcttttacagcttctcggttctcggatggttacacatcctgtggctatagattctattcgagcgcttgcctgccgtgtcctgcttggcctggctagagatgatacaattgcacatatactgaccaagctccaggtggggaagaaattatcagaactgatccgtgataccagtgcccagacatctgcgggcgatagtggaagatggcaagctgagctgacccaagtggcaattgaactaattgcggtattgacaaattctggaaaagaaacaacattagcagcaactgatgctgctgctccagcattgaggcgcatcgagcgagctgggatagctgctgctactcctatctcctaccactcaagggaactgatgcagttgatacatgaacatcttcttgggtctggtttcactgccactgctgccatgctgcagaaggaggctggccttgcacctttaccattgatagcagcggtgcttcctgcccaccaagttgctgccctggaagcatcatctgttcagcaacagtggccctctggacgtgttcagggatttctctcagataaaataaatatgtcgacagatcaatctgcccatagatcagattctatcccgccttcatctaagaaaaaagcactgaccttctcatccagtttctcacgaagagctcagactccacattctgtttctggcagcagaacaagcaacatccttaaaagtcctgtacctattgcggctgatactagagatgcagaaatgttgaataagacaccactgtcgctgccacttaagaggaagcttnn

SEQ ID NO: 215576 - DNA, 2318 bp, Zea Mays
aaaagattatctcattttgagatggatactgaatgcttacgccaaagtacctccaaaacctaaagtgccttccacaaaaagtgagtttgaggaactggaggctgttcctacatctgctgctatagacggcccccttgaacctccgccagcgtctgccgctgtagtccttgatacccctgatgaatcattaatcagttacttcagtggcgctgctagcattggaagtgtatcaaacgcacaaccgtctggaagagtgcacccatctactgagagcatcccatcttcccatgtgccattgatcgttccatctgctgcttcaacacatcaactgcccccttcagtagcttcaacagcttcaccattgcccgtccatggaactaatgcccacactagccggccaacaaatcttgtgacaccagatttctttgcgcctccaccatcctcttcagctccactggctccgccgggtgcatctgtggttcctactgcgccacctcttcatcccacttcggcggcatctattcaacgttctcagtatggcaccccactgctccagccctttccaccgcccactccacctccttcccttaacccctcacacagtgatagacttactgttacaagggatagagtcaaagacgctctacagagacttgttcagagcgacgagttcgttgatctggtgtgccgggaattgcagagatcacttgtataggctgcttgcttagtcttgtcgggagttttctggctcgtggcaagaatgtgcctgtaattttcctttgacttttttgcatgcttcccttcccgtactattgtataggtttgtgttagtgtattggtgtagagtactataggaatggttggtagtatctgtggggtcccttggttccaaatatccgtgttggcagtgtgagaagcggaagtaaaactagcctgttcaagaacgttggaatttgatgtgctttggcgtggacaaattacagcactgagattctagaagtttttttttaattcttattaacttcgctttctggaaaaggagaaaaaaagagagatatgatgctgactttccctgttgtttgacaggcgaccgtataacctacaacccaatcatattcacattccctgaactacactgtacatgtcaacggcactctctagtggttgtggtgttcgcgatgcccgaatgcccgggcgggccgaatcggacgagttcaccggaacgtgagcatgaccaggaagccgaggaaggcggcggcgccgacgccagagcagcagagatcaaggatgccctcgcgcctggccttcgactccttgcgcgcccttttccccctgacgaactcctcgtacctgagcctggccacgtcctccgccgcgccgcggcacccccgcctgggcgcggccatggcggcggcgacggcggccagcccgtccctgccgctgacgccggcgccgtcggcgtcctcgacgcgcaggctgacctcccggacgtggccgcggcgctcgtcgcacgtgacggcggcgtcgagcgcgacgccgccgccgagcacgacggcgaagcgcgccacggtgtcccccgtgagccacttgcggtcgacggccacggcgcggcggctggacgcgttgagcgcgcggccggtggccgggtcgaagaggacccagctgagctcgaggtcggccggcgcgatcgccgcggcggccggcgacgtgaagccctcctgcagcagcgcgtcgacgcggaacggcgcgcccaggaaccagtcggaggcggcgtccgtctccacgacgcgcgacaggacgcagacccccgcgtggcgcaggtcgacggccgacacgaggcgcgcgggcaggggctgcggcggcgtgggaggggagaccgagcacgggaaggggaaggcgtcggcgaagagcgcccggtgaccgccgtcgacgcggcctgtgcagggcaggtcgcggacggagggccacatggcgaagcagagcgcccgccacgtggccgggtcggtggcgaggctgcggaggccggagctcgcgcagccgaccgccgccagcgacgcgccatccaggcggcggagcacgagggcgaggacgtccgccgggaggtcctcgatgcccgtgccgccgacgtcgtcgccggccggagaagaggcttccatcgccccaacacccatgggatgagacgaacgatggccggtgggcggccgaccgggagacagtaggagcgaggccggagaacgtggataggaaaggggttgtggtggtggttgcgcgggcgcgcacgcgcgtttctgatggcctccggcgtcggaggagggagg

SEQ ID NO: 215577 - DNA, 567 bp, Zea Mays
gtgagggtctgcaagcaaccaaacgagatccctatggccggcttatcctgggcgatataattacctctgtgaatggtacaaaggtgacaaacggaagcgacttgtataggatactggaccagtgcaaagttggagacacggtgaccgtggaggtcttgcgtggcgaccacaaagagaagatccctgtggtcctggaaccgaaggctgacgaatcctagtactagtaaacccagcttcttcttctgtaccatagcatcagtttctcgctttggtgcagaggcgcaaacacacaaggcgtcttagcattttcgccctccacggggttcattcgctgtacataattcatgcatgtagatgttgttaccatctcttgtctggtggaaaaggggtatccagactccattccaggttgccgtaatgccgtcgtgtattattaatacgatgctcatcagatgaccatccaggccggtcaagggacctgcaggccgacgattgaactcgctgatgtcacagatcaccaaacccgttttttgacgaaaaaaaaagattaattgtgtacgtaccact

SEQ ID NO: 215578 - DNA, 2957 bp, Zea Mays
agatagggaggtgttacctgactctggagcaagtcttcttgcaaataaaacaaaagtattgagtaaattaacatttagaacaacgccatatcagataaaagcagatggagcttccgtaggaggtctacaaggcaccgagttttgaagaactctgatatctcagaacctgagactcttagttccagcaaagcaaaggctgacattacaccgagcaacaatgtttatacttcaacatattcttatgcctcggagaagcctctgcaacaagacaagccagatgagaagactctgcatcaagagaagccagaggagaaacctctgtatcaaggaaactctgatgaaaagctgatggagaagccaagtgaaaagcctactgacaaacttatggaagaaccagctgaccagataattgaaaaatcaattgaactacccactcaaaggataaccgaaacaccaactgatgagccagctgaaaaaataaatgttgcaccaactgaagaaccagctggaaaaataacagagacggcatctgaaaatacagccgaagggtcaataaaaaatgcaacagaagagacacccgaaagggcagttgaggaactaattgaagaggcagatgaaagtatttccgtctcatcaactgtgctgaaggaggaggaaaacacctcacttgttgaaggaagcagtggagacccggaggaagatcatctggagtctgcagctactaatcttcagcctaggagtgacacttgcattgcaagggaagagctgctgaatcagaaggatctggtgaaactgcaagctgttatccgtggacatctagttagaaagcaggcttcagaatctttacaatgcttgcttgcgattattaaaattcaagggttgatcagggctcatcaagcacaacattcaccaggaaagattcaggagactattgttcattcttcaggtgagaaattgcttcgcaatggatttgctctcaagctcatggacaacacaccaacttcaaaatccattcgcataaaatgtgatccttcagaatctgatgttacatggggatggatggagaggtggacagccttaattccaccgatcactgtggtgcacctgccagagcataaagaaaatagtgagttgatgggtgaaactgtgaccgaacaagtgactgaacatgctcagtgtgatgaagacattgttcctttggattcagacctatctttcccaaagttggtggctgatgatgtgaaagaaacagtagagacatctgattttagtgccttggaggctcctgcaagtgtcccagatgaaagccctaagatggaaatgaaacatgatcctgaatcggagttgatcgaaactactaatgcagatgctgatcatgtaactgaccaaaaggctgaaaatgatgtggacgagccttttatgtccttggatcaacaatatgcccaagctgatgatgcatcaaggaatccctgtccactccctggaaaatttgaaccgtccaatgaggacagtggtgacgcatacaattctgagcagacactggagatggaaggtaaaaggtttgtggcaagaaagccatgcaatccagcctttgctgctgcccaattgaaatttgaagagctgagtacaaattcgacagtcagcaggtccagcagcccaccgcatctggatggggtgagcaagccaaggatgcacactcctagttcgcaagaagattacacgccaaagcaagatggcacaggcatacaagaaagctcagctggtcatgatactaaaatgagaattgctgcatcagaatgtgggactgaaatatcaatttcatccacactggactcaccagacagatcagaaggtgatggtggggagatagtgttggagattggagctctggaaaacagaaactatgtcactggcaaagctgataaagactccagtattgtccatcccggggtaaaagatgctcctgaagcagaagcccagccgcagaaggaagtagaagagaatgggcatgttcctgcccttgaaacggaagcccagccacaaaaggagccacatactgaaccggaagtggcagatttgcatggacaattggaaaaatcggtcacatcttatgccacacctgaagggactccaatgagccgaacgaccaccattccggagtctcatgggacaccgtcaagtgaggtctctgttaacaccaaaaggagcaggagcaacaagcccaagtcccacgcgagcaagaggtcgctggctagtccaggcagcgactcagttggacggagcagcaccgacaagttttcgaaggaatcaaggcatgccaagagagagagctcctcaagcaaagctgctaaatccgaccagggcgatcaagaacctcgtgtaagcaacagcaacagcaacccgttgcctagctacatgcagttcacagagtccgcaagagccaaggcgtcgtccccgaagatgagcccagacgtgcaggacagcaacgccgcgaggaagaggcactcgttgcccatgaccaacggcaagcacgactcgtcgcctcgcatgcagcggtcgtcgtcatcgcaagctccgcaaggcgtgaaaagcagtggcccttctcctcacagcgcgtctggtggcgcagacaagaggtggcatatctgactgatgatgagtaggccgagcacagcagcatatttcgccgtctaatccgttgattcgtcgttgggaaactgagtatggtttggaagacgggcagcttttgccgcttgatacgtgtacatttgtcgcttctcattggttgtgttatgtgactgatagtggtttgtgtgtgccccctttgacttgtaatgcaacagtggcatcaggagtgtgtggattggtctgttgtatttggcgacattgaagtttctgttggtgtggatgctactacgcctctcatttctttttgaaaggggtttgcttcgtatcgg

SEQ ID NO: 215579 - DNA, 3074 bp, Zea Mays
gtgcttgtctcgttagatccttgccgaatgcgtggggctcaggggcagggtgtgtttgatccttgatagatctgggtttaattcgaagcggggagctggaatcaaccggcgaatcgagagattctctcactggttcagctcgctcacctcgtcggctttgaattttacctttggatttgtttgcggcgttgacagaacaacgccatatcagataaaagcagatggagcttccgtaggaggtctacaaggcaccgagttttgaagaactctgatatctcagaacctgagactcttagttccagcaaagcaaaggctgacattacaccgagcaacaatgtttatacttcaacatattcttatgcctcggagaagcctctgcaacaagacaagccagatgagaagactctgcatcaagagaagccagaggagaaacctctgtatcaaggaaactctgatgaaaagctgatggagaagccaagtgaaaagcctactgacaaacttatggaagaaccagctgaccagataattgaaaaatcaattgaactacccactcaaaggataaccgaaacaccaactgatgagccagctgaaaaaataaatgttgcaccaactgaagaaccagctggaaaaataacagagacggcatctgaaaatacagccgaagggtcaataaaaaatgcaacagaagagacacccgaaagggcagttgaggaactaattgaagaggcagatgaaagtatttccgtctcatcaactgtgctgaaggaggaggaaaacacctcacttgttgaaggaagcagtggagacccggaggaagatcatctggagtctgcagctactaatcttcagcctaggagtgacacttgcattgcaagggaagagctgctgaatcagaaggatctggtgaaactgcaagctgttatccgtggacatctagttagaaagcaggcttcagaatctttacaatgcttgcttgcgattattaaaattcaagggttgatcagggctcatcaagcacaacattcaccaggaaagattcaggagactattgttcattcttcaggtgagaaattgcttcgcaatggatttgctctcaagctcatggacaacacaccaacttcaaaatccattcgcataaaatgtgatccttcagaatctgatgttacatggggatggatggagaggtggacagccttaattccaccgatcactgtggtgcacctgccagagcataaagaaaatagtgagttgatgggtgaaactgtgaccgaacaagtgactgaacatgctcagtgtgatgaagacattgttcctttggattcagacctatctttcccaaagttggtggctgatgatgtgaaagaaacagtagagacatctgattttagtgccttggaggctcctgcaagtgtcccagatgaaagccctaagatggaaatgaaacatgatcctgaatcggagttgatcgaaactactaatgcagatgctgatcatgtaactgaccaaaaggctgaaaatgatgtggacgagccttttatgtccttggatcaacaatatgcccaagctgatgatgcatcaaggaatccctgtccactccctggaaaatttgaaccgtccaatgaggacagtggtgacgcatacaattctgagcagacactggagatggaaggtaaaaggtttgtggcaagaaagccatgcaatccagcctttgctgctgcccaattgaaatttgaagagctgagtacaaattcgacagtcagcaggtccagcagcccaccgcatctggatggggtgagcaagccaaggatgcacactcctagttcgcaagaagattacacgccaaagcaagatggcacaggcatacaagaaagctcagctggtcatgatactaaaatgagaattgctgcatcagaatgtgggactgaaatatcaatttcatccacactggactcaccagacagatcagaaggtgatggtggggagatagtgttggagattggagctctggaaaacagaaactatgtcactggcaaagctgataaagactccagtattgtccatcccggggtaaaagatgctcctgaagcagaagcccagccgcagaaggaagtagaagagaatgggcatgttcctgcccttgaaacggaagcccagccacaaaaggagccacatactgaaccggaagtggcagatttgcatggacaattggaaaaatcggtcacatcttatgccacacctgaagggactccaatgagccgaacgaccaccattccggagtctcatgggacaccgtcaagtgaggtctctgttaacaccaaaaggagcaggagcaacaagcccaagtcccacgcgagcaagaggtcgctggctagtccaggcagcgactcagttggacggagcagcaccgacaagttttcgaaggaatcaaggcatgccaagagagagagctcctcaagcaaagctgctaaatccgaccagggcgatcaagaacctcgtgtaagcaacagcaacagcaacccgttgcctagctacatgcagttcacagagtccgcaagagccaaggcgtcgtccccgaagatgagcccagacgtgcaggacagcaacgccgcgaggaagaggcactcgttgcccatgaccaacggcaagcacgactcgtcgcctcgcatgcagcggtcgtcgtcatcgcaagctccgcaaggcgtgaaaagcagtggcccttctcctcacagcgcgtctggtggcgcagacaagaggtggcatatctgactgatgatgagtaggccgagcacagcagcatatttcgccgtctaatccgttgattcgtcgttgggaaactgagtatggtttggaagacgggcagcttttgccgcttgatacgtgtacatttgtcgcttctcattggttgtgttatgtgactgatagtggtttgtgtgtgccccctttgacttgtaatgcaacagtggcatcaggagtgtgtggattggtctgttgtatttggcgacattgaagtttctgttggtgtggatgctactacgcctctcatttctttttgaaaggggtttgcttcgtatcgg

SEQ ID NO: 215580 - DNA, 3558 bp, Zea Mays
cctccctccgtctcccgggcggaagcggaagtaagcgaacggggcatccacgtccgccatccatggctgccacaggtacgcttgcccttctcctcccagtgaccctctcctcgaggccctcccaccgcacgcgcggcttcatgcagatcccacgtcgtcagcagccgcgacggctcacagcggcggccaccgaagcctcctcctacaacctaccatctcgctcctcaccggaggcgccggagaccaggcagatacgcctggagacggagtcagcactggagtggggcggcgtgtgcgagcggctggcccacttcaccgccactgctgcgggccgcgccgcctgcgagggagggcgcgtccccgtcgggcggagccgggaggagagcgagaggctgatcgaccagacggcggcggcggtgctgcttccgacgccgctcgatttcggcggcgtcgaggacgtgtccgcgctcgtcgctgcggcggtcgcgggccgcgcgctggcggtgagggagctttgcgcagttgggcgcagcatccgtgccgtgcgggcagtgttccaccagttgaagaggcttgccgatgaaatgccggatggaaggtgaggaatcgctttggtgcttgctgatgaattggacggcattgaaacatgccatcatcaggcgttagtagtatctttttgtttgatcattgtgactgtgtattatggatagtcgatattagttttgtcatagctttgtggatggaatggaaaccatagtgctgataattcaccggttactgttcacgtattcttacacattacaagagtctataaatatttgttggttcttattttcagattcaaaaaaaaaattctatttgttctcctgcaggtactcttctcttgtagatatactacaaggttgtgacttcttaactgagcttgttcaaaggatagagttttgccttgattccaccctttctcttgtcctggatcgggcaagcaaaaaactagagataatccgccgagaaaggaggaggaacatcgaaatgttagaatctctactaaaagatacagctgcaaagatttttctagcaggtgggattgataaccctctggtcaccaagcgccgttctaggatgtgtgttggtgtgaaagcttcacacaagcatttgatgcctggtggaatcgttctaagttccagtggctctggcgcaacatactttatggagccacaggatgctgttgagctcaacaacagggaagttaaactctcaggagaggagagagcagaggaactggtagtattgagcttgcttacctcaatgattgcagactcccaactgaagatcagaaatttgatggacaatgttttggaattggaccttgcttgtgctagagggtcgtatgccctatggacaaacagtgtcagaccaaccttcactgatagttataccattagccaatcagaccagtgcaatgactattcaatttatattgagggcattcgccatcctcttctacttgaacagtctcttatggcagaagaatcaactacagaagcatctgaaatgcctgttccattggacatgtgggtaaaaaagaatgcaaggatagttgtgatctctggacctaacactggaggcaaaactgccactatgaagaccttggggctgtcctcgcttatgtcaaaagctggtatattcttcccagccaaaggaaggcctaggattccatggttcgatcaggttcttgcagatattggtgatcaccagtcgctggagcacagcctctctacattcagtgggcacatatcacgtctgcgcaagattgtagaaatggtatcaaaagattctctagttctaattgatgagattggcagcggcactgatccagctgaaggtgtagctctttcaaccagcattttgaagtatcttgcaagtagagtgaatttagcaattgtgacaactcattatgctgatctaagtcggctccagtcagttgacaaccgattcgagaatgctgcaatggaattttgtgtagaaactctacaaccaacataccgaatcttatggggcagtactggtaattccaatgcacttagcattgcaaagtcaattggttttgatcaaaaagtgcttgatcgcgcacaagaatgggttgagaaactactgcctgataagcaaaaggagcggcaaggtttactttatgattctctcgttgatgaaaaagaacttttggaatcccaggcaaatgaagctgcatctgttctttcacaggttgaggggttgtacaatgagattcgcttggaagctgatgatctcgaaagcagagtagctgcattgagagcaagagagacccaaaaggtacaacaggaattgaaggttgtgaagtatcggatggacaccataatcaagaactttgaagctcagctaaagaattcaaaacttgaacaatacaattcgctaatgaggaaagcagaggctgccactgcttccgtggttgccgctcatcagccaagcgaaatagctttcgatgatgacgatgaaaaccggatctcgttcgtctcacaagttggagacaaagtgtatgttcaagggctgggaggagaaacgatggctaccgttgtcgaaactctcggagaagatgagagttgtatggttcaatacggaaagataaaggttcgagtcaagagaagcaggataaaactggttcaaagaggcacaaataacgaggcaacaacttcctcttctgtaaaagcaaagggccgaacaccgaagcagcgatcggcaacgacgacggacgtctccttcggccccgtggtgcagacgtccaagaacacggtggatctgcgcggtaagcgggtcagcgaggcggccttcgagctccgcatggccgtcgacgcgtgcaggccgtaccaggtgctgttcgtggtccatggcatgggcaccggggcggtgaaggactgcgccattgacgtcctccggaagcaccctcgcgtggccaggttcgaggacgagagccctctcaactacggctgcaccgtcgcctacatccagtgaacggctcccagcgtgtccttgtcacagactcacagttgcggaatgccagttgggtgagctttttgctagtagctgatctgcgggtggatcggataaatggccttggcagttgtgatcagttcggccggcgtcctatgcattggcatcgcaaaatcaccagcggaagcaaggtgtgcgtgcacatgcgcgcctcttctttccagcaggattttgtgtggcgagggctgatgtggccaggttcgagccacgagagacaaaatacttgtggctcgtcaactcgttctcgacttgttttagttttgtcacaagttaagctagtatcttggctcggtttgttacaagccagctcgagttaagcttgttagctcgaatgatctagcatttgtaagcaaaacaaaaggcattcacagatgaactaataagtgataaactgtattaattagatgttgtattcatgtgttatatgaaattatgagtactattactcttttcgagtgttaaattaacttagaatta

SEQ ID NO: 215581 - DNA, 770 bp, Zea Mays
tgtattttcatgctgaagggaccgatgtggtattaaacttttttggtgttgattcgcaacaacaaccatagctgttgagatttttcaagagaatactaatcaagttcatgttgtaaattattgtttgtgttgcatattgtatgtgacataccgacaagtttctttattcaatgtttttgacaaagtcagtttttcgtgcaggaatgcttcaatgcttgtgtgtctggctgtggattcagatttgacatcccaacggagaaggtcgaagaaatcaagcccaataggccatccaaaccatcagctcctgaacctgaagtgaaacaaactaggaatgcagattgtaatgaagatgtgccgtgcacgtcagcctagtttgagtgttggcgtgcctcaaattttgtaaagccaatgtgtttctccgttgtatttctactcgtcctattttcccatggaaaactcacgggaaactttatctagcttagctctagtttggaaactcaaatcccttcgtggatgaaaggggtttgagggacaaattagtttatttttatcttaatcccttccaatccccgggtgatttgagtttacaaactagcctttagagtaaagatttaccacattggcaatgaaagatgatggcctgggaactaggtgaagatttactgcattggtggtgataagtgagcctgaccctgatgagtatagtaattcgacgatgtaatgtgcataagtaacggggtcttgagtttatattccatgcatcacatatt

SEQ ID NO: 215582 - DNA, 1850 bp, Zea Mays
tgtaacttgtcagctcctctgcatgtgtacttccgaggccaatatggaggcacactatactatagtagccaaagcatcaacttcggcaatcatggaccacagtgtgtactactgccttgtagctcttcttccacttgtttacttccttctcaagtcgtcgtggaagaaagctcccttcggatctggtagccgccatggactaaagctccctccaggcccatggcagctccctgtcatcggcagcatccaccatctccgcggctccctcgtgcaccacgctctgagggacctatcgctccgccatgggcctctcatgttcctcaagctgggcgaggtcccagtggtcgtagcatccacgccggaggctgcgaaagaggtgatgaagacccacgacgccatcttctcgaccaggccactgagctcaaccattaggacggtctccaaggatggcctgggcatcgtctgggctccgtacggcgaccactggcggcagctccgcaagatctgcaccatgcagctgctcggcgcgcggcgcgtccagtccctgcggcccgcgcgcgaggaggaggcgttccggctggtccgagccgtcatgtcctcgtccaccgcggcaggaggagctgcgccgccgccgctcgtggacctcggcaagctggccgccgtgtacgtcgccgaggcgtcgttgcgcgccatcttgggcagacggttcaaggtcgaggaccgggacacgctgctgcgctacgtggatgacggcgtccggctggccggcgggttcacgcccagagacctgttcccgtcgtcgtggctcgtccgcgccctgacccaccgggccgtgcgcgaggtggatgcctaccgagactccttgttcgccttcatggatgtagtggtaggtgagcgcttggatcgacgagaaggtcaactgaagaagaggaggaggagggagaggatctgattgacgttctcctccggagccacaaggaaggaaacctcccgttccctctcaccatgaggacaatcgaagcggtcatatttgatctgatcggagggggtatcgagacagcaacaacaacgctgcagtgggcgatggctgagctgatgaggaatccaggcatcatggccaaggcacaggccgaggtcaggggattgttcatgggccaaaccaaggtaaccgaagaccggctaggtgagctaccctacctgcagctggtcatcaaggagacgctgaggctgcatgtcccggggccgctgctgatcccaagggagtgccaggagcagtgccggatactgggctacgacgtgcccaggggagccatggtgctcgtgaacgcctgggccatcgctcggagcccggatcactgggaggagccagacgcgttcgtccctgagaggttcgtcggtgacgcgagggatttcaagggcaacgacttggagttcatcccgtttggcgccgggaggaggatctgccctgggatgtcgttcgggctggccagtggccaacgtcgagctcggtctcgccagcttgctcttctacttcgactggagtctcccggcgggcgtccttcctgctgagatggacatggccgagaccatggggatcactgctaggaggaaagcagacctcttcttgtctgctactctgcgtgtcaaactgccttaattttcatctgatctgatggtactctatgcctatgagatatgcagtgactgttacgggacgggctatctgtgctgcagcgtgtggagcagagtatttccagtttttctcccttagaccgtcttccacagttcaccgcctaaaacactattttacgttgtatatcccaattttcgtgatgtggagtatgaatatg

SEQ ID NO: 215583 - DNA, 1188 bp, Zea Mays
aaaccaagtcatagattgaaagggaattggagtcttcgacgaagacaaaggcttccactccactccattgaatcactcatccttcgccgtcgctccgcgtcactctccgtctttggtggttcgattcgataacgttttctgctgctgccatccgcaagcgaggatgctgaggccgcccgcgctagcgtgctgcaaactctacatctccgaggcccgcaactcgggggcgttgcgtgccatcgagcacgcagcggcggcgctccgcccgttggccgtgctcgtcaacaccttcgccgacgacgcctacaaccgggtcgggtacacgctcgtgtcccccctcgcgggcggcggcgcctcgccgccgctgcgctgcgcatcgttccgcgtggtcgcggccgcgatcgaggccgtcgacctggacgcccacgccggcgcgcacccgcgcctcggcgtcgtcgaccacgtcgccttccaccctctggccagcgcccacctcgaggacgtcaccgcgctcgccagggccgtggcggcggacatcggagacaggcttcaagcagtgccgacgtacctgtacggcgcagctcacagagacggtaggacgctggcgtccatcaggaggcagctgggctacttcacgccgacctcccccggcggagagcagtggcacggcgcgccggactcgctgctgccagtggccccggacgccgggccccggacgtcgtccgcgtccaatggcgtggtggtggtgggcgccacgccgtgggtggacaactacaacgtgcccctgaccacggccgacgtcagcgtcgcgaggcgcatcgcgcgcgcggtcagcgagcgcggcggcgggctcgcgtgcgtgcaggccatggggctcgcgcacggcgacggcgccaccgaggtcgcctgcaacctacttcacccggacgcggtgggcgccgaccaggtgcaggagagggtgagccggctcgccgccggcctcggggtcggcgtcggccaggggtacttcaccgacttgtcgcgggagaaggtcgtcgagctgtacttgcaggccgctcaagctgcctgaggcttctcggcagtgatagattgtttattgttcagaaagcagggtaatggaataatctactattgtatctgttaggaattatgggctagtcccagttaaaaaattcaaataaatctcag

SEQ ID NO: 215584 - DNA, 230 bp, Zea Mays
gcatggcgaacatttcgtcgcccgtgacgaagctgctgaggctggccaagtacagggttgtcggacggagggaggttctggagtccggcgacatggcagtgctgttgcggaatgcgaaggccggggacaaggtgtcggctcgagcgctgctgcacctcatcctcgacggcgacgaaggggacgcctccaagaaagcttgtaggtactgatcactgcacattcaactccac

SEQ ID NO: 215585 - DNA, 2060 bp, Zea Mays
gatgccaaaattagcgccccgccaccccctgctgcgcgcggtgagcatagcactcctccaatcctcctatctgctgcacgtacgagctaccccgggcagctgtccagggccacgcttcccacgcccgaacgatcgatggccagtggcggcggcaacgcggcggcggacgccaagcacgtcgatgcggaggtcgtcatcgtgggcggcggcatcgcggggctggcgacggcgctggcgctccggcgggcgggcgcggcgcggcgcgtgctggtgctggagcgccacgcggggcatcgtgccaccggcgccgcgctcaccatcttccccaacggctggttcgcgctgcgcgcgctcggcgtcgcgcacaagctcgcctcccgctacgacgcctacgaaacatccagggtgaccaatctcgagaccggggcgacgcaggtgtttcgctttgccggcaacaagaacaaggcgaagaagtcagagtgagggcgcttgacaggaaggcgctgctggaggcgctcgcggaggagctgccgccgggcaccgtccgtttctcgtccaaggtcgtctccatcgacaccgagcgagcagccggcgactcgtcggtgaccgtcgtccttggattggacgacggcacggtgatccgagccaaggtcttgatcgggtgtgacggcgtgcactcggtggtggcgcggtggctgggcctgtcggaaccggcgagctcgggccggtctgccgtccgcgggctctccgtcttccctggcgggcacggcgtaaagcgggagctccggcagttcctatcggagggtctcagagccggcatggtgcccatcagcgacaccgacatctactggttcctcgtcaacaacacggtcgccgcaggcaagtgaagtcactgccgcatgccacttcggtgccagtccttcagagctcagctcagacgcgcgcgtgctggtggtgcctgcgtttgcagagaaagaagccgccggggacccggtgaagaccctgctcgaggtgaccgacaacctggccaggcacatgccagcggagtacctggacgtggtgcgccactccgaccacggcaacctctcgtgggcgccgctcctgtaccgcaacccggtgtccgtcctcctgggccccgcggctcgcgggcccgtcacggtggccggcgacgcgttccatcccatgacgcccgacatggcgcagggcgggtgctccgcgctggaggacgcggtggtgctcgcccgggcgctgtcgcgtgaggcgacgccggccgagggcgtgtccgcgtacgtggcgcagcggcggtggcgcgctgcctggctggtcgccggagcctacctgtcggggtggatccagcagggcgggaccaacgtcggcggcgtgcgcggccgcctggtgaaggtgttccgggactggatcttctacaggttcgtgttcccccggctcgcggacaccatgtggttcgactgcggcgacctcacgccgccgccgcccacggcagcagtaggcaagagccaccacatcgagtgaactccgaaccacggcgtgtcagtatcagctgcagctgctgggtcaggatccatgcctgtggtagcacgtgtgacgcgtgtttgtaagctgtgtaagattttacaatatttcaggttctacatgtggccgtgtatatttttggacgggcgtatgtataggagatacatatacctacacttgtgatatcatgctgtgtttgggggttccttatttgattgtgtggtcatcaggagatgctcctcctgtgcaagcaagcaagcaagagatgtcctcatgtgaaaccttttcagccacccacatttttttgctttatactcataaaacatttgtattttttatctcaccaaaatttcacttttcttcaattttcttggatagaccagttttggtttcccatgccaccatagccctttacttttatacactgaacaataaatgctgttgacgacaaccaacatgtccaccaattctcccggtatttatatttcaggcattcgtagtagaatggcaagaaaaaaatatacttgtcc

SEQ ID NO: 215586 - DNA, 1242 bp, Zea Mays
tacagcatcagcaaagcaaacatcacaaaccctcaaaccacaagtccgcgtccgtaaaggtttttttttaaaaaatatactttaatttccactcctattcttcatgtcttccccgatgccggggaccaccgccagcgccaccaagagttgatccacccaggccaggcacccgcccgtcccccggcggcggagatggcgaggaacgagacggcggccgcggccgcgccgggcgtcgacttccaccttcccgacgagatcctggccgtgatccccaccgacccgtacgagcagctggacgtggcgcgcaagatcacctccatggccatcgcctcccgcgtctcccgcctcgaggccgacgctgcgcgcctccgccgtgacctcgccgaccgtgaccgcgccgaggccgacctccgcgcctgcctcgccgactccgacgcgcgccttgccaccgctctcgacgagaacgcgaagctggcgaaggaaagggactcgctcgcggcgacggtcaaaaagctgaccaggaatttggcgaagttggaggcttttaagaaacaattgatgaaatcattgagtgaagataatctattgcaactgtctgaaaccagtcaagatcacaacgcagaagatttgacagctcgagtcccattttggaaagatgaagtttcgagcagtaacacttcttcagatgcctccagcagatctacaattactgaatccgtccatgacggaggataccagttctcgatcacaccatatatgcctccaaaattaactcctggctcaacaactatgatttcgtcctctagtggttctccccgagcttattcaactggcccaccctctcccaagttcttatctggtccgacttcacctgcaaaagctcgatctgagggccaattggcattttcatcatggcaaggatcatcaagtcatcagtattcagcacctacctctcctccccaacgccgctcattcacagggcgaccacgtatagatgggaaggaattcttccgacaagcacggacaagactttcgtatgagcaatttggagcatttttggccaatatcaaggagttcaatgctcagaaacaatcacgggaggacaccctgtcaaaagcagaagagatttttggaacagaacacaatgatctgtacatttctttccagaatatgcttaaccgaaactaatcatgaaaatttgtcagaagtagtattttctctcaaaatcaagcagattctact

SEQ ID NO: 215587 - DNA, 3186 bp, Zea Mays
  misc_feature (3186)..(3186): n is a, c, g, or t
tactttaatttccactcctattcttcatgtcttccccgatgccggggaccaccgccagcgccaccaagagttgatccacccaggccaggcacccgcccgtcccccggcggcggagatggcgaggaacgagacggcggccgcggccgcgccgggcgtcgacttccaccttcccgacgagatcctggccgtgatccccaccgacccgtacgagcagctggacgtggcgcgcaagatcacctccatggccatcgcctcccgcgtctcccgcctcgaggccgacgctgcgcgcctccgccgtgacctcgccgaccgtgaccgcgccgaggccgacctccgcgcctgcctcgccgactccgacgcgcgccttgccaccgctctcgacgagaacgcgaagctggcgaaggaaagggactcgctcgcggcgacggtcaaaaagctgaccaggaatttggcgaagttggaggcttttaagaaacaattgatgaaatcattgagtgaagataatctattgcaactgtctgaaaccagtcaagatcacaacgcagaagatttgacagctcgagtcccattttggaaagatgaagtttcgagcagtaacacttcttcagatgcctccagcagatctacaattactgaatccgtccatgacggaggataccagttctcgatcacaccatatatgcctccaaaattaactcctggctcaacaactatgatttcgtcctctagtggttctccccgagcttattcaactggcccaccctctcccaagttcttatctggtccgacttcacctgcaaaagctcgatctgagggccaattggcattttcatcatggcaaggatcatcaagtcatcagtattcagcacctacctctcctccccaacgccgctcattcacagggcgaccacgtatagatgggaaggaattcttccgacaagcacggacaagactttcgtatgagcaatttggagcatttttggccaatatcaaggagttcaatgctcagaaacaatcacgggaggacaccctgtcaaaagcagaagagatttttggaacagaacacaatgatctgtacatttctttccagaatatgcttaaccgaaactaatcatgaaaatttgtcagaagtagtattttctctcaaaatcaagcagattctgttggaataaacgatgcccttccgtaggttctcaagatcacattgtagagatatgtatataggccaccttaattcgaggtgttccttctcaataatttggagctgtgacttaaaagcggaaatcgcatagcatacattcactcattccctgaaattcaaggcttcctgcttgtctttctgctgtaaatccggatgcagatctcttgagctattaaggtgccttccctagttccctttgtagaaagctgtataaaactgccctttgccgttcttctaactgccaagggtacacggaatggatatatgatcacggtgcattcgttgtattgagatgttcgataaactgtgattgtgattttttattgagctttttcttccaaggctgtgaattttgatataaactacagaagaaaaaaatgaaaagcaagaaatagagaagacagaaaagttccaacacgaaactctcgctggcagatgggtcccacgtaatttccccttaaggactgatttagtagacccacatgtcatgcacacatctttccgcttatccctcaggtttcgtcttccctatcccagcactggtccaccaccatggccaccccatccaccgccggcgaccctgcccctgccggcgaaccagtaccaaccccattgcaaggaccagcccagcgtcgcatctcaacatcccgcatctcccacatcgtgcgcacctacctagacctctccagttccaggaagcgccgttccgctcctaagaaccagcccaaggccggggacaaggaaagggatgcggcggccgccgaaactgacgggtccaaggcggggccgtcctcgtcccacccgtctcggctgctccgggagctgggcatccgcgtctcccgctacacgcatgaggagcgccgggatatcatcctccgctacatgcagaagcggagcggtcgccagatcgtcaaccgcgcggccagtaaggtcccatcgaggcaggctctggcagtcaggcggcggaggggtgctggagggaagttcctcggcaaggatgacgcccagattacagataagctagaagaaaaggcagaagaagagccagaattgccaccagaagtcgtctcaaatgctggaggagtacccatagttggtatggtctttgagagtgaagaaaaagcatatgagtattatgttagttatgcaggaaacatgggatttagtgttcgaaaaggatggtgggagaaaactgctaaaaattccaacaggtcaagggtctatgtctgttccagggagggatttcgctcaaagaatgacaccaagaaacctcgctcagagacaagggtgggttgccccgcacggatagcaattaaggtggcacgtggtggtaaatatcgtgtaacagaatttgtggaggatcataatcaccagcttgctgcaccatttgatattgagatgctgaaatcacaaaggatgttgaccaaagttcgacttgggagccaaaatgctagtaacatccctccagggtacaagaattatctccggtccaagtctacaaaagatatgaaaccaggggatctcagaactctgatggattattttcggagaatgaagagtgacaatccatcgttttactatgccattcaagtggatgaaaatgacaaagcagctaatgtcttctgggcggatgcaaagtcaatcatggactatcattacttctgtgatgtagtctgcttagacatgatccacaaaacaaatgattgcagcaggcctttagctttgtttctaggtatgaaccatcatcgccaaatgaccatatttggtgctgcttttttatacgatgaatctgttgagtctttcaagtggcttcttgaaacctttaagagtgccatgtgtgggaaacacccaaagacaattttgactgatggatcttcagctttgaaggaagccctgggtcttacttggcctggtactgttcaccggtcctgtgtggtcaaatataccagagcactgttaagtcattggcacatatgtttagtgcn

SEQ ID NO: 215588 - DNA, 3211 bp, Zea Mays
  misc_feature (3211)..(3211): n is a, c, g, or t
tactttaatttccactcctattcttcatgtcttccccgatgccggggaccaccgccagcgccaccaagagttgatccacccaggccaggcacccgcccgtcccccggcggcggagatggcgaggaacgagacggcggccgcggccgcgccgggcgtcgacttccaccttcccgacgagatcctggccgtgatccccaccgacccgtacgagcagctggacgtggcgcgcaagatcacctccatggccatcgcctcccgcgtctcccgcctcgaggccgacgctgcgcgcctccgccgtgacctcgccgaccgtgaccgcgccgaggccgacctccgcgcctgcctcgccgactccgacgcgcgccttgccaccgctctcgacgagaacgcgaagctggcgaaggaaagggactcgctcgcggcgacggtcaaaaagctgaccaggaatttggcgaagacattgtttgttctgtgcagttggaggcttttaagaaacaattgatgaaatcattgagtgaagataatctattgcaactgtctgaaaccagtcaagatcacaacgcagaagatttgacagctcgagtcccattttggaaagatgaagtttcgagcagtaacacttcttcagatgcctccagcagatctacaattactgaatccgtccatgacggaggataccagttctcgatcacaccatatatgcctccaaaattaactcctggctcaacaactatgatttcgtcctctagtggttctccccgagcttattcaactggcccaccctctcccaagttcttatctggtccgacttcacctgcaaaagctcgatctgagggccaattggcattttcatcatggcaaggatcatcaagtcatcagtattcagcacctacctctcctccccaacgccgctcattcacagggcgaccacgtatagatgggaaggaattcttccgacaagcacggacaagactttcgtatgagcaatttggagcatttttggccaatatcaaggagttcaatgctcagaaacaatcacgggaggacaccctgtcaaaagcagaagagatttttggaacagaacacaatgatctgtacatttctttccagaatatgcttaaccgaaactaatcatgaaaatttgtcagaagtagtattttctctcaaaatcaagcagggtagattctgttggaataaacgatgcccttccgtaggttctcaagatcacattgtagagatatgtatataggccaccttaattcgaggtgttccttctcaataatttggagctgtgacttaaaagcggaaatcgcatagcatacattcactcattccctgaaattcaaggcttcctgcttgtctttctgctgtaaatccggatgcagatctcttgagctattaaggtgccttccctagttccctttgtagaaagctgtataaaactgccctttgccgttcttctaactgccaagggtacacggaatggatatatgatcacggtgcattcgttgtattgagatgttcgataaactgtgattgtgattttttattgagctttttcttccaaggctgtgaattttgatataaactacagaagaaaaaaatgaaaagcaagaaatagagaagacagaaaagttccaacacgaaactctcgctggcagatgggtcccacgtaatttccccttaaggactgatttagtagacccacatgtcatgcacacatctttccgcttatccctcaggtttcgtcttccctatcccagcactggtccaccaccatggccaccccatccaccgccggcgaccctgcccctgccggcgaaccagtaccaaccccattgcaaggaccagcccagcgtcgcatctcaacatcccgcatctcccacatcgtgcgcacctacctagacctctccagttccaggaagcgccgttccgctcctaagaaccagcccaaggccggggacaaggaaagggatgcggcggccgccgaaactgacgggtccaaggcggggccgtcctcgtcccacccgtctcggctgctccgggagctgggcatccgcgtctcccgctacacgcatgaggagcgccgggatatcatcctccgctacatgcagaagcggagcggtcgccagatcgtcaaccgcgcggccagtaaggtcccatcgaggcaggctctggcagtcaggcggcggaggggtgctggagggaagttcctcggcaaggatgacgcccagattacagataagctagaagaaaaggcagaagaagagccagaattgccaccagaagtcgtctcaaatgctggaggagtacccatagttggtatggtctttgagagtgaagaaaaagcatatgagtattatgttagttatgcaggaaacatgggatttagtgttcgaaaaggatggtgggagaaaactgctaaaaattccaacaggtcaagggtctatgtctgttccagggagggatttcgctcaaagaatgacaccaagaaacctcgctcagagacaagggtgggttgccccgcacggatagcaattaaggtggcacgtggtggtaaatatcgtgtaacagaatttgtggaggatcataatcaccagcttgctgcaccatttgatattgagatgctgaaatcacaaaggatgttgaccaaagttcgacttgggagccaaaatgctagtaacatccctccagggtacaagaattatctccggtccaagtctacaaaagatatgaaaccaggggatctcagaactctgatggattattttcggagaatgaagagtgacaatccatcgttttactatgccattcaagtggatgaaaatgacaaagcagctaatgtcttctgggcggatgcaaagtcaatcatggactatcattacttctgtgatgtagtctgcttagacatgatccacaaaacaaatgattgcagcaggcctttagctttgtttctaggtatgaaccatcatcgccaaatgaccatatttggtgctgcttttttatacgatgaatctgttgagtctttcaagtggcttcttgaaacctttaagagtgccatgtgtgggaaacacccaaagacaattttgactgatggatcttcagctttgaaggaagccctgggtcttacttggcctggtactgttcaccggtcctgtgtggtcaaatataccagagcactgttaagtcattggcacatatgtttagtgcn

SEQ ID NO: 215589 - DNA, 2360 bp, Zea Mays
  misc_feature (2360)..(2360): n is a, c, g, or t
tactttaatttccactcctattcttcatgtcttccccgatgccggggaccaccgccagcgccaccaagagttgatccacccaggccaggcacccgcccgtcccccggcggcggagatggcgaggaacgagacggcggccgcggccgcgccgggcgtcgacttccaccttcccgacgagatcctggccgtgatccccaccgacccgtacgagcagctggacgtggcgcgcaagatcacctccatggccatcgcctcccgcgtctcccgcctcgaggccgacgctgcgcgcctccgccgtgacctcgccgaccgtgaccgcgccgaggccgacctccgcgcctgcctcgccgactccgacgcgcgccttgccaccgctctcgacgagaacgcgaagctggcgaaggaaagggactcgctcgcggcgacggtcaaaaagctgaccaggaatttggcgaagttggaggcttttaagaaacaattgatgaaatcattgagtgaagataatctattgcaactgtctgaaaccagtcaagatcacaacgcagaagatttgacagctcgagtcccattttggaaagatgaagtttcgagcagtaacacttcttcagatgcctccagcagatctacaattactgaatccgtccatgacggaggataccagttctcgatcacaccatatatgcctccaaaattaactcctggctcaacaactatgatttcgtcctctagtggttctccccgagcttattcaactggcccaccctctcccaagttcttatctggtccgacttcacctgcaaaagctcgatctgagggccaattggcattttcatcatggcaaggatcatcaagtcatcagtattcagcacctacctctcctccccaacgccgctcattcacagggcgaccacgtatagatgggaaggaattcttccgacaagcacggacaagactttcgtatgagcaatttggagcatttttggccaatatcaaggagttcaatgctcagaaacaatcacgggaggacaccctgtcaaaagcagaagagatttttggaacagaacacaatgatctgtacatttctttccagaatatgcttaaccgaaactaatcatgaaaatttgtcagaagtagtattttctctcaaaatcaagcagggtagattctgttggaataaacgatgcccttccgtaggttctcaagatcacattgtagagatatgtatataggccaccttaattcgaggtgttccttctcaataatttggagctgtgacttaaaagcggaaatcgcatagcatacattcactcattccctgaaattcaaggcttcctgcttgtctttctgctgtaaatccggatgcagatctcttgagctattaagattacagataagctagaagaaaaggcagaagaagagccagaattgccaccagaagtcgtctcaaatgctggaggagtacccatagttggtatggtctttgagagtgaagaaaaagcatatgagtattatgttagttatgcaggaaacatgggatttagtgttcgaaaaggatggtgggagaaaactgctaaaaattccaacaggtcaagggtctatgtctgttccagggagggatttcgctcaaagaatgacaccaagaaacctcgctcagagacaagggtgggttgccccgcacggatagcaattaaggtggcacgtggtggtaaatatcgtgtaacagaatttgtggaggatcataatcaccagcttgctgcaccatttgatattgagatgctgaaatcacaaaggatgttgaccaaagttcgacttgggagccaaaatgctagtaacatccctccagggtacaagaattatctccggtccaagtctacaaaagatatgaaaccaggggatctcagaactctgatggattattttcggagaatgaagagtgacaatccatcgttttactatgccattcaagtggatgaaaatgacaaagcagctaatgtcttctgggcggatgcaaagtcaatcatggactatcattacttctgtgatgtagtctgcttagacatgatccacaaaacaaatgattgcagcaggcctttagctttgtttctaggtatgaaccatcatcgccaaatgaccatatttggtgctgcttttttatacgatgaatctgttgagtctttcaagtggcttcttgaaacctttaagagtgccatgtgtgggaaacacccaaagacaattttgactgatggatcttcagctttgaaggaagccctgggtcttacttggcctggtactgttcaccggtcctgtgtggtcaaatataccagagcactgttaagtcattggcacatatgtttagtgcn

SEQ ID NO: 215590 - DNA, 561 bp, Zea Mays
atgccagagagcccgtgggggttatctcctttcaaagtacgtgagaggtctaccgcgagagctggcaagtctgcaattgtcaagtattcaaataaaaagaaaggtgctggtaaaacagctattattgagggattggctcttataattgctaatggagacgttcatatcttccttgtgggaggttctgatccactgcaatttatgctacaggttagagctctttgtgagaaggcaaaggagattctgatggaggaaagcaatgttcagagtcctgttactatatgcggtgatattcatggacaatttcatgatcttgctgaactcttccgaatcggtggaaagtgtccagatacgaactacttgtttatgggagattatgttgaccgtggttactactctatcgaaactgtcacacttttggtggctttaaaagttcgatatcctcagaggatcaccattctcagaggaaaccatgaaagccgactactcacctgtcatatagtttcatcgatcaacctaccggccggtctcatcgatccaggcattgctggccttgcgatc

SEQ ID NO: 215591 - DNA, 1198 bp, Zea Mays
aagagggggaacagaccctagctttagcgctttcttttcagcttgtcacggacaaggcgtcgatgctggacgagatcgtcgactacgtcaagttccttcagctccaagtcaaggtgctgagcatgagccggctaggtggtgccgctgccgtcgcgccgctggtggccgacatgtcctcggagggtcgaggcggcgtggcggtcgcggccgggagcgatgatgggctggcggtgacggagcagcaggtggcgaagctgatggaggaggacatgggcaccgccatgcagtacctgcaagggaagggcctgtgcctcatgccggtctccctcgcctccgccatatcctccgcgacgtgccacatgcgacctccggtgggaggaccgggcctcggggtcgccgccgccgccgcgcaccacatggccgctatgcggttgccgccccacgccatgaacggcggcgccggagccggagccgacgccgtgccggcctcacccagcatgtccgtgctcacggcgcagtcggccatggcgcccaacggcgccgggggtgggactgatggcgagggctcgcactcgcagcagcagcagcggcatcatcccaaggacgccgcgtccgtgtcgaagccgtgatccgctcgtgaacgtgaaggcaacggccgccgtgacactaacggcgcaaccatgacatgacactcggagctgacaaagtgggctctttggcgggcccacccacgggctctcggcactgcagctggccctccgaccttcccccttttcgcattttattcccagtgtaaccattgtttttttttccttgtttaatattaatcccatgtattatcgattcgcaaatgcaaggctggttctcctctgcttgctttgcgccagctttaccctctcttttcccgccatccgcatcaacctttttctgttgctgccctcgctttggccacggcccgctgccagatttgtcctttgcggttggacggggaatttggtctcccagcttcggctgctgacccaattttattatgttttttatattctcccccgtgtatcttgctatatcttgtgtactctcggccccaccggtgaagaacaaaatgtgctggctgctgctggtattctagctcgctagggacttaagggatgcatcgatatatgatgcttggaattttaggttgtcaatttactgtttg

SEQ ID NO: 215592 - DNA, 1238 bp, Zea Mays
tgtaatcatgctttggtatgcagcttcggcaattatgcaagatatcgggggtaaaggtctgctttgatactgaaaatgctcgtgattctttctacagagcagcagtgaactttgttttagatgattgcagcagagcagcaaaagacatcggtgcagcaaaacttaatggtgaggatccaagggattttctcgccggccttgctagcaatattggattagacaagtttcgtgctgccactcttgtatgtgcatcagttgctactcgtacacggacatgcttcttgcaatgctgggctctagagattcaaggaaaacggccagaagcactggatgaactcgtgaagatttgtagaattcattacatatttcctccagaggacaattctgcagagatggaaatggtggctgctggactagaaaagaatttgcatgttgccgagagggttcaccttctatatctatacaggagcgtttgtactgctggtaacttaaaaacagctgcacaggctcttggtctgagtttgccaaatgagaatacagaaggatttgcaatgcccattcgtcaaccatagatgaaggctttgaagcccctgacgcagttttggtattcctactttcttaacatgcattatgcagtatgctaccaagacaagaatcaagcatactgcagattcccttctcaacagaatcttagggacagatctgcacgggccccccagacaaatgctgaatcaattgttccgttcatgtgcatttgatagaggggtgctctttaatatgtgcaatgtcatcaaaacctcgtatattcagatgatcgattctgctcaccaaacgcgcccaccgccatgcctaatatcgtggccgtattgggagtatcatggccgtattgggagttctcttctgcagctgtagttggttaggacatctacaacctgagtctttgaattgttattttaagagctacaaaaactgtgcgatgagaattggttttttaagagctaaaaaactgtatgatataatgagatgtcttcaatattaatcacataataaatatagttaatagacaatgtgtagtgtagagagactctttgcaaagagatctctcttatattttttatttaacccttatttctgaaaaggctgtattaaatgatattgtatatgtcattatttcgtggtcgtattgggagtctgctgttgctggttaccattgattacagaagcaaagagaaattcct

SEQ ID NO: 215593 - DNA, 1216 bp, Zea Mays
atgcagcttcggcaattatgcaagatatcgggggtaaaggtctgctttgatactgaaaatgctcgtgattctttctacagagcagcagtgaactttgttttagatgattgcagcagcaaaagacatcggtgcagcaaaacttaatggtgaggatccaagggattttctcgccggccttgctagcaatattggattagacaagtttcgtgctgccactcttgtatgtgcatcagttgctactcgtacacggacatgcttcttgcaatgctgggctctagagattcaaggaaaacggccagaagcactggatgaactcgtgaagatttgtagaattcattacatatttcctccagaggacaattctgcagagatggaaatggtggctgctggactagaaaagaatttgcatgttgccgagagggttcaccttctatatctatacaggagcgtttgtactgctggtaacttaaaaacagctgcacaggctcttggtctgagtttgccaaatgagaatacagaaggatttgcaatgcccattcgtcaaccatagatgaaggctttgaagcccctgacgcagttttggtattcctactttcttaacatgcattatgcagtatgctaccaagacaagaatcaagcatactgcagattcccttctcaacagaatcttagggacagatctgcacgggccccccagacaaatgctgaatcaattgttccgttcatgtgcatttgatagaggggtgctctttaatatgtgcaatgtcatcaaaacctcgtatattcagatgatcgattctgctcaccaaacgcgcccaccgccatgcctaatatcgtggccgtattgggagtatcatggccgtattgggagttctcttctgcagctgtagttggttaggacatctacaacctgagtctttgaattgttattttaagagctacaaaaactgtgcgatgagaattggttttttaagagctaaaaaactgtatgatataatgagatgtcttcaatattaatcacataataaatatagttaatagacaatgtgtagtgtagagagactctttgcaaagagatctctcttatattttttatttaacccttatttctgaaaaggctgtattaaatgatattgtatatgtcattatttcgtggtcgtattgggagtctgctgttgctggttaccattgattacagaagcaaagagaaattcct

SEQ ID NO: 215594 - DNA, 1163 bp, Zea Mays
gcagcttcggcaattatgcaagatatcgggggtaaaggtctgctttgatactgaaaatgctcgtgattctttctacagagcagcagtgaactttgttttagatgattgcagcagcaaaagacatcggtgcagcaaaacttaatggtgaggatccaagggattttctcgccggccttgctagcaatattggattagacaagtttcgtgctgccactcttgctctagagattcaaggaaaacggccagaagcactggatgaactcgtgaagatttgtagaattcattacatatttcctccagaggacaattctgcagagatggaaatggtggctgctggactagaaaagaatttgcatgttgccgagagggttcaccttctatatctatacaggagcgtttgtactgctggtaacttaaaaacagctgcacaggctcttggtctgagtttgccaaatgagaatacagaaggatttgcaatgcccattcgtcaaccatagatgaaggctttgaagcccctgacgcagttttggtattcctactttcttaacatgcattatgcagtatgctaccaagacaagaatcaagcatactgcagattcccttctcaacagaatcttagggacagatctgcacgggccccccagacaaatgctgaatcaattgttccgttcatgtgcatttgatagaggggtgctctttaatatgtgcaatgtcatcaaaacctcgtatattcagatgatcgattctgctcaccaaacgcgcccaccgccatgcctaatatcgtggccgtattgggagtatcatggccgtattgggagttctcttctgcagctgtagttggttaggacatctacaacctgagtctttgaattgttattttaagagctacaaaaactgtgcgatgagaattggttttttaagagctaaaaaactgtatgatataatgagatgtcttcaatattaatcacataataaatatagttaatagacaatgtgtagtgtagagagactctttgcaaagagatctctcttatattttttatttaacccttatttctgaaaaggctgtattaaatgatattgtatatgtcattatttcgtggtcgtattgggagtctgctgttgctggttaccattgattacagaagcaaagagaaattcct

SEQ ID NO: 215595 - DNA, 541 bp, Zea Mays
caattatgcaagatatcgggggtaaaggtctgctttgatactgaaaatgctcgtgattctttctacagagcagcagtgaactttgttttagatgattgcagcagagcagcaaaagacatcggtgcagcaaaacttaatggtgaggatccaagggattttctcgccggccttgctagcaatattggattagacaagtttcgtgctgccactcttgtatgtgcatcagttgctactcgtacacggacatgcttcttgcaatgctgggctctagagattcaaggaaaacggccagaagcactggatgaactcgtgaagatttgtagaattcattacatatttcctccagaggacaattctgcagagatggaaatggtggctgctggactagaaaagaatttgcatgttgccgagagggttcaccttctatatctatacaggagcgtttgtactgctggtaacttaaaaacagctgcacaggctcttggtctgaggcaattatgcgagggcattggtgtctggctggtagccttggaagttaagg

SEQ ID NO: 215596 - DNA, 3730 bp, Zea Mays
tttttgtaacggtcgtagacaattatgagaaactcaaactacgtgaccaggcaggtagctgcaataatgaaaaagtaaattaaagatttaataggtttgtttatgttatattccgtccgtacttacttagaaggcgccactacctttgatacagagaccaagaaatggtttaattcctgttatttttcaatgacctgacgtttcctgataaagaacaagtatgagttggcgtactaatactggtgaggggaaaaaagtaaacatgcatgcatgtgaatccaaccgataaagagctgagaagcccgcaagtgcagtaaatgccacattgttacatgtcatcaaaataagagccgagagaggtgcactttgtactctagaacatctgcaaaatacagttacaccttttatattatgacacaggaagtaatactaacacacagatacagttaccaggtttgttcttctcttgagagcattataatgggacagggcaaatgcagtcgttattgcattgacaaccatgaaatgcaattcaggaagtctggaaggataaacagctaactagttatttttttaaaacaaagtagcaagagtgctgcctatatttatattaaggaaaaggagtaaaagcacacgagagagcgacaaatggaaagaattaaaaaggctaacaatgtatcttcctagactagacctctaagctaccagcatgagctacatagtaaatatggattccgctcttgtgatttgaaggggcataatatagatatcaaaaggctgtttgggggcatctattacctaatgcagaatcttgggctctaactaatgagcctgagagtgcttcattgatttaatcgccactacttatgttaggatctagcaagtgcagcagcgctgctcctaacttactgcctttaacaagctggcactacatatagtgccgatttcattgagtagataacgttaaagtctttagtatgtattcaagaattattcatcagatttcaaacagccattgaccattgcataagggattggtttcacctaatgacaataccattgcgtagccacaaccaaagatccttcgcatcagatcaccgaaatggtcgaagaaatgataccttggagatcggggatggattgggagtggcggaaaaggagcagcagcgcgtcgtcggccgcggaggcggtggagcgaaggaatccgagcaggctgcggagcccacgcgcgcggaggaaggagaagtccgccttggcgtcgcgcaaccctgagtgcagcgccagcgtcacctcccggtacaaacgtcgccgcgccagcgcatctgccagctcccggccactgccacttcctcctcccccatcagtggcagacgaagaagacccatcctgtcctgccggctccgcctccttccgactcatccccgtcgcctccgaccgccggcgacgtcgcccccctcccctcctcttcgttctccgtctttcccgttttacccctggctaatggggagaaaccgacggcttgtaatttcagagcccacggcccatcaaggcccagaaaagcccaacgcgatcacacgagtgggactggggagtagtgaggcgagagcttctccccgcgccgccgccaaaaccctcaaaacccgagacgccggcggtgaagaggagagggcggaggcggagatggcgacgcggatgaaggacgtggcgcggaggtcgaccaagaagtacgtggaggaggcgctgtaccggcgtctgttccggaaggggtcgacgccgcaggcggttcgagaggaggtggatggcttcctcgacagccggaagcgggcgttcaagtgggaggtgggcgtttgcgtccgccggatgcggcggaacgcgctctaccgcccgtcgctcaagctttctgaagttatggcgagaagaggcatgaatcctactgttagtgatcaagcaatccgcctggatctcattgccaaatcgagaggcatcgctgctgccgagaagtactttttggacctcccagaaacatccaagactcatcttacatatggcgctcttctcaattcttactgcaaagagttgatgactgagaaggccgagtcccttatggagaaaatgaaggagctcaactttgctttcactgccatgtccttcaacagcttaatgacgatgtacaccaaagtcaaccaagctgagaaggtccccagtatcattcaggacatgaaggcagatgacgtattgccagatgtctttacttataatgtttggatgagggcgcttgcagctctcaaggacataccaggggttgagagggtgattgaagagatgaaacgggatggccgtgttgctcctgattggacaacatacagcaacctggcttccatatatgttgaggctggaatgtttgagaaggcagaggctgctcttaaggagcttgagaagcggaacaccagcaatgacatcgaagcctaccagttccttattacattgtatgggcgtacacagaacttagtggaagttcaccgtgtctggcgatcgctgaagcgggataaccctagaatggcaaacatgagctaccttaacatgattcaggttttggccaacttgaaggacctgtctgctgccgaagcctgttttaaggagtgggaagcccgacacatccatccacccaagaccaacacaaagggctcgggggcagataatacacctggtgcagatccaaaatctccaagtaacccgcctaataatcagtctggcaccaaggaaaccggggacgagacagcagaggacctccagccgaagcatccaaaatatgacatccgggtagcaaacgctatgatcaaggcgtacattaccgagggcatgcttgacaaagctgtcgccatgaagaagcgtgccaagatgcgcggcggaaggctgaacgccaagacatgggagatcttcatggagcattacctcaagacgggggatctcaagatggcccattggtgcgcggaccgcgcgatgaagaaggggcacagcagcggcaggatttgggtgccgccgcccgccgtgacggagaccctgatgagctacttcgaggagaacaaggacgtcgatggggccgagcggtacgtgggggctctgaagaaggtgcagaaggatctgggcgcaccggtgttcgagccgctggtgcggacgtacgctgccgccgggaagaagttccccgggatgcggcagcggctgaagatcgagaacgtggaggtcggggaggggacggcccagctgcttgactctatctgcgccgatcaatagcccaagcacgtcctagaggcggtggcagcgttggtggcggctgctatgcgatgggggcaccacctccgttgatgtattgtctggtgcgggactgcgagtgacctctgaggcgggggcggagaataactggatctacctaacgtcggaatggagacctgcaggtccatttgaaattaaacagaaggttggtaagagtgtgatggtgctcattttgcgttttagaggatccatacttgcatgtagccaaagaaactattttagtaccttttttccttgtactttttttttgtcttattgctttgcctggagctacttgaaatgctccacagttatgtcctctttttaactgagatgtcgttggcctgaacaaaggatgcttgacgcttcgaagtcacacgcaatgataaattcagtttgcagcatcgcgatgcatttggac

SEQ ID NO: 215597 - DNA, 2063 bp, Zea Mays
gataagattagatctagtgcttaaaggtcaagtaaccctctctatataaggagaaggactgtatcaattgaaggtaagcaagaattagaaggaaatccctcctctcttgccggccgtgggcagaggcccccggccggcctccccagcaccccatccttactcgctgcgccacgtccccggtaggatccgcaatcctatcaacccaccagatcctgatccccaacaacagctttctgaagttatggcgagaagaggcatgaatcctactgttagtgatcaagcaatccgcctggatctcattgccaaatcgagaggcatcgctgctgccgagaagtactttttggacctcccagaaacatccaagactcatcttacatatggcgctcttctcaattcttactgcaaagagttgatgactgagaaggccgagtcccttatggagaaaatgaaggagctcaactttgctttcactgccatgtccttcaacagcttaatgacgatgtacaccaaagtcaaccaagctgagaaggtccccagtatcattcaggacatgaaggcagatgacgtattgccagatgtctttacttataatgtttggatgagggcgcttgcagctctcaaggacataccaggggttgagagggtgattgaagagatgaaacgggatggccgtgttgctcctgattggacaacatacagcaacctggcttccatatatgttgaggctggaatgtttgagaaggcagaggctgctcttaaggagcttgagaagcggaacaccagcaatgacatcgaagcctaccagttccttattacattgtatgggcgtacacagaacttagtggaagttcaccgtgtctggcgatcgctgaagcgggataaccctagaatggcaaacatgagctaccttaacatgattcaggttttggccaacttgaaggacctgtctgctgccgaagcctgttttaaggagtgggaagcccgacacatccatccacccaagaccaacacaaagggctcgggggcagataatacacctggtgcagatccaaaatctccaagtaacccgcctaataatcagtctggcaccaaggaaaccggggacgagacagcagaggacctccagccgaagcatccaaaatatgacatccgggtagcaaacgctatgatcaaggcgtacattaccgagggcatgcttgacaaagctgtcgccatgaagaagcgtgccaagatgcgcggcggaaggctgaacgccaagacatgggagatcttcatggagcattacctcaagacgggggatctcaagatggcccattggtgcgcggaccgcgcgatgaagaaggggcacagcagcggcaggatttgggtgccgccgcccgccgtgacggagaccctgatgagctacttcgaggagaacaaggacgtcgatggggccgagcggtacgtgggggctctgaagaaggtgcagaaggatctgggcgcaccggtgttcgagccgctggtgcggacgtacgctgccgccgggaagaagttccccgggatgcggcagcggctgaagatcgagaacgtggaggtcggggaggggacggcccagctgcttgactctatctgcgccgatcaatagcccaagcacgtcctagaggcggtggcagcgttggtggcggctgctatgcgatgggggcaccacctccgttgatgtattgtctggtgcgggactgcgagtgacctctgaggcgggggcggagaataactggatctacctaacgtcggaatggagacctgcaggtccatttgaaattaaacagaaggttggtaagagtgtgatggtgctcattttgcgttttagaggatccatacttgcatgtagccaaagaaactattttagtaccttttttccttgtactttttttttgtcttattgctttgcctggagctacttgaaatgctccacagttatgtcctctttttaactgagatgtcgttggcctgaacaaaggatgcttgacgcttcgaagtcacacgcaatgataaattcagtttgcagcatcgcgatgcatttggac

SEQ ID NO: 215598 - DNA, 4247 bp, Zea Mays
atggctgtaggtaataaggctgtggcggctgtggttatggtcgtgacgatcctgtcatcggcggccgccgtccatctggctccgcccacgcccacggcggtgatcagaaagcttctgcagcaggaggaggacgactgcttgccacccatgattattggcagttgctgcaccggatgcggtcttttcccttttcatggtcctgtaggacgctgctgtgatcctgataacaacgtctgcacgctggtgcccggcgatggcagcgatttcgaagcttgcgtgcctcgtgatattcttgtagtggctccagactttgggtacctctgtgacacaaacaaagatagtgttcacgcacaacgtatccgcaagacccagcaggcaccaattgctacctggacaaggagaatcagacacacattggaatgtctttctcctagagttggaggagcactcaagtcgcaccttgacgtcgccaccatactgtccaagtactgtgcgtacctggtggtctcagcaccaaagttgcttcctgggaaccactatgactctagccttgtgtttgatgcagtcgcagtggaggccgcgcagtttctgcggggagtggaagacgggtatgaagccttgagaagcttgcctgaatcaacagaaacagaattatccatcctccggaggggggtgaagctggcgaggcagctcgaggagatggagtgtgacaggtgttggaaggtgctcgcggatttctggtcagagatgttgctctacatcgcgccatcggagaatgtgaaggagcacatcgaggcactggcaaatggaggggagttcataacacactggtgggcgttgctcacccacgctggcattctagataggaatgtccacagtgcgtgacatagaaaatccatctacaaactcaggccacaaatcaacagccaatgggaatatctgagaaaccttcacgttagagagagatgcaagcagcaaaccgcggcttcggagacgaggagaagagcagggtagggtaggtgtgcttgtgacaagagctgaaggctgcaatgcacatgctctctgctgaagcagcaaaccgcggcgaggtagcagggatatggtggcttcagtcggcggcgatggttgggtcgtctgcaggagattacgacatggtcgatcgtctaagggcttcggccttggatcgcttccaaacagtggatcgtcgggctttgcgtggtcggggccccagacttgatcgtggtcgcggctcatggcgtggccgtggtgggcgctttggtgggcgctcgtttctggaatctgatagaagagtcatccgagacatgcctgaatcgagcagaggggtcgtgtcatccaatgcttttgatgaagatgctaaaaagagagcagcagacacagtagatgacggcgccctggctgatggcaagggcaagaaacgccgtgaggatctctgctgtgagatttgtgagggagaccatgtgccgcttgactgtcaggtatacaatggtcctaaaccccatgccattctttgcggttttgggagtggtgaatctgggttctttcaaattcccaactttggttcaaaggggttgatcccgctgaaagaaagttcaactgcttttatcactgccaaggaaggcaccattacggcagagttagtaaagtctgagttggctcgtctcattccggtgagatggacttgggctgtccaaagtcatgcgaatggtttcgttgtaccttttccgtccaaagtcgaattacaacggatggtggccatgaaatttgttcatgctgtagatggtaaaagcataatggtcattcaagaacttgagcagaaaatagagcccgttcaacatttggaaaaggcttgggtcaatatctacggagtgccgtatgaaattcgatcttttcttcctctttgggcggtgggcaccattataggtgctacccagaaagtcgatctaagatatacaaaacagatgggtgttgttcggctcttagttggtgtaacaaacgtcgacaagatcccagaatcggttgacatagtggtcggggaaggcttgtatgaaattttctttaaaattgataaggtttgcaaagatggagtttggtcagaatattattacccttctgataagaaagatgatgattttgaatccaaggatgaggattttgatgggctcgatgatatccagcctaagtttgatgataccaccagggacactgtgatgaaagatgtgtccggtagcaaagttgataattcttctaatgtccaacatgctactcagcagaattgtgatattcgtcaaaccgatgcgctagaaaaatgcttagttgctgttaataggtcttcagtttttagggagaatgttgcagcaccaactgctgttgcgcatggggtcgtttatgataataagtggacagaggctgaaggcacaattattctgaacgccaagcaaactgcacaaaagagagatatgccacagatttacccagttgctgctcctagggctgcagagtctagaaaaaataatgatgtaccttttgatgtagtgagcaggactgttggtagagaggggcatgtagatgccgatgcatttaacctgaacaccatatgccatgaatctgggaaaaaggcagctgcaccttttgttgtagtgtgcacagctgatgcgagtgaggggtctgttgatgccaattcaatctgcctgaattcctttcctggtgttcctgcgagtgcagcagctgtttatccaatttcattggaagacatcaacacagacctcaacagtgtggcgattgaattttcgccagcaacaaatattcatgcagctattccaaatgtatcagttgagcagatacatgagcatgtccggggagctgagcactcggtggctcagctcacctctcccggtggtgcagatgggagtggggctcttgttgaaaatttctcactccaagacatggagactttaatatcgtgcatacatgcatggaccatggtggtggtaccttcaatatgataacttctttgtcagaggtaccgagagttactttacaacatttatgcaaacaatttaagattaaagctaatataaaaaatgatgaaatggtacaggcgctcaatcagttggcccagtcaaatgaccaaatcttgatttctcttcaagattattttaaatcaaaatctctttctcaaagaccaatggcccgagaagatcttactcaggtcttgggcaagcgggtggtttctgatgaggacactttaagcaaggctcagcgtcttgcggcaaagcgcaatttagaaatcagtgagtattcatttcttccttttaagcctaaagttattgctaccaagttaaataatgttgggattcgcttgggcagaaatgataaagaggttcttacctcagctatttctattaagaatatagaggtcgatcgactcatggcttctagtatttcatccccatccattcgtcgtgctgttttaaatgaagaagatgataatgacattgatgaacatctttcacatgctattaagcgatgggatgaaaattctgagcatgatgatctagagtggggatacgaccttagtgctgttccatgccgtaagaaggcgaatcactttacttatgcatggagggttcctcggccttctaaaaaacccatcacaccatctaaaattagtttaaaatgaagggaattttttggaatagcagaggtctcgctgacttggctaaacataattaccttgcgtcgttatctaaaaaatatcgacttgactttttagcgatctttgagacgggcagggactttttctcggagtccactttgcgccatttaagtggtggtatagattttctttggcatactatgccacctagagggagatctggtggtatgattttaggtgtaaatccagctgttttagacgttggagctatcgatgagggggatcattactctaaatttctccttagaaataaatcagatgattttaaatggtccctttatgcagtgtacggcccgactcaggacaatctcaagaatgcttttttagcagagatggttaatgtagctggtgcggaactgaacccttttattatagggggagatttcaatataatgaggcggccagaggataaaaataaagataacttcaatccccgatggcctaatctatttaatgctgtcatagagagccttgagataaaagaaattgaattaaaggtcgtcaatttact

SEQ ID NO: 215599 - DNA, 2505 bp, Zea Mays
atggctgtaggtaataaggctgtggcggctgtggttatggtcgtgacgatcctgtcatcggcggccgccgtccatctggctccgcccacgcccacggcggtgatcagaaagcttctgcagcaggaggaggacgactgcttgccacccatgattattggcagttgctgcaccggatgcggtcttttcccttttcatggtcctgtaggacgctgctgtgatcctgataacaacgtctgcacgctggtgcccggcgatggcagcgatttcgaagcttgcgtgcctcgtgatattcttgtagtggctccagactttgggtacctctgtgacacaaacaaagatagtgttcacgcacaacgtatccgcaagacccagcaggcaccaattgctacctggacaaggagaatcagacacacattggaatgtctttctcctagagttggaggagcactcaagtcgcaccttgacgtcgccaccatactgtccaagtactgtgcgtacctggtggtctcagcaccaaagttgcttcctgggaaccactatgactctagccttgtgtttgatgcagtcgcagtggaggccgcgcagtttctgcggggagtggaagacgggtatgaagccttgagaagcttgcctgaatcaacagaaacagaattatccatcctccggaggggggtgaagctggcgaggcagctcgaggagatggagtgtgacaggtgttggaaggtgctcgcggatttctggtcagagatgttgctctacatcgcgccatcggagaatgtgaaggagcacatcgaggcactggcaaatggaggggagttcataacacactggtgggcgttgctcacccacgctggcattctagataggaatgtccacacaaaccgcggcgaggtagcagggatatggtggcttcagtcggcggcgatggttgggtcgtctgcaggagattacgacatggtcgatcgtctaaggtaagtactcccgttcgtgttgcaggcagttctgcgtcttcgtcagggcttcggccttggatcgcttccaaacagtggatcgtcgggctttgcgtggtcggggccccagacttgatcgtggtcgcggctcatggcgtggccgtggtgggcgctttggtgggcgctcgtttctggaatctgatagaagagtcatccgagacatgcctgaatcgagcagaggggtcgtgtcatccaatgcttttgatgaagatgctaaaaagagagcagcagacacagtagatgacggcgccctggctgatggcaagggcaagaaacgccgtgaggatctctgctgtgagatttgtgagggagaccatgtgccgcttgactgtcaggtatacaatggtcctaaaccccatgccattctttgcggttttgggagtggtgaatctgggttctttcaaattcccaactttggttcaaaggggttgatcccgctgaaagaaagttcaactgcttttatcactgccaaggaaggcaccattacggcagagttagtaaagtctgagttggctcgtctcattccggtgagatggacttgggctgtccaaagtcatgcgaatggtttcgttgtaccttttccgtccaaagtcgaattacaacggatggtggccatgaaatttgttcatgctgtagatggtaaaagcataatggtcattcaagaacttgagcagaaaatagagcccgttcaacatttggaaaaggcttgggtcaatatctacggagtgccgtatgaaattcgatcttttcttcctctttgggcggtgggcaccattataggtgctacccagaaagtcgatctaagatatacaaaacagatgggtgttgttcggctcttagttggtgtaacaaacgtcgacaagatcccagaatcggttgacatagtggtcggggaaggcttgtatgaaattttctttaaaattgataaggtttgcaaagatggagtttggtcagaatattattacccttctgataagaaagatgatgattttgaatccaaggatgaggattttgatgggctcgatgatatccagcctaagtttgatgataccaccagggacactgtgatgaaagatgtgtccggtagcaaagttgataattcttctaatgtccaacatgctactcagcagaattgtgatattcgtcaaaccggtgtgccttctgactttggttctttggctcaaagtactgaaagttttattcctcatattaatacatcttctcttgattgctcagatgcgctagaaaaatgcttagttgctgttaataggtcttcagtttttagggagaatgttgcagcaccaactgctgttgcgcatggggtcgtttatgataataagtggacagaggctgaaggcacaattattctgaacgccaagcaaactgcacaaaagagaggtgaattttctaggaccggtgggccttcttcttacttggcttctatggttcaacttaatgaaggttcttttcagggcaacatactggctcatattct

SEQ ID NO: 215600 - DNA, 792 bp, Zea Mays
ttttacccttctctagttctcttcacaagaagaagcgagggattgaaagggaaaggcaggaaaacaacatggcataacccaaaaaaagcaaagtgcaacaaaaagcaagcatggctcagcagcttgctttggttctactctcccccctcggcctcggcctcggcccctcaaaagcacagcagaatcggccaaagcaaaagaatgcccccagaggcggccaggaacagaacaagaagcaagaatactgagtaccgcagcagcgactgactgacacaaatcctgctgctacagtgctacttcctccccacacacacacattataatatgcagtcacgttgcgcggccgcagcagcgctgcatcgcattagcgccaccctagtccccatgcccgtgagaggaagctcttagaaggccagcgctgtcgccaggagagagagagagagagaggaggaggaggaggaggaggaagccacgacggcggaagacgacgcagcgcggcggcgaccggcgggtgtcatggcaaggtcggccgtggccgtgaggcgggcggcattggccatcgtgttcggagggcttctcctgatgtcgttggttatggacgacgtcaagaaagcggcgatcggcgggaggaggatgctggccagaggcgacggacgagggcagagcactctggaggatttccaggctgctgatgttcccttccaggacagcaagagaagggtgcccaacggtcctgatcctatccacaacaggggaaccggcaaatcaggacggtcgccgggccgagcgtga

SEQ ID NO: 215601 - DNA, 6398 bp, Zea Mays
cgcagcccactcgacgccatctcatctcgagtcgcctgtagcagatctctcctgcgccctgctgctctcgcctctcggtctctccttctgagaggcaaccacaatccccaatcacaaaccctagggaagccggtaggcaggcaccggcggccgacaagcgcaacgctgcgacggtgcaaccgcgttgccatcgcccagcgcgaggctgcgacaagcggacggaggcgaatgcgcgccaccgcctagcgtgcgaactctgcagcgcgccaacggaagtagagcaggcgggcagcatccagcgtcccggcctcccggggccgagctcgagcgccgcgcacacacgtccgactgacggtgtgtagtagcggtggctgggaatactcaatcacccaaatcctggtctggcactattccactcatagaatcagtatgtccgacgctgagccacctcctgcaatggaggtggccacgctgacaaccccggatgttatgctaggcgaggactacaaggatattgaggctattgagggtcagaaggattacgagacttgttatggtggaggtggcagtgttatagtggcaaatgagctcgtggggatttctgaagaccccaaccaacccgatattgctactgctgacgagccagaggagggtgctgatgtagaggggcaaactaatgacattagtgctgccgtgtcaacctccaagctggtggatgatcccatggaggttggcatgcaaacagaggttagtgctgctgcagatgatctcatagaggtcggtgctgctctggtatcatctgcagaggattgcacagcggtggctgcttgcctggttaatgatgactgcaatataattttccctggaggtgtgcataggtccgatgaccaaactgatcaggagtttggtggcaattcccttgacgctgatgaggtcgctctcttggtaaatgacatacaagatgacagtgcaaggatggatatggatgtttcagcccatggtgatgtgcatgctcaggatcgggaaagctcacagttggatgtggctacagctctgttaaatgaggtgggaacagagcttgtggaagctggtgaccatgctgtacaggaatgcacaaatatggatatgcggattcaagccggagataacaatgaggcagaacgtgttggcactattgctgacactgccacaaatgaggagcacagacacatgggtgaagttaccatgaccagagatgatagtgagaaacatgatgtggcaggtggtgttgatgtgcctgatgagaggatacaaatgggtaggggtggactgcctggagatgataatgagcaaaaggaagttgcaacagctgatgaagatcgtgtggaagatgaaggcatgcaggtagatgcagtaaacattactggagacatggttgaggaaggcagaattgctgttgaatacattgcaggtgaagctgtaattggcgagggtggtattgatgtccctgaagaaaaggctgctcagatagacagggcgggtaatgacattcccgaagaagagggtctccaaatgggggaagctggcttgattggcagtgataatgggctgaaagaggctgtgattgctgatcatgatggagtggaagtaaatgccataccgacggaggcaactggcacaactaacgatgatgatgaaaacaacacaattgttggtgaagatgttgcagaggctgtcaatgacataactggtgatgatgtccctgacgaagaggctgcacatatggaagatgatgacgacgacgaacctcctcctttagtggaaaagaaaggtggagggcgtcgtaagagaggccgtccatcttccaaggtccagggtgtggtcaagccatctgtaaagaggaaggatgaggaggaggtttgcttcatttgctttgatggtggtgatcttgtgatttgtgatcgtaggggttgccctaaagcctaccatccttcttgtgttaaccgggatgatgacttcttcaagtcaaagggtcggtggaactgtgggtggcacatttgtagcaactgtcagaaacctgcccgccatatgtgctacacatgcaccttttcattatgcaaggcatgcatgaaagatgcaaagtttagctgtgtcagagaaaataagggcttctgtgatacatgcatgaacactgtgatgttgatagagaatagagaggaggctgcggacccaatggaggtggattttgatgacaaaggcagctggtggtatttgttcaaggactattggttaaatttgaagacaaacttgtcgttgacagttgaggaaatatcagcagccaaatctcgaaagagtggagagttacctgatactaatgatgaagttaattcagagagttcatcagggcgcaatctagaaagcaatacatcaaaaaagaggggaaggaagcgatctaaacaagctgccatcaatgagggttctgaaggaaaagcgagcactaggaaatctgccaaacgagacctgtcaggcattcatgatgttcagacctcgtcagggaaaaaggttagaaaactatccaggcgttctttgagcagccagcattcatcaaaagactctgaaagtgttgggacatctacatcctcagctgaagaggacagctgggcttctaaggagctcattaactttgtagctcatgtgagaaatggcgataaatctgtgatcagccgatatgacgttcaaccccttttacttgactatatcaaacgcaacaaactgcgtgatcctcgtcggaaaagccagataatttgtgattctttgctccaaagtctcttcgcgaaagaacgtgttgggcattttgagatgcttaagcttcttgaatcacattttttcatgagtgaggtttcaccaattgatgctgatgaaaatcatggtggtgtagtagatcctgatcctagtcaggatgctgatggtaacagtgaagcttcagttgttatgagttcagaaaaaagaagaaaatcacgcaagtatgacctgaggcaccagcctaatcttgatgattatgcggcaatagataaccataacattggcttgatgtacttacgtcgcaacctaatggaagaattgattggcgatgttgacacatttgatgagaaagttgttggatcatttgtgaggataaaaatacctggtacagggcaaaggcaagacatttatagacttgtacaaattgttgggactggaagatctgcagaaaaatataaatatgggaaaaggactactgatataactctagagatactaaacttagacaagcgggaggcagtaactattgacataatctcaaaccaagagttcactgaggaggaatgcaaacgcttgcgtcaaagcataaagtatggattcattccaaggctgactgtgggagaggttcaggagaaggcaagggttctccaaactctgaaagtcaatgactggattgaaagcgaaaagatgcgacttgggcatcttcgtgaccgcgcaagtgatatgggctatagaaaagatcttagggaatgtgtagagaagcttagattgctaagcactcctgaggagcgtgctcgtaggctgaatgaagaacttgaaatacatgctgaccctgcgatggatccatattatgaatctccggaggaacaggagcaggaaattgaaaaaagtagcttcaacaagtccagaggttctttcttgaggaaagatggtaatcctgtgcctccaggtaaaggagatggtagaaatgctgcacagcgagattcaaaaactaattgggaatctaatcgaaatacatgggccgaatcgagttctcatatggaatcaccccttccacggaggtccacattttcttctcaaggtgaaagtgctggttatacaagtaaatcagagagcccaaacactggtgcacaaacagttaaactggaaggcaccacacgcagtgctccacaagggtcacctggtgcctcttctggaattttagctaataacatatgttcaggggcaaaaactgcacctcaatcagccattaacgagtctgagaagatctggctgtacatggatccttctaataaaatccaaggtcctttctcaatcatacagctgcggaaatggaacagcaatggctacttccctcctagtttgaaaatatggaaagctagtgagaagcaggacgattccattctattgactgatgctttggcagggaagtttgagaaagaccttcctccatgggaaccgccacatgttagtttgtttcaaattaacaaaacccctcttgagcaaagcacaatagctggtgaacaaactccaaaatcagtagttgcaaagtctttctcaagtagtaatcaaagacatggttatagttcaacaaaccttggaacaaccatgatccattctggcacacaaggttattatggaatgcaaaattcccatgcagcatacacaagccaacattctcttactggaagttggaatgccacgtcaagtcagtttggggttgcggtaaatcctgtgacacctactcagcctgccatggggagcttttcaggacaaaacatagtgtctgcagaaaatatgggtcatctaactcctggaacggctcctgcagctgcaaatgcagaaatggttaattcagatttgacctcccagaagcaaatatcgtatttaccgcaaacagacggcatattagctgatgacattgaatccaaatcaggagaagatgtttcacatggaaaagtgagctcttcagccaaagcaattggaccactgggtgcacagcttggacaaggacaactgaacactcagcaacatgaagacataaaaaaccagatgtcatcaactgatgtctccaactcgacgatgccatcgcagatgatgtcaacaccatccgctgcatcagtacaaccttcattgtcaaccattgctggcagtgataatcaaagcagtgggtgggctgtacctacacaagtggtgaacacatctggccagtctcagataactggaaatctgacctggggaaatacacctcagggtgatgcaagcttaggttggggaatgatgggacagaacaatatgaatatgccttgggtagcatcagctcaaggtgcttcgggctacaacatgggtgcagccatgccaacccagccaaatgcagttccaaacatgggttggttaccaaatccaggaaacaccaacatgaacatgatctgggccgcaactcaaggccaggggattccaaatgcagctgctatgatgggaggtcagatgcaaggagtcgcagtggccccttggggtggtgttgcagcaggaaatgcaaattcttatcctgcctggggaaaccaacaagttggaaacatgaaccaaaacgttcgatggagtgctcctgtgcagggaaacccgagtcaggaaaataacaacatgaactggaatgcaccaaatggtaatcctaataattggaataatcagcagagagagaatgagggcaggcactctggacaccgtggtgcttttagtgctggcgactcaggcagaaagtcatggaagccacgctctggtgccgatggggggtcatgggggacatagaggagtctgctatacatttcttgaacgcggggactgctttaaagttgactgcaaattcgcccattcaacaaacacagagggatatccatccatccaggattcgggcaacgagatgcgatatgagaatcacaatgagagaaatgatcgacagtttgataggcagccttcggataatgaaaggcatcatgttaggcctgatgacaggcatggtggcagggatgacgataggcaggctgataggtctcagtcaagagagccgcgttagaactgatttctgtttcgtaccttccctttgttgtatgtgcagtagcaaactagcataatagcttccgtgcatgttttgaactttatgccctgtagcaagctgcaaacatgtgcaaatcgtgtacagcagttgtagtttaatgctgtgtgcgtcctagccccatatttaataatttacttgaataaatcgtagttgtctgatatctgatgtatagcaggggctacacacccaggtcctttatggtgatgactattgagtgttttcttataagcctcatgattgtaagtgaaggtgtttttggaaatcctatgacctaatgtccgatctgtgttcttcgttgtgcaatgatgccattgagcctccgtgatcaaatagtacttcattttgtttgactgttgtgggtggctgggtgctgtgtatgtgtatccacccagctggtttacctgttaagcatgtgcatcatctttcggctgatgtgtttaaaaaaaaaacaccttccacactccctcgtgctcagctgtattttaacttatttttgtaaaaaaaa

SEQ ID NO: 215602 - DNA, 6830 bp, Zea Mays
ctcacacccacccttcctcctcctccctcctctctttctctcaccaagtcgttcgtcacgcagaggaccggacgctcgtgagaggcgagacgagcaatcgaaagccggaaggaagcctaacctctcttccaaagccaaaccgaaaagggaaaaaaagtattgtcgaagagaaaaggaaaaaaataataaaggaacacaagcagcccaccggcgcatcacaggggaagcaaacaggggagaaccctagtcaacagacgccgccgccctccctggctggatctggccgccgtctcctccgccgcccgacgatcgcctgatgcttgtcccgacagaaaggcaacaataacttccctccattgggtgccttaatattcccggaaattgctactggttccactagttgaaagattcaatctatatgcatctacacatgacatgggttctcgaggaaggatgttatttgaccttaacgaactcccagcagaagttgaagaagcagcagctgctgtcgtgccaaaagaatctgctgctgttgtgccaaaagaatctgctgctgtcgtaccacaagaagctgttgttgtggcgttacaagaagctgctgttgtcgtgtcacaacctcagaaatcccttcgtgttccgacgacatatgccccaaccttgtttcagcgaggggaaggatcacagtcgcaggggatattgaacaataatgcctttaagcatgcatccattggttctggatttcagccttttgtgaggaacagcaaagattcaaacaatacaaaggagccgatgaaggtggaagataatcataattctagtatagcatcactgtccatggtaaacaatcagatcaccgacagtgctgcttcaaaggttgagacttgcaataaggtgtcacaagccattgaaagagaagaaggagaatggtctgatgcagatggcatttctgaaaatgcagggagtagcaacaaagatgagttcactggtaccgcaagcactaatttgaagaaagaatcccaagagagcgagccccatcttattaaatctggtgatgtgactaaagatgatactgctgcggaatgtagtgatgctgaaaaggttgatgcatctgaagatcgggttcacgggtccacaggatcagataacatgcaaaattctgaatgtaaaggaaatcagcctggtgatgatctagatctttgcaacaggtcaagggatgttaaaggagtcgaagccaattatgctttgaggtttgcgagcaaccccgcaaagaggcccaagttaaatgaacacaaagaggccatgttaggcaaaaaacgagctaggcaaactgtcttcatcaatgtagaggatgcgaaacaagctggtacaatgaagacatcaacacccaggaggcagtcatcttttccagcaccgattgttacacgtacagtgaaggaagcttctcgtggtgctggtgaaaaggctgcagaaaaacaaagtcagcaagcaatcagggatcagagacaacctgaaatgatgggatcagagcgaagcaattctgcagatcctagtgaccaatacactgaatccaatggtgatgctgagttgggtacccagggccggtcaaagaaaatgaatgcagaagatccagcctcagatgggtatcagcagcctgtccaaagacaagcttcattcaagcaatccatggacttgaagcaaccaaaaagccgatcattctcttcccaaagaacatttctaacaggaacaaacaatgctgatcagaagccagccagcaaaaggtctattatttccaaaaagcaaacttttgtaaacaatgtacaggattcatctgttgagcgacttataagggaggtgacaaacgataagttctggcacaatccagaggaggcagaacttgagtgtgttcctggaagctttgaatctgctgaggagtacattagagtttttgagcctttgctttttgaggaatgcagagctcagctttatagttcgtatgaggagagtcttgaggctgtgggaagggatgcacatgtagcggtccgagtaaaaactgtcgatagacgtgaaagaggatggtacgatgttgtcgttctaccgatccatgaacaaaaatggaatttcaaagaaggcgatgttgctattctatcgtttccacggcctggttcagctgcacaatcaggccgatctagtaggagagctatgggttcaaatgaggatgctgtatcagaatgtggccggcttgttggtactgttaggcgccacatgcctattgatacacgtgatcctattggagctattatccatttttatcttggtgattcatttgattctaacagtgaggctaatgttctgaataaactccaacctcggagtacctggtatctaactggacttggttctcttgcaacaacacaacgagaatatgttgctttacacgctttccgccgtcttagtgtgcagatgcaaaatgcaatacttcaaccaagtccagagcatttcccgaagtatcaagagcaaccaccagtcatgccagactgcttcaccccaaatttcgctgaccatctccatcgtagcttcaatggtcctcaattgtcggcaattcattgggctgcaacacatacagctgctggcacaaacaatggtgtcctaaagaaacaagaaccatggcctttcacgttggtacaaggtcctcctgggacagggaaaactcatactgtgtgggggatgctaaatgttatccatcttgttcagtatcaacattactatgctgctttgcttaagaagcttgctcctgaaagttacaagcaagttagtggtagcactagtaccagctcagagactgttgcagcagggtcaattgatgaactattgcagagcatggaccagaatctatttcgcactcttcccaagctttgccctaagcctcggatgcttgtatgtgccccatcaaatgctgcaacagatgagcttcttgctcgtgttcttgaccgtggttttatagatggtgaaatgaaggtataccgccctgatgttgctcgtgttggagttgattcacagtctcgagctgcacaggctgtttcagttgaaagaaggacagatcagcttttaatgaagggccgtgaagaagtaattgggtggctacatcagctaaaagcccgtgagcagcagctatcacaggagattgcctatcttcaaagggaactcaatatagttgcagcggctggtagatcccagggttcagtaggggtagatcctgatgttcttgctcaaagggatcgtaaccgtgatattctgcttcagaaacttgctgcgtcagttgaaagcagggataaagtattggtggagatgtcacggctgctgatattagaaagcaggttcggtcttggcagcaacttcaatatggaagatgctagggctagtctggaagccagttttgccaatgaagctgagattgtttttacaactgtgtcaagtagcgggcgtaagttattttcccgcctgactcatggctttgatatggttgttattgatgaggctgctcaggctagcgaagtaggagtccttcctccattggctcttggtgcagctagatgtgtcctggttggtgatccacagcaactccctgctactgttattagcaaagcagctggaactttgctttacagtaggagtctattcgagaggtttcagcaggctggttgtcctaccattttattgtcagtgcaatacaggatgcatccccagatccgtgaatttccatcaaaatacttttatcaaggccgtcttacagatagtgagagtgttgttaaattacctgatgaagcctattacagagatgcacttatggcaccttatatcttctacgacttgtcacatggccgtgagtctcataggggtgggtcatcttcatatcagaatattcatgaagcgcagtttgcattgcgtttgtatgagcaccttcagaagttcttgaaagctaacggtgccaagaaggtttctgttggtataatcacaccatataagttgcagttgaagtgccttcagcgggaatttaaggatgttatgaatactgaggaagggaaggatatctacataaatacagttgatgctttccaaggacaggagcgtgacataattattatgtcatgtgtccgtgcatcaaaccatggtgtgggtttcgttgctgatatacggcgtatgaatgtagctctaactagagctaggagagctttatgggttgttggtaatgctaatgctctcatgcagtctgaggactgggcatcgctaatagcggatgcgaaggccaggaaatgttttatggacctggattgcattcccaaggacttcttaccaatgaaggttccatctaatactccaggtaggaattcttccaacaacatccggaacatgaggactggtggtggacctagaccaagacacttggacatgttctcagaaccgagaactggtatgaacatgaggcccgatgaagatgagcgtctgaattctgttccaagaaatggtagttacaggaatttggatgattttgtccgacctggtgatcgtcccagggataatctgcagtttggagttcccaggaggccaaattcttctaatggcaggagagaagtgtaaggagtgtgttgctatctacaactctggtacagcatggaacaatggtgaagagctctgggacggtccagattcagcaaggtgcagattcatgttcagaagattagttgcctctgcattagatcccttgcaccatgtggtggggctggtcacaagaaagcattgctatcagcagaggatgtgcgaatctaccatgatgtgacctccagtcagtggatcaagacgctttcatggtgggtgattataggctcatgatgtcaggttgaagaaaggctgctgtagccctcagtgttatggagttcgcaggagtttctttctcagaacaaggctgtctgatgtgttttgacattgctatccttgctttagccagctccatctttcggtagatacatacatgcatgggcatatccattttgaaacatgccaggagaaagctcactggctctagagcagggagtacaggcaccctgaaatctgaagtgcgccttggatcatctctactttggcgctggtggttttgtggatgtcctctcagtgccactcccagaataccaggccagttgaagtcctcaagcttctgcttggattctagtgtcactctcaactcttgttatcttttgagaagagatcccctgggcccatgacgaactccaggaatgcatggttgcctgcatgatagatgtagagatggcggtcatatagttaaattacacgttctgccgtatgtatatgattttattggagctaatggattttttatctgctttgtttggagaaaaacatagtttgcatctatctctacacgacttgcttttgtaccggaggcacgcagcagcagggttgtatatgtccaacctctgatgggtctgcggtctgccgttgaaagaggggctttggagatctgaagctgggccccattcacaaggagacgcgccacaacgctccaaaggccaaaccagagattatctccgggttgtttacacattgaacttgtctttcaccttgaccttgtttatacatgaacccgcctcggatccgtcaccaggacacgccccctaacaagccaccgtaccatattatgccatcacgcggcggtagcggcaacacgcagcggcaacaggatccaactgtggtggtggtagcctttgcgcagccgaggaggagaacgagacggcgacgcgccattatgccggtgaagagcagcgccagcttccgcatgaccgcgctgcctatggtggtgacggcgcagctgctggcggctgccgtgctcacgctcacgctcgtctgggtgctgcactttcgtggtggcgtctcgtggaagccgacatccaaccctctcttcgtctacacggcacaccctctgttcatggtgatcggctttatcatctgcaccggagaagcggtgatggcgtacaggatcgtgctgggcccgaggtcggccaagaaggcggtgcacctgctgctacatctcgtagccctcaccttcgctgccgtcggcctgtacgccgccttcaagtttcaccatgacgtcggccttcctgacatccgttccctgcattcttggctcgggattgccacgatagcgctctatggtcttcagtggttgatggcattcgtgtactttgtcttccccggggctgtgatgacgatgagggcggactacgctccatggcacatcttctttggcctcgccatctttctgatggccatttgcactgctgagaccggactggccaagttcgtctccgccttcatcgcttacccaggcgaagtgtttgtcgtcaacttcaccgggatcgccatcctcatgtttggcgttgccgtcgtcttggctgtcatccttccgtcaagatactagcaagtgcttaacgattataagtccttccgatccatgcttcttctcaagtcatattgttttatttggactgtgcatgcatgctgaaatgattttgatatattgtttcatttacagagctgcatgctgctggcggtataagtttgatatatatatgatgatactagtaatgccatctaattgtcgttttaccttttaggcccctttatatgcaaaggggatccttcttcatgtcctgaacaaattgatcaattttttcttggtgaaacgtggcgcttgtgcattgtaatatgaaaaaaacgaggcaattgtttttgtgtggcactaaaaaataacatggttg

SEQ ID NO: 215603 - DNA, 2140 bp, Zea Mays
tattttttacatctcgctgctaataattttaactgcattctactatatcttatggttatgccttttatcatgaagggtaatcgccaggagctcaagccaatcatgcagccacatagttcccatgttatcacactttcacaagcatgtccgaacaacatttctgggtgcactttgacacccattaaccaacatctaaatgccgtctttatattttgtctaaacttaaacaggccccttgatctctgtgatgtaacaaacgagataacactgccgaaccatcagggttctgttggtccttctactccttcaaatctgaattccaggttaccagggtctcctgctatggttttgggcaacaattcaccgttcccttcaacattgagtagtcctagcctggtcagggtatggaagagcataggcagatgtcggagtttgacatgccggtttcacagggaagcggccaagccactatccagtttagcagcatgaattcatctttctcgagtccacctgttcagcaaccccaacggccacatcagatgtcacaatcgttacacatgtttgggaatccacaccattctcagatccagggaactagttcaagctcacaacagcaggcatatgctgtgcacttggctaaagaaagacaaatgcaacagcatatggcacctcaacagcatagtgatctttctggagcaagtgcagtacccaatgtgcagagtaatactcaaacattgcagcagggccaaacctcatctgccaattcagccccttgttcaaaatcacagcatcagcgacagcaagcggcacaaaatctgccggatagctcttcatctcccaaccaacctgccacttttacacaacagaagcagaagaaacaacaggaacaacagcagtctagacaaaatgagccacaaaggaaccgtggcagtcaacaagctaagcttatgaagagtttaggacgaggaaacatgatggcccagactcctccaattgactgcacaccaaccaatgctgcttctactccatcaaaaaaccatgtgtctgaaaaactggtgcaacatggccaaggacatttccctgccaatacaacaccagtaccgtcaatgcctcaacctaggctagtcacttcgttgcctcagtcaccaacgaaggtggcagacattggtaaccaaggtttaaaaaagggtggttctttgagtcaggccatgttagctttgcaacaacctccacatggttctaaatcgacattgaccactcagctgcagcagcggcaggtcaatccgccacagaacaacaatgggagagcagtggtgcaacagaaccgccaaatgaactctgactgtaggacagacttgcacgtcggtcaggtccgtcacaatcagatggttccaacatccatgccacagagtgcagattcgtgtagccctgtactgtcatctgtaaaccagcagaagcgtgagccatcgctcaatcagacttcagttacctcgccgtctaacctgcttaggtctcctaaagatacttcttttgggtagccaagacatgctacaaaggcaagttttcaggtggcttccctatacaggctcatggtgttggtgaccagtggaaccaacatggcagagagcaattgcagtctcagcatcagcagagacaaccggttgttcaaggcagtgcatatgctccttcaaattctgggcctggctgatcattaattatttcaggattcgtttttcttattcaagtgacagtttgacaaagttcattaagagccagagtcggatgagggactgtatggctgcatggatgcatggaccaggatggcccatgagaccaggccaggcgaagccatattttttagggtcctttgtttcattggggccctagattagcctgatttacccgtttgatctatggatttacctcccgtatcgaggtcgagatgcacattagtttccatgagtgtcttgatcggcttgacatccttcatcccaaacttgatgagtatgtcttgaatgtatttcgtttgactgatgaaagtgcccttttgaagttgctttacttgaaatcctaagaaatacttcaactcctctatcatagacatctcgaatttttgactcataatcatactaaactcttc

SEQ ID NO: 215604 - DNA, 2928 bp, Zea Mays
atggcctttttggtggccctgccaccccaatcttgcatgctgaattcaacccttgctccagcgacgtgtcggctccgtcttggcgcagcagcatatgatgttggagagggagaactgctttcttactgtttcggtttggtatcaacagaaaaacatcagatgacttctggtggatggtcaaacttcgaggatcaggcacttgttgtccttgtccatgatatgggtcaaaactgggaactagttagtgacgcaatcaacaacatcgtgcagttcaagtgtgtacataggcagcctaaagagtgcaaggagcgccacaaggttcttttggatagaagctctggtgatggtgctgacagtgcagaagactctggttcatctcagcattaccataatacattgccgggcattccaaagggtagcgcaaggcaattatttgagcgacttcaaggaccatttgacgaagagaatctcaaggcacattttgaaaaaattatactactcatgcaacaagtgcatgccagacgtagacagggtaatcgccaggagctcaagccaatcatgcagccacatagttcccatgttatcacactttcacaagcatgtccgaacaacatttctgggtgcactttgacgccccttgatctctgtgatgtaacaaacgagataacactgccgaaccatcagggttctgttggtccttctactccttcaaatctgaattccaggttaccagggtctcctgctatggttttgggcaacaattcaccgttcccttcaacattgagtagtcctagggatgctcagaaatatggtgttcccagacctatctctttacagggtgatgagcaaccaaagattcagtataatcagatggtcaatgacagaaatcttcatgaacctggagtttctgctcctggaactactccttccggggttgattgtggtccaggtgccctcatgatgccatctgcccctgctatgggaacagtggcaggactaaatcgaggtatgcctggtgccaagccaggctttccaaggattagttcaccagtaatgttaaatgctgttccatctggaaatctgtttcccaacagtgggcaaggtgtgctcaacacagtaaatgtccatcctggagccatatctggtcctggcaattcaatcttgaggccacatgatcctatgcaaacatttcgtcctggtcagggtatggaagagcataggcagatgtcggagtttgacatgccggtttcacagggaagcggccaagccactatccagtttagcagcatgaattcatctttctcgagtccacctgttcagcaaccccaacggccacatcagatgtcacaatcgttacacatgtttgggaatccacaccattctcagatccagggaactagttcaagctcacaacagcaggcatatgctgtgcacttggctaaagaaagacaaatgcaacagcatatggcacctcaacagcatagtgatctttctggagcaagtgcagtacccaatgtgcagagtaatactcaaacattgcagcagggccaaacctcatctgccaattcagccccttgttcaaaatcacagcatcagcgacagcaagcggcacaaaatctgccggatagctcttcatctcccaaccaacctgccacttttacacaacagaagcagaagaaacaacaggaacaacagcagtctagacaaaatgagccacaaaggaaccgtggcagtcaacaagctaagcttatgaagagtttaggacgaggaaacatgatggcccagactcctccaattgactgcacaccaaccaatgctgcttctactccatcaaaaaaccatgtgtctgaaaaactggtgcaacatggccaaggacatttccctgccaatacaacaccagtaccgtcaatgcctcaacctaggctagtcacttcgttgcctcagtcaccaacgaaggtggcagacattggtaaccaaggtttaaaaaagggtggttctttgagtcaggccatgttagctttgcaacaacctccacatggttctaaatcgacattgaccactcagctgcagcagcggcaggtcaatccgccacagaacaacaatgggagagcagtggtgcaacagaaccgccaaatgaactctgactgtaggacagacttgcacgtcggtcaggtccgtcacaatcagatggttccaacatccatgccacagagtgcagattcgtgtagccctgtactgtcatctgtaaaccagcagaagcgtgagccatcgctcaatcagacttcagttacctcgccgtctaacctgcttaggtctcctaaagatacttcttttgggtagccaagacatgctacaaaggcaagttttcaggtggcttccctatacaggctcatggtgttggtgaccagtggaaccaacatggcagagagcaattgcagtctcagcatcagcagagacaaccggttgttcaaggcagtgcatatgctccttcaaattctgggcctggctgatcattaattatttcaggtttgtaggtttgagatagcgagctttctttccattgtaaagttactgtgcaggtacgtgatttgcattatttcaggttttaatgtgagctagattaggtaatttaattgttcgtgtttaatcttacctgaagtggggataggttgcagtctagtagaatgtagaaacactgcttccacttctttagcgggcactgcacttgtgtctgtcgcttctgcgtgggacgagcacgctgccatctcttacgcgagtccaagaggtggtctctgcacacctgatatgttccttttgtatcctcgtagatcatagtatatgtgtttgtacaagttaaaacaactcccgcccatgaatgaattggtactctatctatccgtttggttacctgcatcatgtagttctgag

SEQ ID NO: 215605 - DNA, 1316 bp, Zea Mays
cagatagtcggatgatgcttgcagcatgaaggccagaacagggctcaaggagcttaggatcctaaaaaatgtaaaagcattggaggaggctgatcggttgaagcaagaaactgataggttggctaaagaggttgaacaacttcagagtggcaggtttgcagatgtcgaagaattggtatatctgaaatggataaatgcctgcctacggtatgagctgagaaacaaggatgccccatcagggaagactgttgcacgagatcttagcaagaccctgagccccaagtctgaattgaaggccaaacagctgataatggaatatgccaatgtgggtgcggaggacagtcacttggggcatgtcgaattcggttcagagtgctcttcctcacgggcttcgtcaggtgaaccggatgatgtgtcaattgatattgcttccatgacaaagcatactaataaaaaccccaaaaagaagaagttcttctctaagcttcggaaactggtgctgggaaaagggaaagagaaccgtgaaatttctactctggagaggagagtgtctatttcaagttgttccttcgatgacttcactggaagggattcacatgatagctattcttcgttcatggcagaaccaaacatgcctgatagtcgacggcatggtgatcatggctttggtacacattcttctttggacagcgcaaaatctagtcctcttggcacagaaattgtaggtgaaagaagtgaccattctgtggtgaagagtgtatcttctagagaggaaaaggtaaatgcattcggtcccagcattggccttgatagtagcaaggccatacctgaggatgttgagatccataaatttgctgatgcgctgatcacatcaaggtcaggttccatgtcatcaagaagatcggcatccttccgacactgatataggagtcatctgctactgacccctctgcctggatgtatatttctgccagttcttgatggggggagttataggagatgttactggaatataagttgtcaatactttatttttttgtaccattgcgtatagggtgtagtttacttacctttaataccaactcctactacctgggctcgtcatgtgtaccataaaatggcacatttcaatggcaaacacaagacaattgtaacaccctaaatccatcaattaaggtaacctagattatattattaatttctcgtagaaaggaaaatatttatgtttacaaataataaaatggtgttatgaataaatcgatcaatctcttagaagataaaattttacaagtgtttgatgcactcatgccaaagca

SEQ ID NO: 215606 - DNA, 2385 bp, Zea Mays
aatttatccctccaagaacagattcttcgccactaccttgtggtctcgttagagtcccaaattatttgaatttggcacggctccgggctcctctcgtggcgcaaatggacgcctttttgtgaccgacgacaagcagcggcgttggtgggccgagcgccggggacgccaaggacttgccccaacttttcctcagagtgggcgcggccgtcacgctctccgtagccggtctgctcttctcgcggcgccagcggccgccccggcagctcctgccgccgccgccgcgtcctccctcggagtcggatgatgcttgcagcatgaaggccagaacagggctcaaggagcttaggatcctaaaaaatgaggataccaaggcaaaaattatcagtgggaactctgtgcacacgaccactaccactacgacaattaccaccaccgcattagtaccattggcccctaaatgcagaagccttgctgatgatgaaggctatctccttccggagttcaatgacatggttctcagagaatttggccaagatatagatagcattccatccacacctgcagcgagagtaagggaagatgtatcgaatgaccatgaagtccacaaacttagagatttggtgagatcactgcaagaaagggagaagactctggagctacagcttctggagtgttacggtttgcaggagcaagatgctgcggtgagggagcttgagaatcagctgaagattaacaacgttgaatcaaagttgtacttgctgaagattgaatctttacagactgaaaaccagaggctgcaaacacagctctcagagaactcaaaaatattctctgagcttgaggcgacaagaacaaaatgcaagtttctgaagaagaagtttatatcggatgcagaacaggcaaaggagcaaatcatttctcttcagaaaatggtcgactcattgcagaacaaacagactgatgaggagaaaaaatttattgagtttgaaaataaactgaagagactagaggagctggaaaaagaggcaacagagctaagagcggcaaattcaaggctgcagcaggagaatgcacatcttattaggcgactggaggttacacgcctaccccctgtacccaagcccaaaactagtatggaggtaaaagcattggaggaggctgatcggttgaagcaagaaactgataggttggctaaagaggttgaacaacttcagagtggcaggtttgcagatgtcgaagaattggtatatctgaaatggataaatgcctgcctacggtatgagctgagaaacaaggatgccccatcagggaagactgttgcacgagatcttagcaagaccctgagccccaagtctgaattgaaggccaaacagctgataatggaatatgccaatgtgggtgcggaggacagtcacttggggcatgtcgaattcggttcagagtgctcttcctcacgggcttcgtcaggtgaaccggatgatgtgtcaattgatattgcttccatgacaaagcatactaataaaaaccccaaaaagaagaagttcttctctaagcttcggaaactggtgctgggaaaagggaaagagaaccgtgaaatttctactctggagaggagagtgtctatttcaagttgttccttcgatgacttcactggaagggattcacatgatagctattcttcgttcatggcagaaccaaacatgcctgatagtcgacggcatggtgatcatggctttggtacacattcttctttggacagcgcaaaatctagtcctcttggcacagaaattgtaggtgaaagaagtgaccattctgtggtgaagagtgtatcttctagagaggaaaaggtaaatgcattcggtcccagcattggccttgatagtagcaaggccatacctgaggatgttgagatccataaatttgctgatgcgctgatcacatcaaggtcaggttccatgtcatcaagaagatcggcatccttccgacactgatataggagtcatctgctactgacccctctgcctggatgtatatttctgccagttcttgatggggggagttataggagatgttactggaatataagttgtcaatactttatttttttgtaccattgcgtatagggtgtagtttacttacctttaataccaactcctactacctgggctcgtcatgtgtaccataaaatggcacatttcaatggcaaacacaagacaattgtaacaccctaaatccatcaattaaggtaacctagattatattattaatttctcgtagaaaggaaaatatttatgtttacaaataataaaatggtgttatgaataaatcgatcaatctcttagaagataaaattttacaagtgtttgatgcactcatgccaaagca

SEQ ID NO: 215607 - DNA, 3816 bp, Zea Mays
ctcttgtacttctttaaattaatctttatagacccatcaggataacatattaaataaggtcgtacgttacgcatctaaaactcaattatgtctgttaggagcgggtctacccaagatttttatacaaataataaatgcatataattaaaaactcatgtatttgcaaaaaaataaaataaaaaagttttatcattcaagaatccagcagcagtggagcagtctaccatgtccatcttagttatctcggtctctcgaagttaacgacttaacatttagcttcgtgcggtcgcccgaagaagacaagcacgtgactccatgtcctagcaaagtagtaatagcagctgttgccatcggacttctggcagctgccacgcgtgtagccgcagtgcctggctacatctagatatatttcaaatgttagctcttatcactggtattgaataaaattattttgtatcaaacttatgcccatctaagattttatcttatttaatatatatagtatgtgtatactataaaactgttgctatataaatatgtaatatatcacactgcatactaataaatagctagactttataaggcattatatatgtatatatcattttttgtcacttaggtctcatttggtggccagaaaatcatgagtagaaatctacttaccattcaattaattttgaatacccatcctttaaatatggaccgccacttattcttttcccgtgttccgacaaaacacgcggcctcgctcatagcacagtgtgtggcagcggacggaatcgcctggaaccccccaacaccaacagtgaatcatcccagcggccatcagccttcttcacgttcgtctcctcctcgccatgaatcccaccgtccacttgcgtgcggaattaaacgcgaagtcgacgtttaacggcgatgtctcgctgccgtgccgtggagggagatgagcaggccacttcgctttgccgtggagggagatgagccgtttgtggaatcagcgagaaagtgacgggagagggcaatgcagagaggccaggccaagaaccccgaataaaggaaggtgcgacaggtggctggcactgtggcgcaagcggatgttgcgtcgtctctccgttgctctcgctcaaggaggccgcgggggcgggccaactagttttcggattccagcgtcgtttggagttgtcctgtcgtgtcttccggtaaacaacaagctagcgagctgaaaagctcaattcggagcacgtcggcctaattttagctcacccggagatcacccccggaacaaatttcttgaggggcagaatcggttgcttgctaggctgggttctcccgcccagtctgttcggttccacgccatggcggtatagccggccacttgcaggtaccggagctcgcgttccctgacgcgctttctggttttctgcaaaaaatttatccctccaagaacagattcttcgccactaccttgtggtctcgttagagtcccaaattatttgaatttggcacggctccgggctcctctcgtggcgcaaatggacgcctttttgtgaccgacgacaagcagcagcggcgttggtgggccgagcgccggggacgccaaggacttgccccaacttttcctcagagtgggcgcggccgtcacgctctccgtagccggtctgctcttctcgcggcgccagcggccgccccggcagctcctgccgccgccgccgcgtcctccctcggagtcggatgatgcttgcagcatgaaggccagaacagggctcaaggagcttaggatcctaaaaaatgaggataccaaggcaaaaattatcagtgggaactctgtgcacacgaccactaccactacgacaattaccaccaccgcattagtaccattggcccctaaatgcagaagccttgctgatgatgaaggctatctccttccggagttcaatgacatggttctcagagaatttggccaagatatagatagcattccatccacacctgcagcgagagtaagggaagatgtatcgaatgaccatgaagtccacaaacttagagatttggtgagatcactgcaagaaagggagaagactctggagctacagcttctggagtgttacggtttgcaggagcaagatgctgcggtgagggagcttgagaatcagctgaagattaacaacgttgaatcaaagttgtacttgctgaagattgaatctttacagactgaaaaccagaggctgcaaacacagctctcagagaactcaaaaatattctctgagcttgaggcgacaagaacaaaatgcaagtttctgaagaagaagtttatatcggatgcagaacaggcaaaggagcaaatcatttctcttcagaaaatggtcgactcattgcagaacaaacagactgatgaggagaaaaaatttattgagtttgaaaataaactgaagagactagaggagctggaaaaagaggcaacagagctaagagcggcaaattcaaggctgcagcaggagaatgcacatcttattaggcgactggaggttacacgcctaccccctgtacccaagcccaaaactagtatggaggtaaaagcattggaggaggctgatcggttgaagcaagaaactgataggttggctaaagaggttgaacaacttcagagtggcaggtttgcagatgtcgaagaattggtatatctgaaatggataaatgcctgcctacggtatgagctgagaaacaaggatgccccatcagggaagactgttgcacgagatcttagcaagaccctgagccccaagtctgaattgaaggccaaacagctgataatggaatatgccaatgtgggtgcggaggacagtcacttggggcatgtcgaattcggttcagagtgctcttcctcacgggcttcgtcaggtgaaccggatgatgtgtcaattgatattgcttccatgacaaagcatactaataaaaaccccaaaaagaagaagttcttctctaagcttcggaaactggtgctgggaaaagggaaagagaaccgtgaaatttctactctggagaggagagtgtctatttcaagttgttccttcgatgacttcactggaagggattcacatgatagctattcttcgttcatggcagaaccaaacatgcctgatagtcgacggcatggtgatcatggctttggtacacattcttctttggacagcgcaaaatctagtcctcttggcacagaaattgtaggtgaaagaagtgaccattctgtggtgaagagtgtatcttctagagaggaaaaggtaaatgcattcggtcccagcattggccttgatagtagcaaggccatacctgaggatgttgagatccataaatttgctgatgcgctgatcacatcaaggtcaggttccatgtcatcaagaagatcggcatccttccgacactgatataggagtcatctgctactgacccctctgcctggatgtatatttctgccagttcttgatggggggagttataggagatgttactggaatataagttgtcaatactttatttttttgtaccattgcgtatagggtgtagtttacttacctttaataccaactcctactacctgggctcgtcatgtgtaccataaaatggcacatttcaatggcaaacacaagacaattgtaacaccctaaatccatcaattaaggtaacctagattatattattaatttctcgtagaaaggaaaatatttatgtttacaaataataaaatggtgttatgaataaatcgatcaatctcttagaagataaaattttacaagtgtttgatgcactcatgccaaagca

SEQ ID NO: 215608 - DNA, 4968 bp, Zea Mays
aaaggcccacctattatctcaaatcttaaagcaaaactgccggctgccgctgccatccccaattcgttaaccgaagagtggaaaacaaacaagccccagcggagcggaggtcgaaccatcaccaaacccgagccccgaccgcccacctcgccgtcgccgccgcaggcgatcagccgccgccgcactaatccctgccttgtccttatcataaaaccgcggcgctggagctctgatgcttcccaccccatggtcttccacatttccctcgcccgccactggcttcctccttctccttgccctcctccccgtcgcatcggggacctcagtccctaccctaggaggtttcgatcgtggagaggcggccggcgcggacgcatattcgatccttacgtttcacgactacacgccgcctccgccccccgttctgccgccgccaccggcggccccggcggcgacctgcgcgggggacctccacggcgtgggagaccttgacacccagtgcgtggtccatgagtcggtgaggctgggtggtggggtgttcatcagtggcaacggcagcctcctaatccttgatggcgtcgcggttacctgcgagcggcctgggtgcgtcgtctctgccaacctctccggcgatctcctcctcgggaacaggtcccgcgtcgtggccgggtgggtttccctcgcggcggccaacatcacactcggcgaggacgctgttattgacaccaccgcgcttggcggtgacccgccggaccagaccagtggtgtacccactgggacgtatggggatggcggtggacatggcggccgtggcgccagctgcttcgttaagaaggggcaagcacaagaggactcatggggtggtgattcctacgcttggtctgcactgaagaccccaaataactatggaagcaaagggggatccactaccgtcgagaaggactatggtggtgggggtggcggtgtcgtgtggttgttcgctgaagagattgtgatgaatggaacagttcttgctgatggtggagacggtggcaccaagggtgggggtggctctggggggagcatctatctgaaggcttcaacaatgcaaggaggtggcaaaataagtgcttgtggaggcaatggtttagctggtggaggtggaggacgtgtttccatcgatgttttcagtaggcatgacgacacacaaatttttgtccatggggggaagagttcaggatgcttggacaatgcgggagcagctggaacactttatgaagcagtacctaagagtattactgttagcaacaataacttgagcacacaaacggatacagtttttctagaccccccatatgagccactctggacaaatgtttttgtcagaaattgtgccaaagtttctcttcccttacggtggagccgtattcaggctcaaggacagattcttttatctggtgctactctaacttttggcctgacacattatccatattcagaatttgagctgttggctgaggaacttcttatgagtgattccacaatcaaggtctttggcgctttacgaatgtcggtaaagatgctccttatgtggaactcaagaatgactattgatggtggccgagaactaggtgtgggaacttcattactagaaggtagcaatttgatagtgctgaaggaagcatctgtcatacattcaaatgctaatctagggattcatggtcaaggagttctaaatttatctggtcaaggagatacaatagaggcacaacgccttattttatcactgttttacaacattttggttggacctggagctgttctaaggggcccacttataaatggaagtcgtgatgagatggccccaaaactgaattgcgaagatgagagttgccctatggaaatctttcatccacctgaggattgcaacttgaactcttcattgccttttactttacagatatgccgtgttgaagatattgatgtttctggccttgttcaaggaactgtagttaattttaacagagcaagaagtgtcactgttcagacatctgggaccataagtgcaacaggattaggctgccgaggtggcattggaagaggaaaaatgttaagcagtgggtttagtggtgggggtgggcatggtggtaaaggcggtgatggcatttataatggtggtcatgtagagggtggatctgcgtatggtcatgctgatttaccatgtgaacttggcagtggcagcggtaatgtcagtggatcttcaactgctggtggtggtataatagtgatgggttctttggaacaatctctgccgaacctctccctttctggctcgattgaggcaaatggtggtaattttactggtttgatgtctcatgccacaattggaggacctggtggcggttctggtggtacaattcttctttttgtgcggacattactcttgaagaaggactctgtactttctagtgttgggggagttggtggcaatggcagtggtggaggtggagggggtcggattcacttccactggtttgatattcccactggagatgattatattccttttgcaaccattaaaggaacaatacttgcaagaggaggagtcagtgaagggcaaggtttctctggtgagaatggaaccatcacaggaaaggattgcccaaaaggtctttatggaacattttgcaaggaatgtccctcaggaacatacaagaatattactggatcatctaagtccatgtgctcaccatgccctccaaatgagctacctcgccgtgctgtatacataagcgtccgaggaggtgttgctgaacccccatgcccatacaaatgcgtgtctgatagatatagcatgcctcactgttttactgcccttgaagagctgatatacacgtttggtggaccttggttgtttggtctgcttctgtctggccttcttgttttattagctcttgttttgagtattgctcggatgaagtttgttggtactgatgagttgcctggaccagcaccaactcaacagagctcccaaattgatcactcttttcccttccttgaatcactgaatgaggtattggaaacaaacagggcagaagaatctcactgtcatgtgcacaggatgtatttcatgggcccaaacaccttcagtgaaccttggcatctcccacacaccccgccagagcagatttcagagattgtgtacgaagatgcatttaacaaatttgttgatgagatcaatgctcttgcagcctatcagtggtgggaaggttcagtttttagcatcctatgtatactttcatttcccctggcatggtcgtggcaacagtggcgcaggagaaagaaattacaaaaactacgtgaatttgttcgttctgaatatgatcattcatgtttacggtcctgccgttcgcgtgcactttacgaggggctaaaggtttccaatgtccctgatctttggaggtgatggaagctatatggctccattttcacttcatagcgacagagtggtcacaactcttataagtcaggctgtgccatcatctatatggcatcgtcttgtagctggattgaatgcccagttgcgtttggttcgccgtggaaatctaaacacatcacttctccctgtgctcaaatggctagaaagtcatgcaaatcctgaattgaacacgtaccgtgtgcgtgttgaccttgcatggtttcaaactacagcattaggttaccttcagtttggtcttgtccttcatgctgtcgggggagtggtggctgctgaactccaggatggctgtacaagtaaaaccgatcagcattcagtaaaccagaatacatgcactgactctcaaatgggccactcaaggaccaatgatgttctgcgtaaaaggataactggcaccattctcaatgttgacaacttaaggatgcttggtggcaggagaggtttcttttaccttctctctcttatcttgcacaatacaaaaccagttggacatcaggaccttgtcggcttagtcatctcaatactgcttcttgcagatttcagcttagtcttgcttactttcctccaactatattcatattctatggtcgatgttctgttagtcttgttcattcttcctcttgggatactagcaccatttccagctgggataaatgctctttttagtcatgaacagcggcggtcagctggtcttgctcgtgtctatgccttgtggaatattacatcactggttaatgttgttgtggcttttgtatgtggatttctgcattacaagtcatcaagcaaaaaacatccaagcatgcagccgtggagttttggtggggaggaaaccagctggtcgctattccctataggacttgttctatgcaagtgcattcaagcaaggcttgttgattggcatgtatctatcttggagatccaggatcgtgcagtttatagcaatgacccaacaatattttggcagtgaaagcatttcgatttacaggagttctcatgaggagagcttaatgcaactcaagtttttgtgggagttgataaaaggaaggctatggagttagtctgttctttgtccgcccagtcaggggaagcatgtacaaagtagatgctggtaattgcctgcctatatagacttaatgacttacagtgcatggtcaaccttttgtccagtcactcacccagctttgttttccttgtacataggaaacgggtttaattagttgaccgattcgttgtaggatttaggatttagacaccatagaattatagattacccaaggtaatctcaaagagatggtggaaaacatatatacttcttttgtttaaagctttgtcttttgcattgatgttgagctgggaaacgggtgaggcatcaaatagagcttttttcccctctgttaagattaagacaaatgttaacgtgctgatgttttattcaagatctggttgccatatgttcccgtgatgatccctgcttctctattgttatagttctt

SEQ ID NO: 215609 - DNA, 5163 bp, Zea Mays
aaaggcccacctattatctcaaatcttaaagcaaaactgccggctgccgctgccatccccaattcgttaaccgaagagtggaaaacaaacaagccccagcggagcggaggtcgaaccatcaccaaacccgagccccgaccgcccacctcgccgtcgccgccgcaggcgatcagccgccgccgcactaatccctgccttgtccttatcataaaaccgcggcgctggagctctgatgcttcccaccccatggtcttccacatttccctcgcccgccactggcttcctccttctccttgccctcctccccgtcgcatcggggacctcagtccctaccctaggaggtttcgatcgtggagaggcggccggcgcggacgcatattcgatccttacgtttcacgactacacgccgcctccgccccccgttctgccgccgccaccggcggccccggcggcgacctgcgcgggggacctccacggcgtgggagaccttgacacccagtgcgtggtccatgagtcggtgaggctgggtggtggggtgttcatcagtggcaacggcagcctcctaatccttgatggcgtcgcggttacctgcgagcggcctgggtgcgtcgtctctgccaacctctccggcgatctcctcctcgggaacaggtcccgcgtcgtggccgggtgggtttccctcgcggcggccaacatcacactcggcgaggacgctgttattgacaccaccgcgcttggcggtgacccgccggaccagaccagtggtgtacccactgggacgtatggggatggcggtggacatggcggccgtggcgccagctgcttcgttaagaaggggcaagcacaagaggactcatggggtggtgattcctacgcttggtctgcactgaagaccccaaataactatggaagcaaagggggatccactaccgtcgagaaggactatggtggtgggggtggcggtgtcgtgtggttgttcgctgaagagattgtgatgaatggaacagttcttgctgatggtggagacggtggcaccaagggtgggggtggctctggggggagcatctatctgaaggcttcaacaatgcaaggaggtggcaaaataagtgcttgtggaggcaatggtttagctggtggaggtggaggacgtgtttccatcgatgttttcagtaggcatgacgacacacaaatttttgtccatggggggaagagttcaggatgcttggacaatgcgggagcagctggaacactttatgaagcagtacctaagagtattactgttagcaacaataacttgagcacacaaacggatacagtttttctagaccccccatatgagccactctggacaaatgtttttgtcagaaattgtgccaaagtttctcttcccttacggtggagccgtattcaggctcaaggacagattcttttatctggtgctactctaacttttggcctgacacattatccatattcagaatttgagctgttggctgaggaacttcttatgagtgattccacaatcaaggtctttggcgctttacgaatgtcggtaaagatgctccttatgtggaactcaagaatgactattgatggtggccgagaactaggtgtgggaacttcattactagaaggtagcaatttgatagtgctgaaggaagcatctgtcatacattcaaatgctaatctagggattcatggtcaaggagttctaaatttatctggtcaaggagatacaatagaggcacaacgccttattttatcactgttttacaacattttggttggacctggagctgttctaaggggcccacttataaatggaagtcgtgatgagatggccccaaaactgaattgcgaagatgagagttgccctatggaaatctttcatccacctgaggattgcaacttgaactcttcattgccttttactttacagatatgccgtgttgaagatattgatgtttctggccttgttcaaggaactgtagttaattttaacagagcaagaagtgtcactgttcagacatctgggaccataagtgcaacaggattaggctgccgaggtggcattggaagaggaaaaatgttaagcagtgggtttagtggtgggggtgggcatggtggtaaaggcggtgatggcatttataatggtggtcatgtagagggtggatctgcgtatggtcatgctgatttaccatgtgaacttggcagtggcagcggtaatgtcagtggatcttcaactgctggtggtggtataatagtgatgggttctttggaacaatctctgccgaacctctccctttctggctcgattgaggcaaatggtggtaattttactggtttgatgtctcatgccacaattggaggacctggtggcggttctggtggtacaattcttctttttgtgcggacattactcttgaagaaggactctgtactttctagtgttgggggagttggtggcaatggcagtggtggaggtggagggggtcggattcacttccactggtttgatattcccactggagatgattatattccttttgcaaccattaaaggaacaatacttgcaagaggaggagtcagtgaagggcaaggtttctctggtgagaatggaaccatcacaggaaaggattgcccaaaaggtctttatggaacattttgcaaggaatgtccctcaggaacatacaagaatattactggatcatctaagtccatgtgctcaccatgccctccaaatgagctacctcgccgtgctgtatacataagcgtccgaggaggtgttgctgaacccccatgcccatacaaatgcgtgtctgatagatatagcatgcctcactgttttactgcccttgaagagctgatatacacgtttggtggaccttggttgtttggtctgcttctgtctggccttcttgttttattagctcttgttttgagtattgctcggatgaagtttgttggtactgatgagttgcctggaccagcaccaactcaacagagctcccaaattgatcactcttttcccttccttgaatcactgaatgaggtattggaaacaaacagggcagaagaatctcactgtcatgtgcacaggatgtatttcatgggcccaaacaccttcagtgaaccttggcatctcccacacaccccgccagagcagatttcagagattgtgtacgaagatgcatttaacaaatttgttgatgagatcaatgctcttgcagcctatcagtggtgggaaggttcagtttttagcatcctatgtatactttcatttcccctggcatggtcgtggcaacagtggcgcaggagaaagaaattacaaaaactacgtgaatttgttcgttctgaatatgatcattcatgtttacggtcctgccgttcgcgtgcactttacgaggggctaaaggtagctgctactccagatttaatgctgggttatttagatttcttccttggtggggatgagaaaaggactgatcttcctcctcggcttcatcaaaggtttccaatgtccctgatctttggaggtgatggaagctatatggctccattttcacttcatagcgacagagtggtcacaactcttataagtcaggctgtgccatcatctatatggcatcgtcttgtagctggattgaatgcccagttgcgtttggttcgccgtggaaatctaaacacatcacttctccctgtgctcaaatggctagaaagtcatgcaaatcctgaattgaacacgtaccgtgtgcgtgttgaccttgcatggtttcaaactacagcattaggttaccttcagtttggtcttgtccttcatgctgtcgggggagtggtggctgctgaactccaggatggctgtacaagtaaaaccgatcagcattcagtaaaccagaatacatgcactgactctcaaatgggccactcaaggaccaatgatgttctgcgtaaaaggataactggcaccattctcaatgttgacaacttaaggatgcttggtggcaggagaggtttcttttaccttctctctcttatcttgcacaatacaaaaccagttggacatcaggtgactttaccattttcacagctatagtaacatagctgcagtgtgcacataacaggattttctgcgttttgaagtcaccatggttcttttgctttcaactgcaggaccttgtcggcttagtcatctcaatactgcttcttgcagatttcagcttagtcttgcttactttcctccaactatattcatattctatggtcgatgttctgttagtcttgttcattcttcctcttgggatactagcaccatttccagctgggataaatgctctttttagtcatgaacagcggcggtcagctggtcttgctcgtgtctatgccttgtggaatattacatcactggttaatgttgttgtggcttttgtatgtggatttctgcattacaagtcatcaagcaaaaaacatccaagcatgcagccgtggagttttgggaggaaaccagctggtcgctattccctataggacttgttctatgcaagtgcattcaagcaaggcttgttgattggcatgtatctatcttggagatccaggatcgtgcagtttatagcaatgacccaacaatattttggcagtgaaagcatttcgatttacaggagttctcatgaggagagcttaatgcaactcaagtttttgtgggagttgataaaaggaaggctatggagttagtctgttctttgtccgcccagtcaggggaagcatgtacaaagtagatgctggtaattgcctgcctatatagacttaatgacttacagtgcatggtcaaccttttgtccagtcactcacccagctttgttttccttgtacataggaaacgggtttaattagttgaccgattcgttgtaggatttaggatttagacaccatagaattatagattacccaaggtaatctcaaagagatggtggaaaacatatatacttcttttgtttaaagctttgtcttttgcattgatgttgagctgggaaacgggtgaggcatcaaatagagcttttttcccctctgttaagattaagacaaatgttaacgtgctgatgttttattcaagatctggttgccatatgttcccgtgatgatccctgcttctctattgttatagttctt

SEQ ID NO: 215610 - DNA, 5245 bp, Zea Mays
cagagtggcagagtccagagaccagacccgcgagctcaccgctcagactttaccgccaagccttttgttcaccgttactccgttcaccccgcgaggcgtgactcgtgagctctccgtgtcttggcgatgactgggcgaccgacgatgcagccgtaggccaggggccccaggtcttcctctggtccttctccggcgaagagcaccggtcaggtcctgacacatctattttgactggataacaacgaaggtttctctgatattctgatgttgtagcagttactgtggacgatgttcgtttgtgtttatcattttcttggtcttgttcggggcaacaacgacattgggaataagtgtacggcagacaaacagtaacatgggaaggaaaggctcagaaatgtcaccaagtaaaaggtatcccttgaggtctccacatagtagtggtagagttcttcgctctgccttagccaatgataataaggacagtgagcctctgaatgctgctgctgctacccaagccgctgtgaaaaaaagaagtggcagtcagttggatagtcctaatagcagtgtcaggttgtttcactctacatcaaaaaataagaacgaggcatgtagcgggcctctaaatgacaggatccctgataagccagctgcaaataaaagaaaacgtgccagtccttcacaggtgggaagttccagcaacagtgtcagggtgcttcgctctgcaataaaaaataaagatgaggcatgcagtaaatctctaagtgacaggaccgctggtgagccagctgcaaataaaagaaaaaacgtcaatcgctcaaagacggggagtctgagctgtggtgtcagggtgcttctatctgcttcaaaagctaaggatgagacatctaccaagcctttaaatgatagtgctgctgttgaaccagcttcaggtaaaaggaaaggcaccagtccgtcaaaggtgggaagtgccagcaatagtgtcagggtgcttcgatctacttcaaaatataagaatgagacatgtactgagcctttaaatgatagtggtgctgttgaaccagctgcaaataaaaggaaaggtgtcagtcgttcaaagaagagaagtctcaatagcagtgtcagggtgcttcgctctgcctcaaataataagattgaggtatctattaagcctctaggtaatagtactgctggccaaccagctgcgaaaagaagaaaaagcggcagttccttcgaggcaggaagccctgtgagcagtgccagggtgcttcgctctacctcagaaaggaagaatgaggcatctaagcctttaaatgaaagtactgctgctcaaccagctgcgaggaaaaaaaaagctggggtaatttcaaagaccgacaatccaaagattggtctcagggttcttcgctctgcctcaggaaagaagaatgaagcatgtattgggcatgtaaatgatagtacttctgctgaaccaactgtgacaaaaagaaaccgcaagccttcaatggatcgcagtcccaagaaggactacttaaaaatttgtcaaagagttagatatattttgaatcgaatgaactatcaacaaacctttattcaagcttatgcaagtgaaggttggaaaggccaaagtttggaaaaaataagacctgaaaaggagcttgaacgagccaaggcagaaatcctccaatgcaagttaagaatccgtgaagcttttcgaaatatggactctcttttatccaaggggaagcttgaagaatctttgtttgattccgcaggagaaatttcaagcgaagatatattttgtgctgtatgtggctcaaaggatgttactttacaaaatgacatcattctttgtgatggagcctgtgacagaggattccaccagaactgtttgaaccctcctttgctaactgaagatatacctccgggggatcaaagatggctttgccctgcatgtgtctgcaaagcagactctatagatgcactaaatgaacttcaaggaagcaagctctccattcatgactcatgggagaaagttttccctgaggcagcttcaattgccaacggttctaaacaagttgatacttctgatctgctgccagatcatataaagcacagtgacaaccctgcattggttgaagggctgatggtgaatgaagtcaggctttctgcagaggatgacagcaaagcggatgaccttggcttgccttcggaggactcaggggatggtgacttcgatccgtcaggtccagattctagtgaagaccaaaaagatggattgaactcagaagagtcagatttcacatctgactctgatgatttttgtgctgagattgccaaatcttgtggccaggatgaagtctcggcatctccattatcaaatgtgataaaccatacttatagaatgaaactcagggccagcaacaaccgctctaatgaagaaaaccatgatcatgtatttatggacatggagctagggcaagacatggtgctaccagtttcaagcaggcggcaggtggaacggttggattacaaaaaactatatgatgaggcatatgggaaagaatcatctaattcaagtgatgacaaagagtggtctggaaaagaactattagaaggcagtgaaacagattcacttagtgagcgacctcatcctgtaaaacggtgctctagaagagcacaagcagagcagcagaataatgaacatacaccacagagggagcgccttcatggttctgaaagtgagcagaaaactggaattcttcgatccaatggcagcagtagcacaggacggaagtttggtcctgtagctacccagaaattgaaggtacattttgagaaagatccatatcctagccgtgaaacgaaagagaatatatcagaagaactaggcttgacatttaatcaggtctccagatggttctctagcactcgtcactattcaagggttgcttctgccagaaaagaaatgcatcctgacggccatactagcgagaataatgataccacgactgtagatagcatgcaagcaaggcaacccaacactgtggtgatggaaaagttgactgggaatagaaatgacattgtttctgagaaaccgatggtgcagaacaatcttaaccaaggggtggcagaaaagttgactagggatagaaatgacattgttcctgagaaacaggtggtgcagagcaatcttaaccaatgtaataatgaagatatcccgctttctggaacagaaattgagatggagtcttacgaacaagaatcatctgaaagcagtgatgaagagtggtccacacttagcacaccacgaaaaacaaaattacaaggcaacgaaaaagtatcacttactgaatcactacgttctgcaaaacggtgttctagaagagcaccagctagggagcagaataatgaacatactcagagtgagcagcttcatggttctgcaagtgagcagcaagctagagagcaacttcatggttctgtaagtaaacagcaaactgaagttcttcgctccaatgtcagcagtggcgatgcctcaaaatgtcattttggccctatagttactcagaagctgaaggaacattttgaaaaagatccatatccttgccgtgcaacaaaagagggtctggcacaagagctaggactgacatttaatcagatcagtaagtggttctctgccacccatcattattcaagagatgctgttgccaagaaccaaaaatacccaggagaaaatactactgagaataatagtagcacaatctttgatggtatacaagtaatagaacccaattttggtttgatagataaaccagatgcagatacaaatgacatgatttctgaaaagttgatggtacaaattaatcttaacgaaggcattgaagaggatatcccaccgagccaatatactaccaggtgtgaagagaaattaactatgactcaagctgccatctcaagggaagctggacctccaggttatggtcctggagaaaactttcttcaggtcagttcaaggattactagctgtgagcagagtgtgataatggctcctagcgctatcgcaagaggagttggtccaccaggatatacgcctggagaacaccagggcaatggggctccatggaatacaagctatgagcgaagaccgtttacgagtcctacgactagctcaagagaagtcggacctccaggatatgggcctgaagaaaaccaaggcagtggcatttcctgtaatacaagcagagagcaaatattgtttatgagccctacaaccatctcgagagaacttggtccaccaggatatttgcccagagaaaaccagcgcagtgacacttcatggaatacaagctgtgagtcgggactatttatgagtcctgcgaccacctcaatagaacatggtccaccaggatatgggcctggagaaaaccaggagaatgacagtacaagctgcgagttgagaatgtttacaagtcctacaatcgtctccagagaagttggcccaccaggataccagcagggagtgtttatgagtcctaaaaccatctcaagagaagtctgtcctccaggatttgggtctggagagaaccagggcaacgacactacatggtacaaacagagcgcgtttacaagtcctacaaccatctcgagagaagtcggtccgccagggtatggacaggaagatcagggcaatggtggttcttggaacacgagttgtgagcagggagtgtttacgagtcctactagaggcatctcaagagaagtcggtccgccaggatacgggcccggggaaagtcagggcaataccacttcgtggatttcgacctgccagcagagaatgcttgcaggaatccagagaactggtggctcaaggagtatggacttggaagcctttccaccgggatacggacctggtggtgcttcagggagtgtcataagcccccaagctcggtctgcagagaatgtagaattttcggacgaggctagaaaaaaggctatacagcgggagctgagacggcggcagaagttcaggtgaaggcaatatatccagtcttcaagacaagacaatatatccagtcttgatggctgaatgagtgggcgaccttagttgccatcaagcaaaacccttgttgtatcagctgcttatcttccttttacagacttgcttggtttgtcaaggatttcttatgtgaaccctcttgaacctgaagtattcaatgcgctgtgaatttgtgcagttgcctttctt

SEQ ID NO: 215611 - DNA, 5196 bp, Zea Mays
agagaccagacccgcgagctcaccgctcagactttaccgccaagccttttgttcaccgttactccgttcaccccgcgaggcgtgactcgtgagctctccgtgtcttggcgatgactgggcgaccgacgatgcagccgtaggccaggggccccaggtcttcctctggtccttctccggcgaagagcaccggtcaggtcctgacacatctattttgactggataacaacgaaggtttctctgatattctgatgttgtagcagttactgtggacgatgttcgtttgtgtttatcattttcttggtcttgttcggggcaacaacgacattgggaataagtgtacggcagacaaacagtaacatgggaaggaaaggctcagaaatgtcaccaagtaaaaggtatcccttgaggtctccacatagtagtggtagagttcttcgctctgccttagccaatgataataaggacagtgagcctctgaatgctgctgctgctacccaagccgctgtgaaaaaaagaagtggcagtcagttggatagtcctaatagcagtgtcaggttgtttcactctacatcaaaaaataagaacgaggcatgtagcgggcctctaaatgacaggatccctgataagccagctgcaaataaaagaaaacgtgccagtccttcacaggtgggaagttccagcaacagtgtcagggtgcttcgctctgcaataaaaaataaagatgaggcatgcagtaaatctctaagtgacaggaccgctggtgagccagctgcaaataaaagaaaaaacgtcaatcgctcaaagacggggagtctgagctgtggtgtcagggtgcttctatctgcttcaaaagctaaggatgagacatctaccaagcctttaaatgatagtgctgctgttgaaccagcttcaggtaaaaggaaaggcaccagtccgtcaaaggtgggaagtgccagcaatagtgtcagggtgcttcgatctacttcaaaatataagaatgagacatgtactgagcctttaaatgatagtggtgctgttgaaccagctgcaaataaaaggaaaggtgtcagtcgttcaaagaagagaagtctcaatagcagtgtcagggtgcttcgctctgcctcaaataataagattgaggtatctattaagcctctaggtaatagtactgctggccaaccagctgcgaaaagaagaaaaagcggcagttccttcgaggcaggaagccctgtgagcagtgccagggtgcttcgctctacctcagaaaggaagaatgaggcatctaagcctttaaatgaaagtactgctgctcaaccagctgcgaggaaaaaaaaagctggggtaatttcaaagaccgacaatccaaagattggtctcagggttcttcgctctgcctcaggaaagaagaatgaagcatgtattgggcatgtaaatgatagtacttctgctgaaccaactgtgacaaaaagaaaccgcaagccttcaatggatcgcagtcccaagaaggactacttaaaaatttgtcaaagagttagatatattttgaatcgaatgaactatcaacaaacctttattcaagcttatgcaagtgaaggttggaaaggccaaagtttggaaaaaataagacctgaaaaggagcttgaacgagccaaggcagaaatcctccaatgcaagttaagaatccgtgaagcttttcgaaatatggactctcttttatccaaggggaagcttgaagaatctttgtttgattccgcaggagaaatttcaagcgaagatatattttgtgctgtatgtggctcaaaggatgttactttacaaaatgacatcattctttgtgatggagcctgtgacagaggattccaccagaactgtttgaaccctcctttgctaactgaagatatacctccgggggatcaaagatggctttgccctgcatgtgtctgcaaagcagactctatagatgcactaaatgaacttcaaggaagcaagctctccattcatgactcatgggagaaagttttccctgaggcagcttcaattgccaacggttctaaacaagttgatacttctgatctgctgccagatcatataaagcacagtgacaaccctgcattggttgaagggctgatggtgaatgaagtcaggctttctgcagaggatgacagcaaaggggatggtgacttcgatccgtcaggtccagattctagtgaagaccaaaaagatggattgaactcagaagagtcagatttcacatctgactctgatgatttttgtgctgagattgccaaatcttgtggccaggatgaagtctcggcatctccattatcaaatgtgataaaccatacttatagaatgaaactcagggccagcaacaaccgctctaatgaagaaaaccatgatcatgtatttatggacatggagctagggcaagacatggtgctaccagtttcaagcaggcggcaggtggaacggttggattacaaaaaactatatgatgaggcatatgggaaagaatcatctaattcaagtgatgacaaagagtggtctggaaaagaactattagaaggcagtgaaacagattcacttagtgagcgacctcatcctgtaaaacggtgctctagaagagcacaagcagagcagcagaataatgaacatacaccacagagggagcgccttcatggttctgaaagtgagcagaaaactggaattcttcgatccaatggcagcagtagcacaggacggaagtttggtcctgtagctacccagaaattgaaggtacattttgagaaagatccatatcctagccgtgaaacgaaagagaatatatcagaagaactaggcttgacatttaatcaggtctccagatggttctctagcactcgtcactattcaagggttgcttctgccagaaaagaaatgcatcctgacggccatactagcgagaataatgataccacgactgtagatagcatgcaagcaaggcaacccaacactgtggtgatggaaaagttgactgggaatagaaatgacattgtttctgagaaaccgatggtgcagaacaatcttaaccaaggggtggcagaaaagttgactagggatagaaatgacattgttcctgagaaacaggtggtgcagagcaatcttaaccaatgtaataatgaagatatcccgctttctggaacagaaattgagatggagtcttacgaacaagaatcatctgaaagcagtgatgaagagtggtccacacttagcacaccacgaaaaacaaaattacaaggcaacgaaaaagtatcacttactgaatcactacgttctgcaaaacggtgttctagaagagcaccagctagggagcagaataatgaacatactcagagtgagcagcttcatggttctgcaagtgagcagcaagctagagagcaacttcatggttctgtaagtaaacagcaaactgaagttcttcgctccaatgtcagcagtggcgatgcctcaaaatgtcattttggccctatagttactcagaagctgaaggaacattttgaaaaagatccatatccttgccgtgcaacaaaagagggtctggcacaagagctaggactgacatttaatcagatcagtaagtggttctctgccacccatcattattcaagagatgctgttgccaagaaccaaaaatacccaggagaaaatactactgagaataatagtagcacaatctttgatggtatacaagtaatagaacccaattttggtttgatagataaaccagatgcagatacaaatgacatgatttctgaaaagttgatggtacaaattaatcttaacgaaggcattgaagaggatatcccaccgagccaatatactaccaggtgtgaagagaaattaactatgactcaagctgccatctcaagggaagctggacctccaggttatggtcctggagaaaactttcttcaggtcagttcaaggattactagctgtgagcagagtgtgataatggctcctagcgctatcgcaagaggagttggtccaccaggatatacgcctggagaacaccagggcaatggggctccatggaatacaagctatgagcgaagaccgtttacgagtcctacgactagctcaagagaagtcggacctccaggatatgggcctgaagaaaaccaaggcagtggcatttcctgtaatacaagcagagagcaaatattgtttatgagccctacaaccatctcgagagaacttggtccaccaggatatttgcccagagaaaaccagcgcagtgacacttcatggaatacaagctgtgagtcgggactatttatgagtcctgcgaccacctcaatagaacatggtccaccaggatatgggcctggagaaaaccaggagaatgacagtacaagctgcgagttgagaatgtttacaagtcctacaatcgtctccagagaagttggcccaccaggataccagcagggagtgtttatgagtcctaaaaccatctcaagagaagtctgtcctccaggatttgggtctggagagaaccagggcaacgacactacatggtacaaacagagcgcgtttacaagtcctacaaccatctcgagagaagtcggtccgccagggtatggacaggaagatcagggcaatggtggttcttggaacacgagttgtgagcagggagtgtttacgagtcctactagaggcatctcaagagaagtcggtccgccaggatacgggcccggggaaagtcagggcaataccacttcgtggatttcgacctgccagcagagaatgcttgcaggaatccagagaactggtggctcaaggagtatggacttggaagcctttccaccgggatacggacctggtggtgcttcagggagtgtcataagcccccaagctcggtctgcagagaatgtagaattttcggacgaggctagaaaaaaggctatacagcgggagctgagacggcggcagaagttcaggtgaaggcaatatatccagtcttcaagacaagacaatatatccagtcttgatggctgaatgagtgggcgaccttagttgccatcaagcaaaacccttgttgtatcagctgcttatcttccttttacagacttgcttggtttgtcaaggatttcttatgtgaaccctcttgaacctgaagtattcaatgcgctgtgaatttgtgcagttgcctttctt

SEQ ID NO: 215612 - DNA, 5135 bp, Zea Mays
agactttaccgccaagccttttgttcaccgttactccgttcaccccgcgaggcgtgactcgtgagctctccgtgtcttggcgatgactgggcgaccgacgatgcagccgtaggccaggggccccaggtcttcctctggtccttctccggcgaagagcaccggtcagttactgtggacgatgttcgtttgtgtttatcattttcttggtcttgttcggggcaacaacgacattgggaataagtgtacggcagacaaacagtaacatgggaaggaaaggctcagaaatgtcaccaagtaaaaggtatcccttgaggtctccacatagtagtggtagagttcttcgctctgccttagccaatgataataaggacagtgagcctctgaatgctgctgctgctacccaagccgctgtgaaaaaaagaagtggcagtcagttggatagtcctaatagcagtgtcaggttgtttcactctacatcaaaaaataagaacgaggcatgtagcgggcctctaaatgacaggatccctgataagccagctgcaaataaaagaaaacgtgccagtccttcacaggtgggaagttccagcaacagtgtcagggtgcttcgctctgcaataaaaaataaagatgaggcatgcagtaaatctctaagtgacaggaccgctggtgagccagctgcaaataaaagaaaaaacgtcaatcgctcaaagacggggagtctgagctgtggtgtcagggtgcttctatctgcttcaaaagctaaggatgagacatctaccaagcctttaaatgatagtgctgctgttgaaccagcttcaggtaaaaggaaaggcaccagtccgtcaaaggtgggaagtgccagcaatagtgtcagggtgcttcgatctacttcaaaatataagaatgagacatgtactgagcctttaaatgatagtggtgctgttgaaccagctgcaaataaaaggaaaggtgtcagtcgttcaaagaagagaagtctcaatagcagtgtcagggtgcttcgctctgcctcaaataataagattgaggtatctattaagcctctaggtaatagtactgctggccaaccagctgcgaaaagaagaaaaagcggcagttccttcgaggcaggaagccctgtgagcagtgccagggtgcttcgctctacctcagaaaggaagaatgaggcatctaagcctttaaatgaaagtactgctgctcaaccagctgcgaggaaaaaaaaagctggggtaatttcaaagaccgacaatccaaagattggtctcagggttcttcgctctgcctcaggaaagaagaatgaagcatgtattgggcatgtaaatgatagtacttctgctgaaccaactgtgacaaaaagaaaccgcaagccttcaatggatcgcagtcccaagaaggactacttaaaaatttgtcaaagagttagatatattttgaatcgaatgaactatcaacaaacctttattcaagcttatgcaagtgaaggttggaaaggccaaagtttggaaaaaataagacctgaaaaggagcttgaacgagccaaggcagaaatcctccaatgcaagttaagaatccgtgaagcttttcgaaatatggactctcttttatccaaggggaagcttgaagaatctttgtttgattccgcaggagaaatttcaagcgaagatatattttgtgctgtatgtggctcaaaggatgttactttacaaaatgacatcattctttgtgatggagcctgtgacagaggattccaccagaactgtttgaaccctcctttgctaactgaagatatacctccgggggatcaaagatggctttgccctgcatgtgtctgcaaagcagactctatagatgcactaaatgaacttcaaggaagcaagctctccattcatgactcatgggagaaagttttccctgaggcagcttcaattgccaacggttctaaacaagttgatacttctgatctgctgccagatcatataaagcacagtgacaaccctgcattggttgaagggctgatggtgaatgaagtcaggctttctgcagaggatgacagcaaagcggatgaccttggcttgccttcggaggactcaggggatggtgacttcgatccgtcaggtccagattctagtgaagaccaaaaagatggattgaactcagaagagtcagatttcacatctgactctgatgatttttgtgctgagattgccaaatcttgtggccaggatgaagtctcggcatctccattatcaaatgtgataaaccatacttatagaatgaaactcagggccagcaacaaccgctctaatgaagaaaaccatgatcatgtatttatggacatggagctagggcaagacatggtgctaccagtttcaagcaggcggcaggtggaacggttggattacaaaaaactatatgatgaggcatatgggaaagaatcatctaattcaagtgatgacaaagagtggtctggaaaagaactattagaaggcagtgaaacagattcacttagtgagcgacctcatcctgtaaaacggtgctctagaagagcacaagcagagcagcagaataatgaacatacaccacagagggagcgccttcatggttctgaaagtgagcagaaaactggaattcttcgatccaatggcagcagtagcacaggacggaagtttggtcctgtagctacccagaaattgaaggtacattttgagaaagatccatatcctagccgtgaaacgaaagagaatatatcagaagaactaggcttgacatttaatcaggtctccagatggttctctagcactcgtcactattcaagggttgcttctgccagaaaagaaatgcatcctgacggccatactagcgagaataatgataccacgactgtagatagcatgcaagcaaggcaacccaacactgtggtgatggaaaagttgactgggaatagaaatgacattgtttctgagaaaccgatggtgcagaacaatcttaaccaaggggtggcagaaaagttgactagggatagaaatgacattgttcctgagaaacaggtggtgcagagcaatcttaaccaatgtaataatgaagatatcccgctttctggaacagaaattgagatggagtcttacgaacaagaatcatctgaaagcagtgatgaagagtggtccacacttagcacaccacgaaaaacaaaattacaaggcaacgaaaaagtatcacttactgaatcactacgttctgcaaaacggtgttctagaagagcaccagctagggagcagaataatgaacatactcagagtgagcagcttcatggttctgcaagtgagcagcaagctagagagcaacttcatggttctgtaagtaaacagcaaactgaagttcttcgctccaatgtcagcagtggcgatgcctcaaaatgtcattttggccctatagttactcagaagctgaaggaacattttgaaaaagatccatatccttgccgtgcaacaaaagagggtctggcacaagagctaggactgacatttaatcagatcagtaagtggttctctgccacccatcattattcaagagatgctgttgccaagaaccaaaaatacccaggagaaaatactactgagaataatagtagcacaatctttgatggtatacaagtaatagaacccaattttggtttgatagataaaccagatgcagatacaaatgacatgatttctgaaaagttgatggtacaaattaatcttaacgaaggcattgaagaggatatcccaccgagccaatatactaccaggtgtgaagagaaattaactatgactcaagctgccatctcaagggaagctggacctccaggttatggtcctggagaaaactttcttcaggtcagttcaaggattactagctgtgagcagagtgtgataatggctcctagcgctatcgcaagaggagttggtccaccaggatatacgcctggagaacaccagggcaatggggctccatggaatacaagctatgagcgaagaccgtttacgagtcctacgactagctcaagagaagtcggacctccaggatatgggcctgaagaaaaccaaggcagtggcatttcctgtaatacaagcagagagcaaatattgtttatgagccctacaaccatctcgagagaacttggtccaccaggatatttgcccagagaaaaccagcgcagtgacacttcatggaatacaagctgtgagtcgggactatttatgagtcctgcgaccacctcaatagaacatggtccaccaggatatgggcctggagaaaaccaggagaatgacagtacaagctgcgagttgagaatgtttacaagtcctacaatcgtctccagagaagttggcccaccaggataccagcagggagtgtttatgagtcctaaaaccatctcaagagaagtctgtcctccaggatttgggtctggagagaaccagggcaacgacactacatggtacaaacagagcgcgtttacaagtcctacaaccatctcgagagaagtcggtccgccagggtatggacaggaagatcagggcaatggtggttcttggaacacgagttgtgagcagggagtgtttacgagtcctactagaggcatctcaagagaagtcggtccgccaggatacgggcccggggaaagtcagggcaataccacttcgtggatttcgacctgccagcagagaatgcttgcaggaatccagagaactggtggctcaaggagtatggacttggaagcctttccaccgggatacggacctggtggtgcttcagggagtgtcataagcccccaagctcggtctgcagagaatgtagaattttcggacgaggctagaaaaaaggctatacagcgggagctgagacggcggcagaagttcaggtgaaggcaatatatccagtcttcaagacaagacaatatatccagtcttgatggctgaatgagtgggcgaccttagttgccatcaagcaaaacccttgttgtatcagctgcttatcttccttttacagacttgcttggtttgtcaaggatttcttatgtgaaccctcttgaacctgaagtattcaatgcgctgtgaatttgtgcagttgcctttctt

SEQ ID NO: 215613 - DNA, 3600 bp, Zea Mays
tccgtgtcttggcgatgactgggcgaccgacgatgcagccgtaggccaggggccccaggtcttcctctggtccttctccggcgaagagcaccggtcagtttggaaaaaataagacctgaaaaggagcttgaacgagccaaggcagaaatcctccaatgcaagttaagaatccgtgaagcttttcgaaatatggactctcttttatccaaggggaagcttgaagaatctttgtttgattccgcaggagaaatttcaagcgaagatgtaggggtacctccgggggatcaaagatggctttgccctgcatgtgtctgcaaagcagactctatagatgcactaaatgaacttcaaggaagcaagctctccattcatgactcatgggagaaagttttccctgaggcagcttcaattgccaacggttctaaacaagttgatacttctgatctgctgccagatcatataaagcacagtgacaaccctgcattggttgaagggctgatggtgaatgaagtcaggctttctgcagaggatgacagcaaagcggatgaccttggcttgccttcggaggactcaggggatggtgacttcgatccgtcaggtccagattctagtgaagaccaaaaagatggattgaactcagaagagtcagatttcacatctgactctgatgatttttgtgctgagattgccaaatcttgtggccaggatgaagtctcggcatctccattatcaaatgtgataaaccatacttatagaatgaaactcagggccagcaacaaccgctctaatgaagaaaaccatgatcatgtatttatggacatggagctagggcaagacatggtgctaccagtttcaagcaggcggcaggtggaacggttggattacaaaaaactatatgatgaggcatatgggaaagaatcatctaattcaagtgatgacaaagagtggtctggaaaagaactattagaaggcagtgaaacagattcacttagtgagcgacctcatcctgtaaaacggtgctctagaagagcacaagcagagcagcagaataatgaacatacaccacagagggagcgccttcatggttctgaaagtgagcagaaaactggaattcttcgatccaatggcagcagtagcacaggacggaagtttggtcctgtagctacccagaaattgaaggtacattttgagaaagatccatatcctagccgtgaaacgaaagagaatatatcagaagaactaggcttgacatttaatcaggtctccagatggttctctagcactcgtcactattcaagggttgcttctgccagaaaagaaatgcatcctgacggccatactagcgagaataatgataccacgactgtagatagcatgcaagcaaggcaacccaacactgtggtgatggaaaagttgactgggaatagaaatgacattgtttctgagaaaccgatggtgcagaacaatcttaaccaaggggtggcagaaaagttgactagggatagaaatgacattgttcctgagaaacaggtggtgcagagcaatcttaaccaatgtaataatgaagatatcccgctttctggaacagaaattgagatggagtcttacgaacaagaatcatctgaaagcagtgatgaagagtggtccacacttagcacaccacgaaaaacaaaattacaaggcaacgaaaaagtatcacttactgaatcactacgttctgcaaaacggtgttctagaagagcaccagctagggagcagaataatgaacatactcagagtgagcagcttcatggttctgcaagtgagcagcaagctagagagcaacttcatggttctgtaagtaaacagcaaactgaagttcttcgctccaatgtcagcagtggcgatgcctcaaaatgtcattttggccctatagttactcagaagctgaaggaacattttgaaaaagatccatatccttgccgtgcaacaaaagagggtctggcacaagagctaggactgacatttaatcagatcagtaagtggttctctgccacccatcattattcaagagatgctgttgccaagaaccaaaaatacccaggagaaaatactactgagaataatagtagcacaatctttgatggtatacaagtaatagaacccaattttggtttgatagataaaccagatgcagatacaaatgacatgatttctgaaaagttgatggtacaaattaatcttaacgaaggcattgaagaggatatcccaccgagccaatatactaccaggtgtgaagagaaattaactatgactcaagctgccatctcaagggaagctggacctccaggttatggtcctggagaaaactttcttcaggtcagttcaaggattactagctgtgagcagagtgtgataatggctcctagcgctatcgcaagaggagttggtccaccaggatatacgcctggagaacaccagggcaatggggctccatggaatacaagctatgagcgaagaccgtttacgagtcctacgactagctcaagagaagtcggacctccaggatatgggcctgaagaaaaccaaggcagtggcatttcctgtaatacaagcagagagcaaatattgtttatgagccctacaaccatctcgagagaacttggtccaccaggatatttgcccagagaaaaccagcgcagtgacacttcatggaatacaagctgtgagtcgggactatttatgagtcctgcgaccacctcaatagaacatggtccaccaggatatgggcctggagaaaaccaggagaatgacagtacaagctgcgagttgagaatgtttacaagtcctacaatcgtctccagagaagttggcccaccaggataccagcagggagtgtttatgagtcctaaaaccatctcaagagaagtctgtcctccaggatttgggtctggagagaaccagggcaacgacactacatggtacaaacagagcgcgtttacaagtcctacaaccatctcgagagaagtcggtccgccagggtatggacaggaagatcagggcaatggtggttcttggaacacgagttgtgagcagggagtgtttacgagtcctactagaggcatctcaagagaagtcggtccgccaggatacgggcccggggaaagtcagggcaataccacttcgtggatttcgacctgccagcagagaatgcttgcaggaatccagagaactggtggctcaaggagtatggacttggaagcctttccaccgggatacggacctggtggtgcttcagggagtgtcataagcccccaagctcggtctgcagagaatgtagaattttcggacgaggctagaaaaaaggctatacagcgggagctgagacggcggcagaagttcaggtgaaggcaatatatccagtcttcaagacaagacaatatatccagtcttgatggctgaatgagtgggcgaccttagttgccatcaagcaaaacccttgttgtatcagctgcttatcttccttttacagacttgcttggtttgtcaaggatttcttatgtgaaccctcttgaacctgaagtattcaatgcgctgtgaatttgtgcagttgcctttctt

SEQ ID NO: 215614 - DNA, 3567 bp, Zea Mays
tccgtgtcttggcgatgactgggcgaccgacgatgcagccgtaggccaggggccccaggtcttcctctggtccttctccggcgaagagcaccggtcagtttggaaaaaataagacctgaaaaggagcttgaacgagccaaggcagaaatcctccaatgcaagttaagaatccgtgaagcttttcgaaatatggactctcttttatccaaggggaagcttgaagaatctttgtttgattccgcaggagaaatttcaagcgaagatgtaggggtacctccgggggatcaaagatggctttgccctgcatgtgtctgcaaagcagactctatagatgcactaaatgaacttcaaggaagcaagctctccattcatgactcatgggagaaagttttccctgaggcagcttcaattgccaacggttctaaacaagttgatacttctgatctgctgccagatcatataaagcacagtgacaaccctgcattggttgaagggctgatggtgaatgaagtcaggctttctgcagaggatgacagcaaaggggatggtgacttcgatccgtcaggtccagattctagtgaagaccaaaaagatggattgaactcagaagagtcagatttcacatctgactctgatgatttttgtgctgagattgccaaatcttgtggccaggatgaagtctcggcatctccattatcaaatgtgataaaccatacttatagaatgaaactcagggccagcaacaaccgctctaatgaagaaaaccatgatcatgtatttatggacatggagctagggcaagacatggtgctaccagtttcaagcaggcggcaggtggaacggttggattacaaaaaactatatgatgaggcatatgggaaagaatcatctaattcaagtgatgacaaagagtggtctggaaaagaactattagaaggcagtgaaacagattcacttagtgagcgacctcatcctgtaaaacggtgctctagaagagcacaagcagagcagcagaataatgaacatacaccacagagggagcgccttcatggttctgaaagtgagcagaaaactggaattcttcgatccaatggcagcagtagcacaggacggaagtttggtcctgtagctacccagaaattgaaggtacattttgagaaagatccatatcctagccgtgaaacgaaagagaatatatcagaagaactaggcttgacatttaatcaggtctccagatggttctctagcactcgtcactattcaagggttgcttctgccagaaaagaaatgcatcctgacggccatactagcgagaataatgataccacgactgtagatagcatgcaagcaaggcaacccaacactgtggtgatggaaaagttgactgggaatagaaatgacattgtttctgagaaaccgatggtgcagaacaatcttaaccaaggggtggcagaaaagttgactagggatagaaatgacattgttcctgagaaacaggtggtgcagagcaatcttaaccaatgtaataatgaagatatcccgctttctggaacagaaattgagatggagtcttacgaacaagaatcatctgaaagcagtgatgaagagtggtccacacttagcacaccacgaaaaacaaaattacaaggcaacgaaaaagtatcacttactgaatcactacgttctgcaaaacggtgttctagaagagcaccagctagggagcagaataatgaacatactcagagtgagcagcttcatggttctgcaagtgagcagcaagctagagagcaacttcatggttctgtaagtaaacagcaaactgaagttcttcgctccaatgtcagcagtggcgatgcctcaaaatgtcattttggccctatagttactcagaagctgaaggaacattttgaaaaagatccatatccttgccgtgcaacaaaagagggtctggcacaagagctaggactgacatttaatcagatcagtaagtggttctctgccacccatcattattcaagagatgctgttgccaagaaccaaaaatacccaggagaaaatactactgagaataatagtagcacaatctttgatggtatacaagtaatagaacccaattttggtttgatagataaaccagatgcagatacaaatgacatgatttctgaaaagttgatggtacaaattaatcttaacgaaggcattgaagaggatatcccaccgagccaatatactaccaggtgtgaagagaaattaactatgactcaagctgccatctcaagggaagctggacctccaggttatggtcctggagaaaactttcttcaggtcagttcaaggattactagctgtgagcagagtgtgataatggctcctagcgctatcgcaagaggagttggtccaccaggatatacgcctggagaacaccagggcaatggggctccatggaatacaagctatgagcgaagaccgtttacgagtcctacgactagctcaagagaagtcggacctccaggatatgggcctgaagaaaaccaaggcagtggcatttcctgtaatacaagcagagagcaaatattgtttatgagccctacaaccatctcgagagaacttggtccaccaggatatttgcccagagaaaaccagcgcagtgacacttcatggaatacaagctgtgagtcgggactatttatgagtcctgcgaccacctcaatagaacatggtccaccaggatatgggcctggagaaaaccaggagaatgacagtacaagctgcgagttgagaatgtttacaagtcctacaatcgtctccagagaagttggcccaccaggataccagcagggagtgtttatgagtcctaaaaccatctcaagagaagtctgtcctccaggatttgggtctggagagaaccagggcaacgacactacatggtacaaacagagcgcgtttacaagtcctacaaccatctcgagagaagtcggtccgccagggtatggacaggaagatcagggcaatggtggttcttggaacacgagttgtgagcagggagtgtttacgagtcctactagaggcatctcaagagaagtcggtccgccaggatacgggcccggggaaagtcagggcaataccacttcgtggatttcgacctgccagcagagaatgcttgcaggaatccagagaactggtggctcaaggagtatggacttggaagcctttccaccgggatacggacctggtggtgcttcagggagtgtcataagcccccaagctcggtctgcagagaatgtagaattttcggacgaggctagaaaaaaggctatacagcgggagctgagacggcggcagaagttcaggtgaaggcaatatatccagtcttcaagacaagacaatatatccagtcttgatggctgaatgagtgggcgaccttagttgccatcaagcaaaacccttgttgtatcagctgcttatcttccttttacagacttgcttggtttgtcaaggatttcttatgtgaaccctcttgaacctgaagtattcaatgcgctgtgaatttgtgcagttgcctttctt

SEQ ID NO: 215615 - DNA, 4864 bp, Zea Mays
agcaccggtcagttactgtggacgatgttcgtttgtgtttatcattttcttggtcttgttcggggcaacaacgacattgggaataagtgtacggcagacaaacagtaacatgggaaggaaaggctcagaaatgtcaccaagtaaaaggtatcccttgaggtctccacatagtagtggtagagttcttcgctctgccttagccaatgataataaggacagtgagcctctgaatgctgctgctgctacccaagccgctgtgaaaaaaagaagtggcagtcagttggatagtcctaatagcagtgtcaggttgtttcactctacatcaaaaaataagaacgaggcatgtagcgggcctctaaatgacaggatccctgataagccagctgcaaataaaagaaaacgtgccagtccttcacaggtgggaagttccagcaacagtgtcagggtgcttcgctctgcaataaaaaataaagatgaggcatgcagtaaatctctaagtgacaggaccgctggtgagccagctgcaaataaaagaaaaaacgtcaatcgctcaaagacggggagtctgagctgtggtgtcagggtgcttctatctgcttcaaaagctaaggatgagacatctaccaagcctttaaatgatagtgctgctgttgaaccagcttcaggtaaaaggaaaggcaccagtccgtcaaaggtgggaagtgccagcaatagtgtcagggtgcttcgatctacttcaaaatataagaatgagacatgtactgagcctttaaatgatagtggtgctgttgaaccagctgcaaataaaaggaaaggtgtcagtcgttcaaagaagagaagtctcaatagcagtgtcagggtgcttcgctctgcctcaaataataagattgaggtatctattaagcctctaggtaatagtactgctggccaaccagctgcgaaaagaagaaaaagcggcagttccttcgaggcaggaagccctgtgagcagtgccagggtgcttcgctctacctcagaaaggaagaatgaggcatctaagcctttaaatgaaagtactgctgctcaaccagctgcgaggaaaaaaaaagctggggtaatttcaaagaccgacaatccaaagattggtctcagggttcttcgctctgcctcaggaaagaagaatgaagcatgtattgggcatgtaaatgatagtacttctgctgaaccaactgtgacaaaaagaaaccgcaagccttcaatggatcgcagtcccaagaaggactacttaaaaatttgtcaaagagttagatatattttgaatcgaatgaactatcaacaaacctttattcaagcttatgcaagtgaaggttggaaaggccaaagtttggaaaaaataagacctgaaaaggagcttgaacgagccaaggcagaaatcctccaatgcaagttaagaatccgtgaagcttttcgaaatatggactctcttttatccaaggggaagcttgaagaatctttgtttgattccgcaggagaaatttcaagcgaagatgtaggggtacctccgggggatcaaagatggctttgccctgcatgtgtctgcaaagcagactctatagatgcactaaatgaacttcaaggaagcaagctctccattcatgactcatgggagaaagttttccctgaggcagcttcaattgccaacggttctaaacaagttgatacttctgatctgctgccagatcatataaagcacagtgacaaccctgcattggttgaagggctgatggtgaatgaagtcaggctttctgcagaggatgacagcaaagcggatgaccttggcttgccttcggaggactcaggggatggtgacttcgatccgtcaggtccagattctagtgaagaccaaaaagatggattgaactcagaagagtcagatttcacatctgactctgatgatttttgtgctgagattgccaaatcttgtggccaggatgaagtctcggcatctccattatcaaatgtgataaaccatacttatagaatgaaactcagggccagcaacaaccgctctaatgaagaaaaccatgatcatgtatttatggacatggagctagggcaagacatggtgctaccagtttcaagcaggcggcaggtggaacggttggattacaaaaaactatatgatgaggcatatgggaaagaatcatctaattcaagtgatgacaaagagtggtctggaaaagaactattagaaggcagtgaaacagattcacttagtgagcgacctcatcctgtaaaacggtgctctagaagagcacaagcagagcagcagaataatgaacatacaccacagagggagcgccttcatggttctgaaagtgagcagaaaactggaattcttcgatccaatggcagcagtagcacaggacggaagtttggtcctgtagctacccagaaattgaaggtacattttgagaaagatccatatcctagccgtgaaacgaaagagaatatatcagaagaactaggcttgacatttaatcaggtctccagatggttctctagcactcgtcactattcaagggttgcttctgccagaaaagaaatgcatcctgacggccatactagcgagaataatgataccacgactgtagatagcatgcaagcaaggcaacccaacactgtggtgatggaaaagttgactgggaatagaaatgacattgtttctgagaaaccgatggtgcagaacaatcttaaccaaggggtggcagaaaagttgactagggatagaaatgacattgttcctgagaaacaggtggtgcagagcaatcttaaccaatgtaataatgaagatatcccgctttctggaacagaaattgagatggagtcttacgaacaagaatcatctgaaagcagtgatgaagagtggtccacacttagcacaccacgaaaaacaaaattacaaggcaacgaaaaagtatcacttactgaatcactacgttctgcaaaacggtgttctagaagagcaccagctagggagcagaataatgaacatactcagagtgagcagcttcatggttctgcaagtgagcagcaagctagagagcaacttcatggttctgtaagtaaacagcaaactgaagttcttcgctccaatgtcagcagtggcgatgcctcaaaatgtcattttggccctatagttactcagaagctgaaggaacattttgaaaaagatccatatccttgccgtgcaacaaaagagggtctggcacaagagctaggactgacatttaatcagatcagtaagtggttctctgccacccatcattattcaagagatgctgttgccaagaaccaaaaatacccaggagaaaatactactgagaataatagtagcacaatctttgatggtatacaagtaatagaacccaattttggtttgatagataaaccagatgcagatacaaatgacatgatttctgaaaagttgatggtacaaattaatcttaacgaaggcattgaagaggatatcccaccgagccaatatactaccaggtgtgaagagaaattaactatgactcaagctgccatctcaagggaagctggacctccaggttatggtcctggagaaaactttcttcaggtcagttcaaggattactagctgtgagcagagtgtgataatggctcctagcgctatcgcaagaggagttggtccaccaggatatacgcctggagaacaccagggcaatggggctccatggaatacaagctatgagcgaagaccgtttacgagtcctacgactagctcaagagaagtcggacctccaggatatgggcctgaagaaaaccaaggcagtggcatttcctgtaatacaagcagagagcaaatattgtttatgagccctacaaccatctcgagagaacttggtccaccaggatatttgcccagagaaaaccagcgcagtgacacttcatggaatacaagctgtgagtcgggactatttatgagtcctgcgaccacctcaatagaacatggtccaccaggatatgggcctggagaaaaccaggagaatgacagtacaagctgcgagttgagaatgtttacaagtcctacaatcgtctccagagaagttggcccaccaggataccagcagggagtgtttatgagtcctaaaaccatctcaagagaagtctgtcctccaggatttgggtctggagagaaccagggcaacgacactacatggtacaaacagagcgcgtttacaagtcctacaaccatctcgagagaagtcggtccgccagggtatggacaggaagatcagggcaatggtggttcttggaacacgagttgtgagcagggagtgtttacgagtcctactagaggcatctcaagagaagtcggtccgccaggatacgggcccggggaaagtcagggcaataccacttcgtggatttcgacctgccagcagagaatgcttgcaggaatccagagaactggtggctcaaggagtatggacttggaagcctttccaccgggatacggacctggtggtgcttcagggagtgtcataagcccccaagctcggtctgcagagaatgtagaattttcggacgaggctagaaaaaaggctatacagcgggagctgagacggcggcagaagttcaggtgaaggcaatatatccagtcttcaagacaagacaatatatccagtcttgatggctgaatgagtgggcgaccttagttgccatcaagcaaaacccttgttgtatcagctgcttatcttccttttacagacttgcttggtttgtcaaggatttcttatgtgaaccctcttgaacctgaagtattcaatgcgctgtgaatttgtgcagttgcctttctt

SEQ ID NO: 215616 - DNA, 536 bp, Zea Mays
gcattctgaaggaagcagaattactaggagtaaaagttgatgaattgcctattgtggagaaagaactaaagaggtccttatgtaggaagcaagcatatgaggcacttgcaatagtaatgccaatggaggtggttgaagaagttttaaaagaagcttcgatactaaatattgaagaggagcaaccatttgatgatctgtctcggatgctcaaagaggccacttcctgggaagagaaggctagacttattcttgaacgatcagcttctctctatgagtttgaagaccatatgaggtgttcagagggaatcagagttatccttccgtctaaactgcatatgaaagcagaggttgatattgctaaattgtggatagacaaatgtcaggcctatttgagaccaagctgcaataaacttgcatttggagactttcttaaagttgatgatatcaaggttcacaaaatctggatagttctaaccttagatttgtggcagcttgttaacaatatttttcagaagcatgctaggcctgctccatag

SEQ ID NO: 215617 - DNA, 3038 bp, Zea Mays
gtatatacttttatttggttgcccataattcagcacaaaccaagttccacgagacccacacgtttctttaccctaaccttttcaatgctccagcgaaggaacagtcgccgccatttcttcccatctccatcttcctcgcagcttcgacgctccatcttccgctccctcccttacccgcggtcggcacgcaggcgacgccggcggcgctcaggctcgggctctcatctactgcgtcagcagcttcccctcccgcatctcgccagtcgcctcgcgctctcacctccggtcttccgcacactggccggtgaccctgccttataatattctgccacatcactctgggtgaagcaagattgggtagctttccggtgcctacttcattcttgagtttgtcaatataagccactgaagccaaggatgcatgaaaattaacccaatgaaataaatgctcctacatgagtccaagcatttacctatcaaacttgataatgctggatgctattctcaggcagacctatatggtgatcttgccatttattgtcgtgtttctatgttatggaaattttaagagcgctgatgttacctgtagtgctctttaaatttggaacttggaacatggagcatgtgctgattagtagaaggtttccaactgatcctgctctctaaatttggaacatggagcatgtgctgagtagtagaaggtttccaactgatcccaatgagtataagttatatgaggaaattggagatggtgttagtgccacagtataccgagctctttgtgtcccacttgacatcttggttgccatcaaagtgcttgaccttgagaaatgtaacaatgacctggatgggataagacgggaagtgcaaactatgagtttgattgatcacccaaatcttcttcgtgcatattgctcatttacaaatgggcaccagctttgggttgtcatgccttacatggctgctggatctgctctccacattatgaaaacttcttttccagaagggtttgatgagccagtcattgctactcttttgcgtgaagttttgaaagctcttgtctacctacattctcaaggacatattcacagagatgtcaaggctggaaacatcttaatagatacaaatggggctgttaagctaggagactttggtgtgtcagcctgtatgttcgatactggaaataggcaaagagcaagaaatacatttgtagggacgccttgctggatggctcctgaagtcatgcaacaactgcatggttatgattacaaagctgacatttggtcctttggaataacggcattagaactagcacatggtcatgctccattttcgaagtaccctccaatgaaggtgttgcttatgaccttgcaaaatgcaccaccaggtttagattatgagagggacaagcggttttcaaagtctttcaaggatttggttgctacatgcttagtcaaggatccacgcaagcgtccttcgtctgaaaagctgctgaagcattctttctttaagcatgctcgctcagctgaatatctggcacggagtattcttgatggcctccctccattgggtgaacgctttagggaactgaagagcaaagaggctgagttgcttctcaataacaaacttggtcaggagagcaaggagcagctatcacagaaagagtacataaggggcatcagtggctggaacttcaatctagaggacttgaaaaatgcagctgcccttatagacagttcaaatggcacttgttatttagatgtcagggagaacagagttaaggatgactcacaagaagcttacaatggtccagaacatatttaccaggaaaggctcaaccatgttgcttctagaaggcctgaagaggatgagatacaagaagttgaagccttgaatgatgctgtctcctcttcgttttcaagccgctcccttgaggcactaaaatcttgctttgatgtttgtggtgttgatgatccgagcccaactgctactgattcaagagcgcaaccaagtgtcggaactttacctttccagcagttgcaaaaatttgagcattgtaaaagtggcgactgcaatggtgaaagcttggaaagaagcgtttctgtacctacgaatctggtcactagtggataccacaagcattcaagtggttctcttatacctgagcaagttctttctccctacttgagcagtgatttggaaagggatggatttcgtcagaaaaacttaagcagcaggaactgtagtggccctttattgttccgccaaatgaaggattcacgcacacatcaatctgttgcgccagacgagtcgtcggaaggaaaaattatccgtcgaagggggcgcttccaggttacatcagatagtatttctgaaaaggtagctacatcatcctgcaacagcagcaggataaatctaccaattgatgcagcacgttcaagtcccaagttgtctgcaattcttccaactttgcaattcttgatgaagcagaatactatgcaaaaggaagtactcagtaggctgatttcttcaattgaggaaacatctgatgattctgaagcaaccggaagcagttcatatcagtcttctggagggcctgcccgagaaaaggaattgcatttgtatgttctccaattgcagcgaagtgtcaccgaacttgctgaggaagtgcaaagattaaagctccaaaacaataagcttgagcatcagatcaatatattgtcaagaaaagatgaaaggtcgtcaacgcaagataactgacaatgatgatatgccccttctaccacattaaagtgaagctgtgatccttcgaggctgaggtatacaacaattgagaatgttgtggtagttggaggattttgtatagccattgtactgcgctgtcaaatagaatcttttgtctagtaactagcattcatgtttgtcgtctcttatctagacgccactaaaaagatatgttctgtatctgcggctaaaattgtggtagcccctaccaaaccgttgccgaagtttttttttgttaatcacctctgtatcaa

SEQ ID NO: 215618 - DNA, 3410 bp, Zea Mays
cacgtttctttaccctaaccttttcaatgctccagcgaaggaacagtcgccgccatttcttcccatctccatcttcctcgcagcttcgacgctccatcttccgctccctcccttacccgcggtcggcacgcaggcgacgccggcggcgctcaggctcgggctctcatctactgcgtcagcagcttcccctcccgcatctcgccagtcgcctcgcgctctcacctccggtcttccgcacactggccggtgaccctgccttataatattctgccacatcactctgggtgaagcaagattgggtagctttccggtgcctacttcattcttgagtttgtcaatataagccactgaagccaaggatgcatgaaaattaacccaatgaaataaatgctcctacatgagtccaagcatttacctatcaaacttgataatgctggatgctattctcaggcagacctatatggtgatcttgccatttattgtcgtgtttctatgttatggaaattttaagagcgctgatgttacctgtagtgctctttaaatttggaacttggaacatggagcatgtgctgattagtagaaggtttccaactgatcctgctctctaaatttggaacatggagcatgtgctgagtagtagaaggtttccaactgatcccaatgagtataagttatatgaggaaattggagatggtgttagtgccacagtataccgagctctttgtgtcccacttgacatcttggttgccatcaaagtgcttgaccttgagaaatgtaacaatgacctggatgggataagacgggaagtgcaaactatgagtttgattgatcacccaaatcttcttcgtgcatattgctcatttacaaatgggcaccagctttgggttgtcatgccttacatggctgctggatctgctctccacattatgaaaacttcttttccagaagggtttgatgagccagtcattgctactcttttgcgtgaagttttgaaagctcttgtctacctacattctcaaggacatattcacagagatgtcaaggctggaaacatcttaatagatacaaatggggctgttaagctaggagactttggtgtgtcagcctgtatgttcgatactggaaataggcaaagagcaagaaatacatttgtagggacgccttgctggatggctcctgaagtcatgcaacaactgcatggttatgattacaaagctgacatttggtcctttggaataacggcattagaactagcacatggtcatgctccattttcgaagtaccctccaatgaaggtgttgcttatgaccttgcaaaatgcaccaccaggtttagattatgagagggacaagcggttttcaaagtctttcaaggatttggttgctacatgcttagtcaaggatccacgcaagcgtccttcgtctgaaaagctgctgaagcattctttctttaagcatgctcgctcagctgaatatctggcacggagtattcttgatggcctccctccattgggtgaacgctttagggaactgaagagcaaagaggctgagttgcttctcaataacaaacttggtcaggagagcaaggagcagctatcacagaaagagtacataaggggcatcagtggctggaacttcaatctagaggacttgaaaaatgcagctgcccttatagacagttcaaatggcacttgttatttagatgtcagggagaacagagttaaggatgactcacaagaagcttacaatggtccagaacatatttaccaggaaaggctcaaccatgttgcttctagaaggcctgaagaggatgagatacaagaagttgaagccttgaatgatgctgtctcctcttcgttttcaagccgctcccttgaggcactaaaatcttgctttgatgtttgtggtgttgatgatccgagcccaactgctactgattcaagagcgcaaccaagtgtcggaactttacctttccagcagttgcaaaaatttgagcattgtaaaagtggcgactgcaatggtgaaagcttggaaagaagcgtttctgtacctacgaatctggtcactagtggataccacaagcattcaagtggttctcttatacctgagcaagttctttctccctacttgagcagtgatttggaaagggatggatttcgtcagaaaaacttaagcagcaggaactgtagtggccctttattgttccgccaaatgaaggattcacgcacacatcaatctgttgcgccagacgagtcgtcggaaggaaaaattatccgtcgaagggggcgcttccaggttacatcagatagtatttctgaaaaggtagctacatcatcctgcaacagcagcaggataaatctaccaattgatgcagcacgttcaagtcccaagttgtctgcaattcttccaactttgcaattcttgatgaagcagaatactatgcaaaaggaagtactcagtaggctgatttcttcaattgaggaaacatctgatgattctgaagcaaccggaagcagttcatatcagtcttctggagggcctgcccgagaaaaggaattgcatttgtatgttctccaattgcagcgaagtgtcaccgaacttgctgaggaagtgcaaagattaaagctccaaaacaataagcttgagcatcagatcaatatattgtcaagaaaagatgaaaggtcgtcaacgcaagataactgacaatgatgatatgccccttctaccacattgtaattcgattacccaattttgctttgttagaaagttatttttattccctgcagtcagagttgtatcattgtaagttgtaagtatttagcgaagtgtgaaatcatagtaattttgatctgtacagctttgtttggttaaccatgaagatatagttcttgtgttataagtaatgtgctgataatattgttttgcgtggaagtttgtgaaagtttatctgagcatggaacattgtgttgcgtgaagttggttggagtagtatttgcgctggcagtggtgttggatccgacatagggaacagctaaggatatggaattatgttttttttaggaaatggaaaagttcaggcctctgctcttacacgcaacgagtcttacaagtttgttgctcaattgctaatcaagaatagacgggaaatgaacataataaacgaaagtgaagctgtgatccttcgaggctgaggtatacaacaattgagaatgttgtggtagttggaggattttgtatagccattgtactgcgctgtcaaatagaatcttttgtctagtaactagcattcatgtttgtcgtctcttatctagacgccactaaaaagatatgttctgtatctgcggctaaaattgtggtagcccctaccaaaccgttgccgaagtttttttttgttaatcacctctgtatcaa

SEQ ID NO: 215619 - DNA, 2685 bp, Zea Mays
cttttcaatgctccagcgaaggaacagtcgccgccatttcttcccatctccatcttcctcgcagcttcgacgctccatcttccgctccctcccttacccgcggtcggcacgcaggcgacgccggcggcgctcaggctcgggctctcatctactgcgtcagcagcttcccctcccgcatctcgccagtcgcctcgcgctctcacctccggtcttccgcacactggccggtgaccctgccttataatattctgccacatcactctgggtgaagcaagattggtgctctttaaatttggaacttggaacatggagcatgtgctgattagtagaaggtttccaactgatcctgctctctaaatttggaacatggagcatgtgctgagtagtagaaggtttccaactgatcccaatgagtataagttatatgaggaaattggagatggtgttagtgccacagtataccgagctctttgtgtcccacttgacatcttggttgccatcaaagtgcttgaccttgagaaatgtaacaatgacctggatgggataagacgggaagtgcaaactatgagtttgattgatcacccaaatcttcttcgtgcatattgctcatttacaaatgggcaccagctttgggttgtcatgccttacatggctgctggatctgctctccacattatgaaaacttcttttccagaagggtttgatgagccagtcattgctactcttttgcgtgaagttttgaaagctcttgtctacctacattctcaaggacatattcacagagatgtcaaggctggaaacatcttaatagatacaaatggggctgttaagctaggagactttggtgtgtcagcctgtatgttcgatactggaaataggcaaagagcaagaaatacatttgtagggacgccttgctggatggctcctgaagtcatgcaacaactgcatggttatgattacaaagctgacatttggtcctttggaataacggcattagaactagcacatggtcatgctccattttcgaagtaccctccaatgaaggtgttgcttatgaccttgcaaaatgcaccaccaggtttagattatgagagggacaagcggttttcaaagtctttcaaggatttggttgctacatgcttagtcaaggatccacgcaagcgtccttcgtctgaaaagctgctgaagcattctttctttaagcatgctcgctcagctgaatatctggcacggagtattcttgatggcctccctccattgggtgaacgctttagggaactgaagagcaaagaggctgagttgcttctcaataacaaacttggtcaggagagcaaggagcagctatcacagaaagagtacataaggggcatcagtggctggaacttcaatctagaggacttgaaaaatgcagctgcccttatagacagttcaaatggcacttgttatttagatgtcagggagaacagagttaaggatgactcacaagaagcttacaatggtccagaacatatttaccaggaaaggctcaaccatgttgcttctagaaggcctgaagaggatgagatacaagaagttgaagccttgaatgatgctgtctcctcttcgttttcaagccgctcccttgaggcactaaaatcttgctttgatgtttgtggtgttgatgatccgagcccaactgctactgattcaagagcgcaaccaagtgtcggaactttacctttccagcagttgcaaaaatttgagcattgtaaaagtggcgactgcaatggtgaaagcttggaaagaagcgtttctgtacctacgaatctggtcactagtggataccacaagcattcaagtggttctcttatacctgagcaagttctttctccctacttgagcagtgatttggaaagggatggatttcgtcagaaaaacttaagcagcaggaactgtagtggccctttattgttccgccaaatgaaggattcacgcacacatcaatctgttgcgccagacgagtcgtcggaaggaaaaattatccgtcgaagggggcgcttccaggttacatcagatagtatttctgaaaaggtagctacatcatcctgcaacagcagcaggataaatctaccaattgatgcagcacgttcaagtcccaagttgtctgcaattcttccaactttgcaattcttgatgaagcagaatactatgcaaaaggaagtactcagtaggctgatttcttcaattgaggaaacatctgatgattctgaagcaaccggaagcagttcatatcagtcttctggagggcctgcccgagaaaaggaattgcatttgtatgttctccaattgcagcgaagtgtcaccgaacttgctgaggaagtgcaaagattaaagctccaaaacaataagcttgagcatcagatcaatatattgtcaagaaaagatgaaaggtcgtcaacgcaagataactgacaatgatgatatgccccttctaccacattgtaattcgattacccaattttgctttgttagaaagttatttttattccctgcagtcagagttgtatcattgtaagttgtaagtatttagcgaagtgtgaaatcatagtaattttgatctgtacagctttgtttggttaaccatgaagatatagttcttgtgttataagtaatgtgctgataatattgttttgcgtggaagtttgt

SEQ ID NO: 215620 - DNA, 2661 bp, Zea Mays
ggaacagtcgccgccatttcttcccatctccatcttcctcgcagcttcgacgctccatcttccgctccctcccttacccgcggtcggcacgcaggcgacgccggcggcgctcaggctcgggctctcatctactgcgtcagcagcttcccctcccgcatctcgccagtcgcctcgcgctctcacctccggtcttccgcacactggccggtgaccctgccttataatattctgccacatcactctgggtgaagcaagattggtgctctttaaatttggaacttggaacatggagcatgtgctgattagtagaaggtttccaactgatcctgctctctaaatttggaacatggagcatgtgctgagtagtagaaggtttccaactgatcccaatgagtataagttatatgaggaaattggagatggtgttagtgccacagtataccgagctctttgtgtcccacttgacatcttggttgccatcaaagtgcttgaccttgagaaatgtaacaatgacctggatgggataagacgggaagtgcaaactatgagtttgattgatcacccaaatcttcttcgtgcatattgctcatttacaaatgggcaccagctttgggttgtcatgccttacatggctgctggatctgctctccacattatgaaaacttcttttccagaagggtttgatgagccagtcattgctactcttttgcgtgaagttttgaaagctcttgtctacctacattctcaaggacatattcacagagatgtcaaggctggaaacatcttaatagatacaaatggggctgttaagctaggagactttggtgtgtcagcctgtatgttcgatactggaaataggcaaagagcaagaaatacatttgtagggacgccttgctggatggctcctgaagtcatgcaacaactgcatggttatgattacaaagctgacatttggtcctttggaataacggcattagaactagcacatggtcatgctccattttcgaagtaccctccaatgaaggtgttgcttatgaccttgcaaaatgcaccaccaggtttagattatgagagggacaagcggttttcaaagtctttcaaggatttggttgctacatgcttagtcaaggatccacgcaagcgtccttcgtctgaaaagctgctgaagcattctttctttaagcatgctcgctcagctgaatatctggcacggagtattcttgatggcctccctccattgggtgaacgctttagggaactgaagagcaaagaggctgagttgcttctcaataacaaacttggtcaggagagcaaggagcagctatcacagaaagagtacataaggggcatcagtggctggaacttcaatctagaggacttgaaaaatgcagctgcccttacagttcaaatggcacttgttatttagatgtcagggagaacagagttaaggatgactcacaagaagcttacaatggtccagaacatatttaccaggaaaggctcaaccatgttgcttctagaaggcctgaagaggatgagatacaagaagttgaagccttgaatgatgctgtctcctcttcgttttcaagccgctcccttgaggcactaaaatcttgctttgatgtttgtggtgttgatgatccgagcccaactgctactgattcaagagcgcaaccaagtgtcggaactttacctttccagcagttgcaaaaatttgagcattgtaaaagtggcgactgcaatggtgaaagcttggaaagaagcgtttctgtacctacgaatctggtcactagtggataccacaagcattcaagtggttctcttatacctgagcaagttctttctccctacttgagcagtgatttggaaagggatggatttcgtcagaaaaacttaagcagcaggaactgtagtggccctttattgttccgccaaatgaaggattcacgcacacatcaatctgttgcgccagacgagtcgtcggaaggaaaaattatccgtcgaagggggcgcttccaggttacatcagatagtatttctgaaaaggtagctacatcatcctgcaacagcagcaggataaatctaccaattgatgcagcacgttcaagtcccaagttgtctgcaattcttccaactttgcaattcttgatgaagcagaatactatgcaaaaggaagtactcagtaggctgatttcttcaattgaggaaacatctgatgattctgaagcaaccggaagcagttcatatcagtcttctggagggcctgcccgagaaaaggaattgcatttgtatgttctccaattgcagcgaagtgtcaccgaacttgctgaggaagtgcaaagattaaagctccaaaacaataagcttgagcatcagatcaatatattgtcaagaaaagatgaaaggtcgtcaacgcaagataactgacaatgatgatatgccccttctaccacattgtaattcgattacccaattttgctttgttagaaagttatttttattccctgcagtcagagttgtatcattgtaagttgtaagtatttagcgaagtgtgaaatcatagtaattttgatctgtacagctttgtttggttaaccatgaagatatagttcttgtgttataagtaatgtgctgataatattgttttgcgtggaagtttgt

SEQ ID NO: 215621 - DNA, 2871 bp, Zea Mays
cccatctccatcttcctcgcagcttcgacgctccatcttccgctccctcccttacccgcggtcggcacgcaggcgacgccggcggcgctcaggctcgggctctcatctactgcgtcagcagcttcccctcccgcatctcgccagtcgcctcgcgctctcacctccggtcttccgcacactggccggtgaccctgccttataatattctgccacatcactctgggtgaagcaagattgggtagctttccggtgcctacttcattcttgagtttgtcaatataagccactgaagccaaggatgcatgaaaattaacccaatgaaataaatgctcctacatgagtccaagcatttacctatcaaacttgataatgctggatgctattctcaggcagacctatatggtgatcttgccatttattgtcgtgtttctatgttatggaaattttaagagcgctgatgttacctgtagtgctctttaaatttggaacttggaacatggagcatgtgctgattagtagaaggtttccaactgatcctgctctctaaatttggaacatggagcatgtgctgagtagtagaaggtttccaactgatcccaatgagtataagttatatgaggaaattggagatggtgttagtgccacagtataccgagctctttgtgtcccacttgacatcttggttgccatcaaagtgcttgaccttgagaaatgtaacaatgacctggatgggataagacgggaagtgcaaactatgagtttgattgatcacccaaatcttcttcgtgcatattgctcatttacaaatgggcaccagctttgggttgtcatgccttacatggctgctggatctgctctccacattatgaaaacttcttttccagaagggtttgatgagccagtcattgctactcttttgcgtgaagttttgaaagctcttgtctacctacattctcaaggacatattcacagagatgtcaaggctggaaacatcttaatagatacaaatggggctgttaagctaggagactttggtgtgtcagcctgtatgttcgatactggaaataggcaaagagcaagaaatacatttgtagggacgccttgctggatggctcctgaagtcatgcaacaactgcatggttatgattacaaagctgacatttggtcctttggaataacggcattagaactagcacatggtcatgctccattttcgaagtaccctccaatgaaggtgttgcttatgaccttgcaaaatgcaccaccaggtttagattatgagagggacaagcggttttcaaagtctttcaaggatttggttgctacatgcttagtcaaggatccacgcaagcgtccttcgtctgaaaagctgctgaagcattctttctttaagcatgctcgctcagctgaatatctggcacggagtattcttgatggcctccctccattgggtgaacgctttagggaactgaagagcaaagaggctgagttgcttctcaataacaaacttggtcaggagagcaaggagcagctatcacagaaagagtacataaggggcatcagtggctggaacttcaatctagaggacttgaaaaatgcagctgcccttatagacagttcaaatggcacttgttatttagatgtcagggagaacagagttaaggatgactcacaagaagcttacaatggtccagaacatatttaccaggaaaggctcaaccatgttgcttctagaaggcctgaagaggatgagatacaagaagttgaagccttgaatgatgctgtctcctcttcgttttcaagccgctcccttgaggcactaaaatcttgctttgatgtttgtggtgttgatgatccgagcccaactgctactgattcaagagcgcaaccaagtgtcggaactttacctttccagcagttgcaaaaatttgagcattgtaaaagtggcgactgcaatggtgaaagcttggaaagaagcgtttctgtacctacgaatctggtcactagtggataccacaagcattcaagtggttctcttatacctgagcaagttctttctccctacttgagcagtgatttggaaagggatggatttcgtcagaaaaacttaagcagcaggaactgtagtggccctttattgttccgccaaatgaaggattcacgcacacatcaatctgttgcgccagacgagtcgtcggaaggaaaaattatccgtcgaagggggcgcttccaggttacatcagatagtatttctgaaaaggtagctacatcatcctgcaacagcagcaggataaatctaccaattgatgcagcacgttcaagtcccaagttgtctgcaattcttccaactttgcaattcttgatgaagcagaatactatgcaaaagtactcagtaggctgatttcttcaattgaggaaacatctgatgattctgaagcaaccggaagcagttcatatcagtcttctggagggcctgcccgagaaaaggaattgcatttgtatgttctccaattgcagcgaagtgtcaccgaacttgctgaggaagtgcaaagattaaagctccaaaacaataagcttgagcatcagatcaatatattgtcaagaaaagatgaaaggtcgtcaacgcaagataactgacaatgatgatatgccccttctaccacattgtaattcgattacccaattttgctttgttagaaagttatttttattccctgcagtcagagttgtatcattgtaagttgtaagtatttagcgaagtgtgaaatcatagtaattttgatctgtacagctttgtttggttaaccatgaagatatagttcttgtgttataagtaatgtgctgataatattgttttgcgtggaagtttgt

SEQ ID NO: 215622 - DNA, 3668 bp, Zea Mays
ctgggccttttgtgataagcacgaggacgtgggcacacgtgcagctgtccccaacccaaggaccgacccatccaaatcagttccgtcacgtctcttcctctcccgtctccgcagacgcctcccttttcttctcactccactccgccgcccggattcagagcgagaggaggcggagagggcggacatggcggcgatgttggtgggcgcgctgcggaggggaagtggatgccgcggcggcttgcgccttatcgctcattcgcttcgcagattcgtgagcacgctcgtcgtagcggagcacgaaggcgggttcgtcaagccgtcgtcgctgagcgcattggccgccgcggaggccattgccaaggacaacaaagtttctgtcctgctgggtggttccgggccggcgcttcacaaggccgccgaccatgccgcgtgcagccatccactggtgtctgaggtgctcgtggccgattcggaagccttggcgcatcctctggctgaaccctgggccgagctactccgttccgttcagcagaaaggaggctactctcatgtcatagcttcatccacatcattcgggaagaatttgcttccacgtgctgcggctctccttgatgtgtcccctgttactgatgtcaccgctgtaaaggagccacacgtctttgtgaggccaatttatgctggaaatgcactttgtactgtgaaatatactggagaggggccttgcatgatgagtattagatcaacttcattttccccagctactgaggctatgtctgaaacaaaggttgcacctatcacccagggaaatctacatgggtgaatctgacatcacaagacacggagcggcctgatcttgcaaatgcacccgtagtagtcaccggaggcagaggtttaaaaagtgctgaaaattttaaattgttggagcagcttgctgagaaacttggcgcagcagtgggtgcgactcgggctgctgttgatgcaggttatgttccaaatgaccttcaggttggtcagacggggaaaatcgttgcgccggatctttatatggcttttggagtatccggagcaatacaacacttggcaggaatgagagactcgaaggtcattgtggctgttaataaagatgctgatgcccccatatttcaggttgcagattacggactggttgctgatctgttcgaggttctggatgagttattgaagaagatcccagagaagaaataagtggccgttattagctcttcactcctgcatgttcatttgcccatgtggcgctaataagatctcacgatgtcaatcccgtaaaatctgtaatgctctatttggatgtcgatattgaaagactccccgccgtccaccgctcgccgcccccggccgccatccagccgccggtacagggctcatcctcccggtcgcagccgtgtccacttccttcacgaagagaggcgcgtagactggggagctggagcgaggacaaggagacgagggaaaggatgcagcagctgcaaccgaagcagatgcactgggtgagggccgactcctccgacttcgggggcgaccgtcccgccccccgcagcgggcacactgcggttatcattggcaagtccaaggtggtcgtcttcggaggattcgccgacaagcgcttcctcgctgatgtttccgtctacgacgtcgagaataagctatggtacacacctgagtgcactggtaatgggtcggatgggcaggccggcccaagcccaagggcttttcacatagctgttgtcattgactgcaacatgttcatctttggtggccgatctgggggcaagcgtttaggtgatttctggatgctagacactgacttatggcaatggtcggagatgactggctttggtgatttaccgtcaccacgagagtttgctgctgcttcagccataggaaacagaaagattgttatgtatggtggatgggatggcaaaaaatggctttcagatgtatacatcatggacacaatgtcactggagtggacagaattagctgttactggatctgtgccacctccaagatgtgggcattcggcaaccatgattgagaagagactccttatatttggaggcagaggtggagcaggaccaataatgggtgatttatgggctttaaagggtattactgaagaagacaatgaggcgccaggttggacacagttgaaacttccagggcaatctccctcaccacgatgcggtcattcagtaacatctggtggaccttatctcttgctgtttggaggacatggaactggtggttggctaagtagatatgatgtgtactataatgaatgcattattttagacagggtatctgttcaatggaagcgcttaccaacaagcaatgaaccacctcctcctcgggcatatcattccataacttccatagggtctcgatttcttttatttggtggctttgatggaaagaatacatttggtgatttgtggtggcttgttcctgaagacgatcctattgcgaaacgagacttagttcctagcatcgattcaaacagcaaacctagcactgtgactgatgataaccagctattgaacctaaaggagtcacaagctctagaaaatccaataacagaattggccaaacgtctggggattgcactttctgaagaagtttcagcaagttttgttgacgaagccaatgataaagaacttgtggaattgtcatctagacttgctggtcaatcgcttccagctagtgaccaggttgcatcaattcaggtacttcgtgatcattggaaaagttctccagcaagctcactacaactacaggaactaggacctttgctgagggactatcaacgcctcatcttgcgacactatacgggaaattcattgccagcttttcgtgaaatggaagctctccgttttttccatctaaaaagtgcttcacagttgcgcatggatgacattcccgtcctgttgagcgagtatggaaggctgctttcaacatgagatggtgtcttgcaagctgtgccctcctgcttggtcctaacagaacttctgctccatgtaatttgcggagaactttctgcctgacaaaagcacacccgtggagccattccttgccatcagttggtctgttagtgcaagtcatagtcgtagcagcgatagcgcactgagctgaattcctttttcttttgaggactggacgcagacgcacacatatttcgtgcagcctggctgggcgctggaatggggtcatggtcatgggctcatggccatccacacgtggttaggcctagcttaggcgaggagctgggcggcgtggcaaacttggcaggccgcccatggtcgcgtggaattccaagaaaacggggttttgtgtgatgtgaggctggaaacctggggggtcagcagcacatgtttccagtctattgcactccctctgaccgaaagggcgctgcactgcaattttattttactacctttgttcaaaaataatgggcgtctccttttcagatgtcaatcagtttcaactttgattagatttagtaaaaaaatctaacatttgttggatcgtattaaatattagtacttttatgtgtatatttgatcacgtttaagattagttgacctttaaaaacgacacgcttattattattattattattatttgtaaaaata

SEQ ID NO: 215623 - DNA, 2356 bp, Zea Mays
ggtgggcctatgtaggggcccagtgacgtgactccccgccgtccaccgctcgccgcccccggccgccatccagccgccggtacagggctcatcctcccggtcgcagccgtgtccacttccttcacgaagagaggcgcgtagactggggagctggagcgaggacaaggagacgagggaaaggatgcagcagctgcaaccgaagcagatgcactgggtgagggccgactcctccgacttcgggggcgaccgtcccgccccccgcagcgggcacactgcggttatcattggcaagtccaaggtggtcgtcttcggaggattcgccgacaagcgcttcctcgctgatgtttccgtctacgacgtcgagaataagctatggtacacacctgagtgcactggtaatgggtcggatgggcaggccggcccaagcccaagggcttttcacatagctgttgtcattgactgcaacatgttcatctttggtggccgatctgggggcaagcgtttaggtgatttctggatgctagacactgacttatggcaatggtcggagatgactggctttggtgatttaccgtcaccacgagagtttgctgctgcttcagccataggaaacagaaagattgttatgtatggtggatgggatggcaaaaaatggctttcagatgtatacatcatggacacaatgtcactggagtggacagaattagctgttactggatctgtgccacctccaagatgtgggcattcggcaaccatgattgagaagagactccttatatttggaggcagaggtggagcaggaccaataatgggtgatttatgggctttaaagggtattactgaagaagacaatgaggcgccaggttggacacagttgaaacttccagggcaatctccctcaccacgatgcggtcattcagtaacatctggtggaccttatctcttgctgtttggaggacatggaactggtggttggctaagtagatatgatgtgtactataatgaatgcattattttagacagggtatctgttcaatggaagcgcttaccaacaagcaatgaaccacctcctcctcgggcatatcattccataacttccatagggtctcgatttcttttatttggtggctttgatggaaagaatacatttggtgatttgtggtggcttgttcctgaagacgatcctattgcgaaacgagacttagttcctagcatcgattcaaacagcaaacctagcactgtgactgatgataaccagctattgaacctaaaggagtcacaagctctagaaaatccaataacagaattggccaaacgtctggggattgcactttctgaagaagtttcagcaagttttgttgacgaagccaatgataaagaacttgtggaattgtcatctagacttgctggtcaatcgcttccagctagtgaccaggttgcatcaattcaggtacttcgtgatcattggaaaagttctccagcaagctcactacaactacaggaactaggacctttgctgagggactatcaacgcctcatcttgcgacactatacgggaaattcattgccagcttttcgtgaaatggaagctctccgttttttccatctaaaaagtgcttcacagttgcgcatggatgacattcccgtcctgttgagcgagtatggaaggctgctttcaacatgagatggtgtcttgcaagctgtgccctcctgcttggtcctaacagaacttctgctccatgtaatttgcggagaactttctgcctgacaaaagcacacccgtggagccattccttgccatcagttggtctgttagtgcaagtcatagtcgtagcagcgatagcgcactgagctgaattcctttttcttttgaggactggacgcagacgcacacatatttcgtgcagcctggctgggcgctggaatggggtcatggtcatgggctcatggccatccacacgtggttaggcctagcttaggcgaggagctgggcggcgtggcaaacttggcaggccgcccatggtcgcgtggaattccaagaaaacggggttttgtgtgatgtgaggctggaaacctggggggtcagcagcacatgtttccagtctattgcactccctctgaccgaaagggcgctgcactgcaattttattttactacctttgttcaaaaataatgggcgtctccttttcagatgtcaatcagtttcaactttgattagatttagtaaaaaaatctaacatttgttggatcgtattaaatattagtacttttatgtgtatatttgatcacgtttaagattagttgacctttaaaaacgacacgcttattattattattattattatttgtaaaaata

SEQ ID NO: 215624 - DNA, 2266 bp, Zea Mays
cgaccgtggggcgctactgtttccatcctcctgctctgacttctctgcttcgtccgatcccctctcccccacctgccagactccccgccgtccaccgctcgccgcccccggccgccatccagccgccggtacagggctcatcctcccggtcgcagccgtgtccacttccttcacgaagagaggcgcgtagactggggagctggagcgaggacaaggagacgagggaaaggatgcagcagctgcaaccgaagcagatgcactgggtgagggccgactcctccgacttcgggggcgaccgtcccgccccccgcagcgggcacactgcggttatcattggcaagtccaaggtggtcgtcttcggaggattcgccgacaagcgcttcctcgctgatgtttccgtctacgacgtcgtttaggtgatttctggatgctagacactgacttatggcaatggtcggagatgactggctttggtgatttaccgtcaccacgagagtttgctgctgcttcagccataggaaacagaaagattgttatgtatggtggatgggatggcaaaaaatggctttcagatgtatacatcatggacacaatgtcactggagtggacagaattagctgttactggatctgtgccacctccaagatgtgggcattcggcaaccatgattgagaagagactccttatatttggaggcagaggtggagcaggaccaataatgggtgatttatgggctttaaagggtattactgaagaagacaatgaggcgccaggttggacacagttgaaacttccagggcaatctccctcaccacgatgcggtcattcagtaacatctggtggaccttatctcttgctgtttggaggacatggaactggtggttggctaagtagatatgatgtgtactataatgaatgcattattttagacagggtatctgttcaatggaagcgcttaccaacaagcaatgaaccacctcctcctcgggcatatcattccataacttccatagggtctcgatttcttttatttggtggctttgatggaaagaatacatttggtgatttgtggtggcttgttcctgaagacgatcctattgcgaaacgagacttagttcctagcatcgattcaaacagcaaacctagcactgtgactgatgataaccagctattgaacctaaaggagtcacaagctctagaaaatccaataacagaattggccaaacgtctggggattgcactttctgaagaagtttcagcaagttttgttgacgaagccaatgataaagaacttgtggaattgtcatctagacttgctggtcaatcgcttccagctagtgaccaggttgcatcaattcaggtacttcgtgatcattggaaaagttctccagcaagctcactacaactacaggaactaggacctttgctgagggactatcaacgcctcatcttgcgacactatacgggaaattcattgccagcttttcgtgaaatggaagctctccgttttttccatctaaaaagtgcttcacagttgcgcatggatgacattcccgtcctgttgagcgagtatggaaggctgctttcaacatgagatggtgtcttgcaagctgtgccctcctgcttggtcctaacagaacttctgctccatgtaatttgcggagaactttctgcctgacaaaagcacacccgtggagccattccttgccatcagttggtctgttagtgcaagtcatagtcgtagcagcgatagcgcactgagctgaattcctttttcttttgaggactggacgcagacgcacacatatttcgtgcagcctggctgggcgctggaatggggtcatggtcatgggctcatggccatccacacgtggttaggcctagcttaggcgaggagctgggcggcgtggcaaacttggcaggccgcccatggtcgcgtggaattccaagaaaacggggttttgtgtgatgtgaggctggaaacctggggggtcagcagcacatgtttccagtctattgcactccctctgaccgaaagggcgctgcactgcaattttattttactacctttgttcaaaaataatgggcgtctccttttcagatgtcaatcagtttcaactttgattagatttagtaaaaaaatctaacatttgttggatcgtattaaatattagtacttttatgtgtatatttgatcacgtttaagattagttgacctttaaaaacgacacgcttattattattattattattatttgtaaaaata

SEQ ID NO: 215625 - DNA, 1526 bp, Zea Mays
aaacggacaattttcagaatctgaaaccaaacgtcacgtgagaaggcgcaggaaactaacagatggtttagggtctcttcctcctgatcacacaacggacagagatgaggctcttgctgtttggaggacatggaactggtggttggctaagtagatatgatgtgtactataatgaatgcattattttagacagggtatctgttcaatggaagcgcttaccaacaagcaatgaaccacctcctcctcgggcatatcattccataacttccatagggtctcgatttcttttatttggtggctttgatggaaagaatacatttggtgatttgtggtggcttgttcctgaagacgatcctattgcgaaacgagacttagttcctagcatcgattcaaacagcaaacctagcactgtgactgatgataaccagctattgaacctaaaggagtcacaagctctagaaaatccaataacagaattggccaaacgtctggggattgcactttctgaagaagtttcagcaagttttgttgacgaagccaatgataaagaacttgtggaattgtcatctagacttgctggtcaatcgcttccagctagtgaccaggttgcatcaattcaggtacttcgtgatcattggaaaagttctccagcaagctcactacaactacaggaactaggacctttgctgagggactatcaacgcctcatcttgcgacactatacgggaaattcattgccagcttttcgtgaaatggaagctctccgttttttccatctaaaaagtgcttcacagttgcgcatggatgacattcccgtcctgttgagcgagtatggaaggctgctttcaacatgagatggtgtcttgcaagctgtgccctcctgcttggtcctaacagaacttctgctccatgtaatttgcggagaactttctgcctgacaaaagcacacccgtggagccattccttgccatcagttggtctgttagtgcaagtcatagtcgtagcagcgatagcgcactgagctgaattcctttttcttttgaggactggacgcagacgcacacatatttcgtgcagcctggctgggcgctggaatggggtcatggtcatgggctcatggccatccacacgtggttaggcctagcttaggcgaggagctgggcggcgtggcaaacttggcaggccgcccatggtcgcgtggaattccaagaaaacggggttttgtgtgatgtgaggctggaaacctggggggtcagcagcacatgtttccagtctattgcactccctctgaccgaaagggcgctgcactgcaattttattttactacctttgttcaaaaataatgggcgtctccttttcagatgtcaatcagtttcaactttgattagatttagtaaaaaaatctaacatttgttggatcgtattaaatattagtacttttatgtgtatatttgatcacgtttaagattagttgacctttaaaaacgacacgcttattattattattattattatttgtaaaaata

SEQ ID NO: 215626 - DNA, 1287 bp, Zea Mays
atcacacaacggacagagatgaggctcttgctgtttggaggacatggaactggtggttggctaagtagatatgatgtgtactataatgaatgcattattttagacagggacgatcctattgcgaaacgagacttagttcctagcatcgattcaaacagcaaacctagcactgtgactgatgataaccagctattgaacctaaaggagtcacaagctctagaaaatccaataacagaattggccaaacgtctggggattgcactttctgaagaagtttcagcaagttttgttgacgaagccaatgataaagaacttgtggaattgtcatctagacttgctggtcaatcgcttccagctagtgaccaggttgcatcaattcaggtacttcgtgatcattggaaaagttctccagcaagctcactacaactacaggaactaggacctttgctgagggactatcaacgcctcatcttgcgacactatacgggaaattcattgccagcttttcgtgaaatggaagctctccgttttttccatctaaaaagtgcttcacagttgcgcatggatgacattcccgtcctgttgagcgagtatggaaggctgctttcaacatgagatggtgtcttgcaagctgtgccctcctgcttggtcctaacagaacttctgctccatgtaatttgcggagaactttctgcctgacaaaagcacacccgtggagccattccttgccatcagttggtctgttagtgcaagtcatagtcgtagcagcgatagcgcactgagctgaattcctttttcttttgaggactggacgcagacgcacacatatttcgtgcagcctggctgggcgctggaatggggtcatggtcatgggctcatggccatccacacgtggttaggcctagcttaggcgaggagctgggcggcgtggcaaacttggcaggccgcccatggtcgcgtggaattccaagaaaacggggttttgtgtgatgtgaggctggaaacctggggggtcagcagcacatgtttccagtctattgcactccctctgaccgaaagggcgctgcactgcaattttattttactacctttgttcaaaaataatgggcgtctccttttcagatgtcaatcagtttcaactttgattagatttagtaaaaaaatctaacatttgttggatcgtattaaatattagtacttttatgtgtatatttgatcacgtttaagattagttgacctttaaaaacgacacgcttattattattattattattatttgtaaaaata

SEQ ID NO: 215627 - DNA, 1934 bp, Zea Mays
catggatctaacaagcacaaccactgccttcttatccggtctgatactgatccttgtgtcacttgttgctcacaaagccagaacaagcagatccatgaagaggaggcctcctggtccacgggcgctccccttcatcggatgcatccaccacgtgctcacctcgcagccgcaggccgccctacgtgacctggctcagaagcatggcccggtgatgtacctgaagctggggcaggtggacaccgtcgtcatctcctcgccgacggcggcgcaggaggcgctccgggagaaggacagaagcctggcgtcgcggccgagcttgctcggctcggagatcatctgctacggcaaccgcgacatcgccttcgcgccctacggcgactactggcgctcgctgcgcaagatgtgcacggtcgagctcctcaacgcttccaaggtgaggcggttcgcggccatcagggacagcgagaccatgtccctggtcagggagatacgccgcgcctgcgccgccgccagcggagagcccgtggacctcggcggcctgctcctgtcgtgcaccaactccgtaaccggaagggcagcgttcggcaaccgctgcagcagggagctcacggcggatttcctgtccgccatctccgtggtgataagcaacatctcggggctctgcgtctcggacctcttcccgtcgctgcggttcgtggacgccctcaccggcaccaaacgccgcctgcggagggcgcaccagcggctcgaagacgtgtttgccaggatcatctctgacggggaggcacggcgggcggaaaggaaggggactggtgctggtgcaggaggagacgacgacgacgacgaccttctaagcgtcatgctgaggattcgcgacgagggatttattcacaggagggacggagacgacttcgtcggtggccgagtggctcatggcggagctgatgaggaaccccgacgcaatgcacaaggcgcaagacgaggtgcggcaagcattcgagcacagcagccccgacgagcacgaagcccagatggacaagctgcgctacaccaagacggtgatcaaggagaccctgaggctgtacccgcccctcccgctgctcctccctcgccagtgccgagagacctgcgacatcggcgggttccaggtggccaagggcagcagggtgatcgtgaacgcatgggcgatcgcgaggagcccggcgcactgggacgacgccgacaggttcatgcctgaaagatttgagcgcgacgatagcgcggcaggttattccagggctactactgatggcactacacagtttgagtacctgccgtttgggcacgggaggaggatttgcccgggcatgggcttcggcttgtccaccttggagatcctagttgcgcggctcctctactactttgactggagccttccggaaggaatgcaggtggtggacctggacatggacatgactgtcggtgcgtcggccaggaggaccaacaaactgcacctagtggcctcgccgtatcaagtgcccacgtagatttcatatgatggttgcagttttgcaaccaaaagttgtgcctctttttcttttcctggcttctttcctatcctgcggaaatcaaataaggccttgttcggttatctcttaatccatgtggattgagttggattgggtgggtttaaatcccaaacaagtcaaagttcttctaaattttttccaatcccgctcaatccatatataatgggaataaccgaacaagacctaaacagtttacgtattcactaccaactccagcagcctccgtatccaactctccggtactactaactccaacagcctccgtatccagctccccatccccattttgcatgttctaaattattgtccagccgtccagcagcctcgccctgttgagcactaaatttggtacctagaagaccggac

SEQ ID NO: 215628 - DNA, 852 bp, Zea Mays
cttctagctgggcgaaagagcagatgcggagcagaggcgcatccgcgcggaggagccgaggcgaagaaggcgatgcagcaggagcaccgcaccaccaaggggactcaggctcagccagcgagggcgtcggcaccggcgacgatctcgaggatctccccggtgatcttggcctggcgctgtcggttgtaggcgatggagaggttcttgcggagctcgatggcgttgtcggtggcgctgctcatggcgctcatccgggcggcgagctcgctggcgagcgactcctgcagggcacggaggatctggctgttgaggtagagcgggagcagcgcgtccaggatctgcacggggtcctgctcgaactgcaccacgggggagaagggctgcgtctcgatcttcaccttctcgcgctccacggtgagcttcccctccttggtggtgaggcggaagagctcgtcctcggtggcgtccacgcagacgccgttgacgtcgcagatctcgcccttgggcgacatggggagcagcgtctggatgatggggtcggagcgcaccagcgacacgaacttggagtagagcagctccaccttgtccacctcctcggagacgaagagcgagtagacgaggtcgcagatggcctgcgagtccttgacggtgggcacgctgctcacctctagatcgcgctccaacgggatgtaggggcggcgctggaagtaggcgttgcccttcttccccacgctgacgacggtgtactggaggcccagctgcttgagctcatcgatgcgggtttccgccttcttgagcacgttgttgttgaagctcccgcagaggccgcgctcgccgaggtgggagcacgac

SEQ ID NO: 215629 - DNA, 3591 bp, Zea Mays
attaccgagccgaccgcgaggggagagataagagaggggcagaggagagagaaacccttagtctccagccgcctcgcctgatcgccgcctccgcctgatcgcctccgcgcagcgcgagtagtgaggaagaaagccctagggggttcgtgccgcggacggaggcgccggcgcctgtggaaggccacgagatctcgcggcggcgccgcccgccgggtggtgtgttgggggtgcggcgctggtggtgctcggtgagttcgctcgatcacctcgccgcggagcgtccgctcgaggtgccccgcccctcgaatcgagggttctggtagggggggggggggggggaggggtcgccttctgctccccggtcaccgcggaataagctagcccccctctcctcctgcctcggggggttagggttaggctttttctcccggaattgcgagaggaattccgcggccaaggcggcgcattgctagcgagaggaggagaaggaggagtcagcagcgcggctccgacacggccgccagcaatgatggggaagacgcatatgttctctaagggccacccgctcggcttcgtgcccgactaccggcacagggtggaggcaatgggggagttcaagcggctcgggagccccgtgagggtcgactcggggagctactgcccgccgcccaagaggaagtgcgtcagcgtgaattctgaggagagggaatgcgcctccgggttcagcttgacccgcgtgccccgggaggtgttctcactgcccagtatgactgctctagacaagaaggacgtggagatgaggctccaccatgagcttgcgcaggtgaaggacctccagattagactgttttcaggagggcataatgttgggagcatgaatggtgcgacggtcgcgtcagctcccggaagcgatatgctgcccaagaaaaaagccgagaagctcaggcgaagcaattcagtgcagacggataggggagctccaccacctatggccacagctgtcgccccacctgtttccagctctattaactacacgtcctcgtttaaacaatgtgccaaccttctcaagtcccttatgagccatgtatgggcaagcccgtttcttgttccagttgacattgtgaagttgaacatccctgactactttcaaatagtcaagcagcccatggatttgggtacgatccagaaaaggatgaaggcaggcatgtactctacacctccggaatttgctgcagatgtgaggctcactttcagcaacgctatgaactataacccagctaacaatgatgttcatttaatggccaaaactttgagcaagaactttgagagccgatggaagcttattgagaagaagctccctaaaccagatgagaagcctcctcagccagatgagaagcctcctcaaccagttgagaagcctcctgtgaggaagcccacaaaaaagaattcaactaagagagtttccattgagaaagaagacctcactaagaaaaaaccctcaaagaaaagtgtacctaagcagtacatctttcggggagaagattcagctgacagtccagttctgcaaccaaagaaaaggaaaacctctcctttggtacaagatgctcctttggtaggggatattgttccaaccagaaagagaataatgacgagtgagcaaaaatatgatttaagtgcaagattacagtcatatggtgcattcattccagatcatgtagttgagctcataaggagtcacgctgactattgcgacgccaacgaagaggaattagagcttgatatggatgctctaggtgatgatacactttttgaattactgaggctacttgatgactatgacagagttaacccatcaagaaaccttacagaacaggatcctcatgaggttaagtctcgaagtcaatatgaactcatcaatgcgtcagtgtgtaacgaggaagtaaatgagctctttgacgaggacgttgatattggggagaatgaccctccagttttgacttttcctcctttggtacttgaagatgaaacagcagacagaagccgcaaacatagtgcatctagcagttctagtagtgactcagaatcatcctctagtggttctagtagctcttctggaagtgatacagatgccaaagctgctcaacaaaacagcgtgtcaaaggaaaaaattctacctgtggatggcctgggtcatgaaaaggattcactggacacattaaatttaccagagcaaagtacagaccctgtctctgtttctgcttatggtgagggggggtatgtatctgagaaggtctcccctgagaagcaaatccgagctgcccttctgagaagccgctttgctgatacgattctgaaggctcgcgaaaaggctcttgatcagactaccaaaaaggatcctgagaagcttcgacgcgagagggaggaacttgagaggttacaaagacaagagagagctcggttgcaagctgaggctaaagctgcagaggatgcctgcaagagggctgaagaagcagcagctgctgaggctgctgcagaagctaaacgacaaagagatattgagagagaagcagctcggaaagctttgcaagagatggagagaactgttgacatcaacggagggagtcactttctgaaagaccttgaaatgcttagaggtatcacatgcgaagagatgcccaacttggttggtgaagggagccctgggtttcaactgggaagcagcaacgccctagcaaagctcgggctgtacatgaaagatgacgaagatgacgaggagggcgatttggcagatgcaccagtggtggttgatatcgaagagggagaaatagattaagcgtgcttcttctggaccattttttatacgcgacaggagacctgtgggcatcactgatctgcatagcttttctttggcatacaaagcgacctgacgaaaagatcgcctcgcaccagacctggaggtctggtattcgtttttgtaactgcccaagttttggagccaagtcactaggttcgtcgagcttatcgtttggattgagaatctctggacttctgatatccactttcgataaggacttgttcggttaagaggtgatcgaaggagattggagaggggattggagaggattaaatccctttctagtcaattgaacagaggtagcaactgaataagccctaaaatggaatggcgagtttactgcatatatgatgaggccataaaagcggatgaaaagggaggagaaggcacaaggagtgatatatatgatgaggccataaattcggatgaaatgggagaagagatggggtagtggggagaaggcacaaggagtgatggtgatggctcttgagctggtgccagccgtttttgaggggtagttttagagccatttccgtgtcgtgaatgtaatatcggaaactgtacaaaagttagctagttagacgatggaaatcattctttccttcaatttatgcagtgcctgttcttatgagacgttgcacatttctcgtattgctatgggatcctgttgcgtagtagtattgttttggcacagaaattttggtatgtagcttgtcatgtatgtgcaagagtacaag

SEQ ID NO: 215630 - DNA, 3585 bp, Zea Mays
attaccgagccgaccgcgaggggagagataagagaggggcagaggagagagaaacccttagtctccagccgcctcgcctgatcgccgcctccgcctgatcgcctccgcgcagcgcgagtagtgaggaagaaagccctagggggttcgtgccgcggacggaggcgccggcgcctgtggaaggccacgagatctcgcggcggcgccgcccgccgggtggtgtgttgggggtgcggcgctggtggtgctcggtgagttcgctcgatcacctcgccgcggagcgtccgctcgaggtgccccgcccctcgaatcgagggttctggtagggggggggggggggggaggggtcgccttctgctccccggtcaccgcggaataagctagcccccctctcctcctgcctcggggggttagggttaggctttttctcccggaattgcgagaggaattccgcggccaaggcggcgcattgctagcgagaggaggagaaggaggagtcagcagcgcggctccgacacggccgccagcaatgatggggaagacgcatatgttctctaagggccacccgctcggcttcgtgcccgactaccggcacagggtggaggcaatgggggagttcaagcggctcgggagccccgtgagggtcgactcggggagctactgcccgccgcccaagaggaagtgcgtcagcgtgaattctgaggagagggaatgcgcctccgggttcagcttgacccgcgtgccccgggaggtgttctcactgcccagtatgactgctctagacaagaaggacgtggagatgaggctccaccatgagcttgcgcaggtgaaggacctccagattagactgttttcaggagggcataatgttgggagcatgaatggtgcgacggtcgcgtcagctcccggaagcgatatgctgcccaagaaaaaagccgagaagctcaggcgaagcaattcagtgcagacggataggggagctccaccacctatggccacagctgtcgccccacctgtttccagctctattaactacacgtcctcgtttaaacaatgtgccaaccttctcaagtcccttatgagccatgtatgggcaagcccgtttcttgttccagttgacattgtgaagttgaacatccctgactactttcaaatagtcaagcagcccatggatttgggtacgatccagaaaaggatgaaggcaggcatgtactctacacctccggaatttgctgcagatgtgaggctcactttcagcaacgctatgaactataacccagctaacaatgatgttcatttaatggccaaaactttgagcaagaactttgagagccgatggaagcttattgagaagaagctccctaaaccagatgagaagcctcctcagccagatgagaagcctcctcaaccagttgagaagcctcctgtgaggaagcccacaaaaaagaattcaactaagagagtttccattgagaaagaagacctcactaagaaaaaaccctcaaagaaaagtgtacctaagcagtacatctttcggggagaagattcagctgacagtccagttctgcaaccaaagaaaaggaaaacctctcctttggtacaagatgctcctttggtaggggatattgttccaaccagaaagagaataatgacgagtgagcaaaaatatgatttaagtgcaagattacagtcatatggtgcattcattccagatcatgtagttgagctcataaggagtcacgctgactattgcgacgccaacgaagaggaattagagcttgatatggatgctctaggtgatgatacactttttgaattactgaggctacttgatgactatgacagagttaacccatcaagaaaccttacagaacaggatcctcatgaggttaagtctcgaagtcaatatgaactcatcaatgcgtcagtgtgtaacgaggaagtaaatgagctctttgacgaggacgttgatattggggagaatgaccctccagttttgacttttcctcctttggtacttgaagatgaaacagcagacagaagccgcaaacatagtgcatctagcagttctagtagtgactcagaatcatcctctagtggttctagtagctcttctggaagtgatacagatgccaaagctgctcaacaaaacagcgtgtcaaaggaaaaaattctacctgtggatggcctgggtcatgaaaaggattcactggacacattaaatttaccagagcaaagtacagaccctgtctctgtttctgcttatggggggtatgtatctgagaaggtctcccctgagaagcaaatccgagctgcccttctgagaagccgctttgctgatacgattctgaaggctcgcgaaaaggctcttgatcagactaccaaaaaggatcctgagaagcttcgacgcgagagggaggaacttgagaggttacaaagacaagagagagctcggttgcaagctgaggctaaagctgcagaggatgcctgcaagagggctgaagaagcagcagctgctgaggctgctgcagaagctaaacgacaaagagatattgagagagaagcagctcggaaagctttgcaagagatggagagaactgttgacatcaacggagggagtcactttctgaaagaccttgaaatgcttagaggtatcacatgcgaagagatgcccaacttggttggtgaagggagccctgggtttcaactgggaagcagcaacgccctagcaaagctcgggctgtacatgaaagatgacgaagatgacgaggagggcgatttggcagatgcaccagtggtggttgatatcgaagagggagaaatagattaagcgtgcttcttctggaccattttttatacgcgacaggagacctgtgggcatcactgatctgcatagcttttctttggcatacaaagcgacctgacgaaaagatcgcctcgcaccagacctggaggtctggtattcgtttttgtaactgcccaagttttggagccaagtcactaggttcgtcgagcttatcgtttggattgagaatctctggacttctgatatccactttcgataaggacttgttcggttaagaggtgatcgaaggagattggagaggggattggagaggattaaatccctttctagtcaattgaacagaggtagcaactgaataagccctaaaatggaatggcgagtttactgcatatatgatgaggccataaaagcggatgaaaagggaggagaaggcacaaggagtgatatatatgatgaggccataaattcggatgaaatgggagaagagatggggtagtggggagaaggcacaaggagtgatggtgatggctcttgagctggtgccagccgtttttgaggggtagttttagagccatttccgtgtcgtgaatgtaatatcggaaactgtacaaaagttagctagttagacgatggaaatcattctttccttcaatttatgcagtgcctgttcttatgagacgttgcacatttctcgtattgctatgggatcctgttgcgtagtagtattgttttggcacagaaattttggtatgtagcttgtcatgtatgtgcaagagtacaag

SEQ ID NO: 215631 - DNA, 801 bp, Zea Mays
ccttttattaggttcctgaatataggaatgtaacatttgtgaaatcccatatttccgggaggtgattgttatggcaacaacatgtgacatgtgtggttatcgcaattcagagctgaagcctgggggtgaaattccagctaagggaaagaaaattacactgcgtgttcaaaatgcacaagaccttactcgtgatgtcataaagtcagattcagctagcgtaaaagtacctgaacttgagttggaactttcatgtggaacgttgggtggtatggtcacaactgttgaaggtttaattgtgaaaatatgtgaggctctggagagaatacatggatttcaattaggcgatagtacactggaatggaaaaagaagaaatgggatgacttcaaggagagactatccaagcttctgagtttacaagaagcctggactctaataattgatgatggattggcggcttcatttgtggccccggctactgattcgttagaagatgacagccaactaaccattgaagagtatcagaggagttgggagcagaacgaggaacttggtctgaatgacatggatacgtcctctgcagacgcggcttacaacacgaccaacacataatttttttagttttgttgtgccgaatgtatttgttacgctatcagtttactttgatgaactttcagtgtgtatactaatatcaacaacttatatttcctctgacgataaacatcgagcgaacgtgcgaggcgcaaacccgatttgctgtcacccgtgcaggtccatgaattgccaacgttggttcggaggca

SEQ ID NO: 215632 - DNA, 1980 bp, Zea Mays
cttatcagttcagctgccaatcagaagctgcttttcatctgcttctcagataagtgttgaatgctgatttgttgtggctgattaatcgggttgatcgtcgattaatcgtgattagtcggctgatcgcccttctggcgatcagaaacgataaggcaatctgaaaacattggccgccaaacctccagagcgactcccgcgagccgtgaccaccatagctaaatcaacgcaccagaagctttcacggagctgtctcgtccacgagtgttccagctgactcctattccctgcgtcaatggcgagctctggcaatgaagggcgtgtggtggtggaccttggctccgcggcggagtcggtggctgctgacgaggaggcgcacgccacgcctctccacgagattgagtccctttgcatgcgctgcggcgagaacggcatcacgaggcttttgctgacgttgatcccgcacttccgggaggtggttctgatggccttcgagtgcccacattgtggtgagaggaacaacgagattcagtttgctggacaactccaacccaagggatgctgctacagcttggaggttccgttggggcagagtgagatgctgaatcgtcaggtcgtgaagtctgattcagcgactatcaagattccagagctcgactttgagatccctccagaagctcaacgtggaacactttctactgtggaagggattattatgcgagctgtggatgagctgcaggctcttcaagatgaacggaagaaagtggatcctcagaaggccgaagctatcgatcaatttttactgaagttgagatctcttgggtcaggagaggctgcattcacttttattcttgatgatcctgcaggaaacagctttattgagaatccgcatgctccgttattagatcctttactatctgtgagattctacgaaagaactcgtgaacaacaagcagcacttggctttcttgctgaaccaccaaaagaacaacctggagaggctgtattgcctgcttcagcagtggaatccaattctgatgggttgcaaagcgtgccccatggctcagttggagctgttgcaggtcgtcgtgctatagctcagggaaaccctgatgaagttgctgcagcattgtgtagatattcagcaccagaagaggttgatactttaccatcaacatgtggagcctgtggaacagaatgcgtcacacgtttctttgctacaaaaatcccatatttccgggaggtgattgttatggcaacaacatgtgacatgtgtggttatcgcaattcagagctgaagcctgggggtgaaattccagctaagggaaagaaaattacactgcgtgttcaaaatgcacaagaccttactcgtgatgtcataaagtcagattcagctagcgtaaaagtacctgaacttgagttggaactttcatgtggaacgttgggtggtatggtcacaactgttgaaggtttaattgtgaaaatatgtgaggctctggagagaatacatggatttcaattaggcgatagtacactggaatggaaaaagaagaaatgggatgacttcaaggagagactatccaagcttctgagtttacaagaagcctggactctaataattgatgatggattggcggcttcatttgtggccccggctactgattcgttagaagatgacagccaactaaccattgaagagtatcagaggagttgggagcagaacgaggaacttggtctgaatgacatggatacgtcctctgcagacgcggcttacaacacgaccaacacataatttttttagttttgttgtgccgaatgtatttgttacgctatcagtttactttgatgaactttcagtgtgtatactaatatcaacaacttatatttcctctgacgataaacatcgagcgaacgtgcgaggcgcaaacccgatttgctgtcacccgtgcaggtccatgaattgccaacgttggttcggaggca

SEQ ID NO: 215633 - DNA, 2074 bp, Zea Mays
aacagcaaagcccaggctgcccagcacacgcgacgcgaaccagctggcgaggaaccctagcggagcactgtgcaggcgaccgcggcgcgctatcacttacggggggatacggcggcatcgtccccctcggcccctcctccatccctggtgttgaatgctgatttgttgtggctgattaatcgggttgatcgtcgattaatcgtgattagtcggctgatcgcccttctggcgatcagaaacgataaggcaatctgaaaacattggccgccaaacctccagagcgactcccgcgagccgtgaccaccatagctaaatcaacgcaccagaagctttcacggagctgtctcgtccacgagtgttccagctgactcctattccctgcgtcaatggcgagctctggcaatgaagggcgtgtggtggtggaccttggctccgcggcggagtcggtggctgctgacgaggaggcgcacgccacgcctctccacgagattgagtccctttgcatgcgctgcggcgagaacggcatcacgaggcttttgctgacgttgatcccgcacttccgggaggtggttctgatggccttcgagtgcccacattgtggtgagaggaacaacgagattcagtttgctggacaactccaacccaagggatgctgctacagcttggaggttccgttggggcagagtgagatgctgaatcgtcaggtcgtgaagtctgattcagcgactatcaagattccagagctcgactttgagatccctccagaagctcaacgtggaacactttctactgtggaagggattattatgcgagctgtggatgagctgcaggctcttcaagatgaacggaagaaagtggatcctcagaaggccgaagctatcgatcaatttttactgaagttgagatctcttgggtcaggagaggctgcattcacttttattcttgatgatcctgcaggaaacagctttattgagaatccgcatgctccgttattagatcctttactatctgtgagattctacgaaagaactcgtgaacaacaagcagcacttggctttcttgctgaaccaccaaaagaacaacctggagaggctgtattgcctgcttcagcagtggaatccaattctgatgggttgcaaagcgtgccccatggctcagttggagctgttgcaggtcgtcgtgctatagctcagggaaaccctgatgaagttgctgcagcattgtgtagatattcagcaccagaagaggttgatactttaccatcaacatgtggagcctgtggaacagaatgcgtcacacgtttctttgctacaaaaatcccatatttccgggaggtgattgttatggcaacaacatgtgacatgtgtggttatcgcaattcagagctgaagcctgggggtgaaattccagctaagggaaagaaaattacactgcgtgttcaaaatgcacaagaccttactcgtgatgtcataaagtcagattcagctagcgtaaaagtacctgaacttgagttggaactttcatgtggaacgttgggtggtatggtcacaactgttgaaggtttaattgtgaaaatatgtgaggctctggagagaatacatggatttcaattaggcgatagtacactggaatggaaaaagaagaaatgggatgacttcaaggagagactatccaagcttctgagtttacaagaagcctggactctaataattgatgatggattggcggcttcatttgtggccccggctactgattcgttagaagatgacagccaactaaccattgaagagtatcagaggagttgggagcagaacgaggaacttggtctgaatgacatggatacgtcctctgcagacgcggcttacaacacgaccaacacataatttttttagttttgttgtgccgaatgtatttgttacgctatcagtttactttgatgaactttcagtgtgtatactaatatcaacaacttatatttcctctgacgataaacatcgagcgaacgtgcgaggcgcaaacccgatttgctgtcacccgtgcaggtccatgaattgccaacgttggttcggaggca

SEQ ID NO: 215634 - DNA, 1335 bp, Zea Mays
caccggtctcaatcagccccagctttcaaatttggaagtttcctcttagaattcggtcaacgcgcccggttcccctttcgagttcgaggtcatcagtttgaggtttcaacctatttcaccagagctgattggactcatggatgggaacaaagatgaggcattgagatctgtcaagcttgcaaaatctgcatttgcatctggggataggcagcgcgcagaaaaattaattaaaattgctcaaagattggaccctggtcttccacttgatgatttgctgagcccagttgagaaggttggcatcctgaatatttctacttgcaaagacaagactgaaagaggacaagctcttttatacccaaaaacaacaaaagaatctgttggtcctttaaatgttgataaggcttacactgaggagaatattagagtggttcaggatatcaggaaaaagaaggattactatgcagttctcggagtagagagaagatgcactgtggaggaaattaggaaggcatacaggaggttatcactgaaggttcatcctgacaagaacaaggttcctggggcagaagatgctttcaagatggtaagcaaggctttcaagtgcctaagcaatgatcagtcgcggaggacttatgatcagacaggcaccactgaggaccatgaattcaatgagcaatatcccaatgtcatgaggcggggagctgctaggcggagaaggccagcaagaagtggcttctataactatgaagaagattttgatccagatgagatattcaggtccttttatggcacccatgataatatgttccatccccagtatacctacagggctaggggaacaggcaggcaacagcaacagagaagggagcattcagtggagggtggttccagcataaatctaacagtgtttattcaccttgtagtagtactgtttattgtttcgcttgcatttattccagcgcgtcaagctgagtattcgctgcaacagacaaattacttccccatttcaaaggtcactcaaaaacaaggagtggagtacttcgtcagcaaacaagattttgatcagcagtttccacagggtagtcagtctagagagaatcttgaacggcatgttctgatggactataagagtatgcttggaagatattgccatgtggaactccaacgtcgtcaatgggccaaggactaccctacacctcgctgtgacaagctaagggagctgtctgtggcgcagaatgtgcatatgccatcagtttgatctcccgttttcatcatggaagaatattgctcatatttgcaggttatgaaaactcctgaaattcgcttcaccctata

SEQ ID NO: 215635 - DNA, 463 bp, Zea Mays
atggcggagcaggatggcgacgcggggcagaggccacccgactccgttccggtcccgctggaggcggaagcttgcgagaaagggggcagtgatgaggttgtcgttttctttgttcaaatcgtctcaattgctaatggaatggtcaacccagttcgggaacattcctcggtgctaatgaagactcaactagaacccttgcagaaatcgagaagaagattgcaagggctaccgtgttacccagaaatcatggggaggtctcctattcttcagctgaagatcatacttgctgtggagcctttgaccccttcagagggaccaaggattggagagaacattttcggttacacgatagtggacatcttcagtagcagctgccgtggccaccataagaatcctccttcagagccatatgtccttgagattatgttggaagtggaggctgtgtgcaaggcgtgacagcgtg

SEQ ID NO: 215636 - DNA, 527 bp, Zea Mays
tgccaccaacgctgcaactttctgttgttccatcaggattaccaatgctagaatctgtatggattctatcagctgttcgcctactgatgcttatgtgccaatttagtgagactggagtcatacactccatacaaatctttcaggtggttggcaatgcagtgatgctcggtgaaatcataaactacgtgcagtccctacaacgacaagttgagtttatgtccatgaaactggccaccgtgaatccccaggtggacttaaatagcctgcctaacgtcctccctaaagattcttgtggtccgccacatttctcgctggagacctcaggcgcttcgttgtcgtacctcagccagcctcaccatggaagccctcttggctgcatggacaaccagagttgtatgcatccacttgacacgacgttttgcctggcgataaatctgcagtatcatttcctcaacggtgttagcgatgcatcgtctcagacctccatggaatccaaggaagaacattacccaagcatgaccaactaa

SEQ ID NO: 215637 - DNA, 551 bp, Zea Mays
aatgagccgctaatgtggaaaactaggagttagattgaccgattggttgggagtttggaggattaccaatgctagaatctgtatggattctatcagctgttcgcctactgatgcttatgtgccaatttagtgagactggagtcatacactccatacaaatctttcaggtggttggcaatgcagtgatgctcggtgaaatcataaactacgtgcagtccctacaacgacaagttgagtttatgtccatgaaactggccaccgtgaatccccaggtggacttaaatagcctgcctaacgtcctccctaaagattcttgtggtccgccacatttctcgctggagacctcaggcgcttcgttgtcgtacctcagccagcctcaccatggaagccctcttggctgcatggacaaccagagttgtatgcatccacttgacacgacgttttgcctggcgataaatctgcagtatcatttcctcaacggtgttagcgatgcatcgtctcagacctccatggaatccaaggaagaacattacccaagcatgaccaactaa

SEQ ID NO: 215638 - DNA, 1458 bp, Zea Mays
cgatggtgctgccatcgacggtgcagactctctgcacagccacgccgatgagctctcctctgtcgtcgtggacatgcttcacgatccccttgccatatgattcacggttcctcgcctcgcgactgcaacaagtcgtggtggtggctggtgtgctctaggtgctcgacgaaaggtcgcgcagcaaagtagcaaactcctgcgaccctacccaccgcacctaccattctggagaggagaggaacagagccaagaaacaagcccggaagatggcaggcggcggagtggtgaagcacatcctgctggcaagcttcaaggaggaggtgacgcaggagcgcctggacgagctcatccgaggatacgccgcgctcgtcggcgtggtcccctccatgaaggcgttccactggggaactgatgtgagcatagaaaacatgcatcaagggttcacgcacgtcttcgagtccacgtttgaaagcacggaaggaatcaaggagtacattgagcaccctgcacacgtcgaattcgcaagtgtgttcttgcctgtgctggagaaggtcctcataatcgactacaaaccgacgtcggccaattagcggtagaacatgctctgtactggttcctcggaggatccagtttgattctactctttattttgctaaataaactcggtctgctttgtcccttgttaagaatgagctttgagttttctgtagtgcaattgttgtagcttcgcatgttttcatatgggaattacgttcctaaagaccgtatttgccacttggaagcagcaaactgcttgaacttcttggagattggacgctggtttgtttcttggttcggaaagaggaagtaggtggatggcgtgagactgctctagttattttttttgtcggattatttactcgttaatatagctcccatcctaaaatataattcgttttagattagacatatatttattaattagtatatgattgtagtttgtatgtatatctatattcactattattcgttcgaatgtggagtgaaaaaatgctagaaaaaactatatttcaagggttagtttggaaactcattttttccaagtgatttctgttttcctaagaaaaaataaactatttctccttaaaaatggaaataccttaagaaaacaaggttttcaaactagccctaagaaaaacagagttcccaaacttcccaaactatggaggaagtgtaaccgtggtttttttgggtttacttgtaaatactgtcgttcttcgttattgtattatgtggggaaaatatcctatgcaatcacttatcctggtgcaagcatgcaatcaagcgatctggtgcatccgatctagatctaatgatgactgttattttatatttaaccccttccacctaaaacatagtacctattttacttttaaccccttccatatgaaaccgttggatctagattggatgctctgg

SEQ ID NO: 215639 - DNA, 848 bp, Zea Mays
gtccgaccccggtgagctctctcgccgcgcgcacatctcgccgagtgtaaccgctttcctcgtatggcccgtgcctcgcaggtcgctcggactcggaggccggcgagccgctcgttctgggcgccgggatgctgctcgtccatctccgcgcggcggaccggtgggagcgcgtggccgcggtgctgcccgggaggacggtggccgacgtcacggcgcactacgacgacctggaggtcgctgtcggctccatcgaggccggcttcgtgcccttccccgctacggcggctgcggcggtggcgcgtcgcagtgggccgccgggttcacgttcgagtgggacggcgacgccggcgggacgggctttaagcgctcctgccacgtggttggcggcggcaagcgcgagcgcgggccagaccacgagcgcaagaagggcatcccctggacgaaggaggagcacaagcataattgctgactcaagcctgtcgaatcatcatgaggattcccttggctctggtttaccctccatatctactggtaaaccttttgatagtgacgaggtaccaccaggagtgacattgactgcccagtttccgtaccatttggccaataaggtcattggaaagctgatgatggatatgtcaagtctatatgatgttggtcgcaataagagatctgctggtctactgatcgtagatcatatagttgatctcctaactccttgcttccatggtgactcatttcttgataggatgctatccttgttgccacacaaggaaaatatgcgatccaattctgcagcgaaaaatccacaaactccaagtaagcattctcaaggcaccattaaacgttcc

SEQ ID NO: 215640 - DNA, 2723 bp, Zea Mays
gaatggatgaagacgttctagatatagagaagtagttttggtgtaatatagtaaaatgtgatagaaagtatatataggataaaaaaaatatgaggaaaatgattggagataagtctctgcccacccaagatcctgaaacgacactcgacacctgcccccagtcgcttgccagaacgccaagcacagccccagcactagacgtgcacacaggagcttgcgctcagctctgctcgccgatccaccataccaaaagcgctctccttcgtctccaaccccaccctccctcacaccctcaccagtcacctccacaaacgagagaataaaggtgaaaggacccctcggattcacaacgaaggcagagcaggaaaggaatttcggaagggacgggtacagcccgcagcgccaccacaagggagcacctggaccaggagcctccaagcgcaagcaaccaagcgcagcgcagagcacaacccgacgcccagcacaaccagcagccagggcagcataaagcaatgcagccgggaggcgcggcttccagtaccgccaccggtggacggaggcgcgtgtcggtgcagtccaccaggagcgccggcgccacaccggcgtcgtcggtgtgggaggcgcggatgaagatggacgaggtcaggggcggcgtcaaggtcttcagcgccggcgccgccgacgagccggcggacgaggagggcgtgcgggtctaccgccgcctgcgccgcaaccagagcgagggcggcggcgccggtgccgcggacaccgccgccaagaagaggcgcagctggaaggcttccaagccggtcaccgcgatcggggacctccgcaagtcgcgctccgacgccgccgccgccgtgacgacggccaccaccaccgccactgcggtggttgctaggcgggccgtggcgcgggtatccatgcccgagaagaaggtggcgccggcgccagcggccgccgccggcgaggtcaaggaggtggtggtcgtggaagtgcacaaggctgcggcggcagacgcgaagaacgtggcgcgaggaccagatgaggagttggacgacgacgacgacgaccacgacgacggcgcggagggtgaattgttggacgaggagcaggagacagacgaggaggaagaaaaagagatgctggatctgcaggatcacatggccattgacgacgacgagcaaactgctccgcaccaagtggacgacgacgacgagcaagatcttgagccaccgacaaaagcagggattaagcccacgctgtcggtggaagaagagagagcgaccaacccagagccggtgaagccgccgcctccagggaagaaactagcctcggtggtcgatctccgagcggtcaatccggaacccatgacccctgctcctccgccagtcgagaagaaggcgacaccgatagtggttcaccgcatgaccaacttcgagctggcacaatcttttccagagaagaaagctttgccggcggtgggtccccggattccgaagacagagcctgccagcagtcctcctggtggtgaggagtatgaggagatccaaggaagaccatctcaaccgagcagaagtcaagcgagaatgcagaacattgtgaatctggtgatgtggaccgacgtgtcaaaatccgcgctggtgttcggactagggactttcttgctcgtctcctcctcctacgccaaagacctaaacttcaacacgatcacggcggcgtcgtatgcaggcctgatctacctcggtctacgcttcctgcgcaagtccatactgagcaggggtgaaagtgtggagtgcgacgatgatggaggcgtcggcggcgataggtgctgctacctggtcggggaggaggatgccgtgtggctgctgaggctggtgctgccgtacgtcaacgaggtgctgctaaacctgaggtctctcttctccggcgagcctgcgaccaccatgaagctggcgctgatactgttcgcgatggcccggtgcggcaactttgtcaccctctggacgctggccaaactggtgttctttggggtcttcatcatccccaaggtgtgctcctcttactccacgcagctggcacgatacggcaggttctggctggagaggctgagggacgcctgggagtcgtgcacccacaagaaggccgtggtggcggccgccttcacgctggtctggaacgtctcgtccacggcgtcgcgcgtctgggcggtgttcatgctggcggtggccgtcaagtgctaccaccagcgcgtcggggagttcggctggagcagcagcagcgcgggggcgcaggaacagccagcggacgacgacgacgagccgccgccgccgccgccgaagcacagggcccaggacgagtcgtcgtcgccgcggcaggagttcggggcgccgccgcggcacaggcgggcgccggtctccggcgagttcgcccgcgagaggctcagggctcggggcggcatccagcctcggtgacggttggggttgcatttagaggctgcatgaggctttgatctgttgcggtcctgctcctgcgatcggcaggcaataacgagggatcccatacacgcagacgcagtgtgttcgcgctaaacgcctcgaccaaaccactcgagcccactgctaatgagccacgaatggagttggttggggggatggttcgttctagtggttcgttgaaacaatagagtggttctgctttcgtatttggttcatagacaggac

SEQ ID NO: 215641 - DNA, 2793 bp, Zea Mays
gaatggatgaagacgttctagatatagagaagtagttttggtgtaatatagtaaaatgtgatagaaagtatatataggataaaaaaaatatgaggaaaatgattggagataagtctctgcccacccaagatcctgaaacgacactcgacacctgcccccagtcgcttgccagaacgccaagcacagccccagcactagacgtgcacacaggagcttgcgctcagctctgctcgccgatccaccataccaaaagcgctctccttcgtctccaaccccaccctccctcacaccctcaccagtcacctccacaaacgagagaataaaggtgaaaggacccctcggattcacaacggtaaagcctgcggcaccctgctccttacagcccactcaccactctcgctccaactccgagtttgagtgcagcagaaggcagagcaggaaaggaatttcggaagggacgggtacagcccgcagcgccaccacaagggagcacctggaccaggagcctccaagcgcaagcaaccaagcgcagcgcagagcacaacccgacgcccagcacaaccagcagccagggcagcataaagcaatgcagccgggaggcgcggcttccagtaccgccaccggtggacggaggcgcgtgtcggtgcagtccaccaggagcgccggcgccacaccggcgtcgtcggtgtgggaggcgcggatgaagatggacgaggtcaggggcggcgtcaaggtcttcagcgccggcgccgccgacgagccggcggacgaggagggcgtgcgggtctaccgccgcctgcgccgcaaccagagcgagggcggcggcgccggtgccgcggacaccgccgccaagaagaggcgcagctggaaggcttccaagccggtcaccgcgatcggggacctccgcaagtcgcgctccgacgccgccgccgccgtgacgacggccaccaccaccgccactgcggtggttgctaggcgggccgtggcgcgggtatccatgcccgagaagaaggtggcgccggcgccagcggccgccgccggcgaggtcaaggaggtggtggtcgtggaagtgcacaaggctgcggcggcagacgcgaagaacgtggcgcgaggaccagatgaggagttggacgacgacgacgacgaccacgacgacggcgcggagggtgaattgttggacgaggagcaggagacagacgaggaggaagaaaaagagatgctggatctgcaggatcacatggccattgacgacgacgagcaaactgctccgcaccaagtggacgacgacgacgagcaagatcttgagccaccgacaaaagcagggattaagcccacgctgtcggtggaagaagagagagcgaccaacccagagccggtgaagccgccgcctccagggaagaaactagcctcggtggtcgatctccgagcggtcaatccggaacccatgacccctgctcctccgccagtcgagaagaaggcgacaccgatagtggttcaccgcatgaccaacttcgagctggcacaatcttttccagagaagaaagctttgccggcggtgggtccccggattccgaagacagagcctgccagcagtcctcctggtggtgaggagtatgaggagatccaaggaagaccatctcaaccgagcagaagtcaagcgagaatgcagaacattgtgaatctggtgatgtggaccgacgtgtcaaaatccgcgctggtgttcggactagggactttcttgctcgtctcctcctcctacgccaaagacctaaacttcaacacgatcacggcggcgtcgtatgcaggcctgatctacctcggtctacgcttcctgcgcaagtccatactgagcaggggtgaaagtgtggagtgcgacgatgatggaggcgtcggcggcgataggtgctgctacctggtcggggaggaggatgccgtgtggctgctgaggctggtgctgccgtacgtcaacgaggtgctgctaaacctgaggtctctcttctccggcgagcctgcgaccaccatgaagctggcgctgatactgttcgcgatggcccggtgcggcaactttgtcaccctctggacgctggccaaactggtgttctttggggtcttcatcatccccaaggtgtgctcctcttactccacgcagctggcacgatacggttctggctggagaggctgagggacgcctgggagtcgtgcacccacaagaaggccgtggtggcggccgccttcacgctggtctggaacgtctcgtccacggcgtcgcgcgtctgggcggtgttcatgctggcggtggccgtcaagtgctaccaccagcgcgtcggggagttcggctggagcagcagcagcgcgggggcgcaggaacagccagcggacgacgacgacgagccgccgccgccgccgccgaagcacagggcccaggacgagtcgtcgtcgccgcggcaggagttcggggcgccgccgcggcacaggcgggcgccggtctccggcgagttcgcccgcgagaggctcagggctcggggcggcatccagcctcggtgacggttggggttgcatttagaggctgcatgaggctttgatctgttgcggtcctgctcctgcgatcggcaggcaataacgagggatcccatacacgcagacgcagtgtgttcgcgctaaacgcctcgaccaaaccactcgagcccactgctaatgagccacgaatggagttggttggggggatggttcgttctagtggttcgttgaaacaatagagtggttctgctttcgtatttggttcatagacaggac

SEQ ID NO: 215642 - DNA, 2723 bp, Zea Mays
gaatggatgaagacgttctagatatagagaagtagttttggtgtaatatagtaaaatgtgatagaaagtatatataggataaaaaaaatatgaggaaaatgattggagataagtctctgcccacccaagatcctgaaacgacactcgacacctgcccccagtcgcttgccagaacgccaagcacagccccagcactagacgtgcacacaggagcttgcgctcagctctgctcgccgatccaccataccaaaagcgctctccttcgtctccaaccccaccctccctcacaccctcaccagtcacctccacaaacgagagaataaaggtgaaaggacccctcggattcacaacgcagaaggcagagcaggaaaggaatttcggaagggacgggtacagcccgcagcgccaccacaagggagcacctggaccaggagcctccaagcgcaagcaaccaagcgcagcgcagagcacaacccgacgcccagcacaaccagcagccagggcagcataaagcaatgcagccgggaggcgcggcttccagtaccgccaccggtggacggaggcgcgtgtcggtgcagtccaccaggagcgccggcgccacaccggcgtcgtcggtgtgggaggcgcggatgaagatggacgaggtcaggggcggcgtcaaggtcttcagcgccggcgccgccgacgagccggcggacgaggagggcgtgcgggtctaccgccgcctgcgccgcaaccagagcgagggcggcggcgccggtgccgcggacaccgccgccaagaagaggcgcagctggaaggcttccaagccggtcaccgcgatcggggacctccgcaagtcgcgctccgacgccgccgccgccgtgacgacggccaccaccaccgccactgcggtggttgctaggcgggccgtggcgcgggtatccatgcccgagaagaaggtggcgccggcgccagcggccgccgccggcgaggtcaaggaggtggtggtcgtggaagtgcacaaggctgcggcggcagacgcgaagaacgtggcgcgaggaccagatgaggagttggacgacgacgacgacgaccacgacgacggcgcggagggtgaattgttggacgaggagcaggagacagacgaggaggaagaaaaagagatgctggatctgcaggatcacatggccattgacgacgacgagcaaactgctccgcaccaagtggacgacgacgacgagcaagatcttgagccaccgacaaaagggattaagcccacgctgtcggtggaagaagagagagcgaccaacccagagccggtgaagccgccgcctccagggaagaaactagcctcggtggtcgatctccgagcggtcaatccggaacccatgacccctgctcctccgccagtcgagaagaaggcgacaccgatagtggttcaccgcatgaccaacttcgagctggcacaatcttttccagagaagaaagctttgccggcggtgggtccccggattccgaagacagagcctgccagcagtcctcctggtggtgaggagtatgaggagatccaaggaagaccatctcaaccgagcagaagtcaagcgagaatgcagaacattgtgaatctggtgatgtggaccgacgtgtcaaaatccgcgctggtgttcggactagggactttcttgctcgtctcctcctcctacgccaaagacctaaacttcaacacgatcacggcggcgtcgtatgcaggcctgatctacctcggtctacgcttcctgcgcaagtccatactgagcaggggtgaaagtgtggagtgcgacgatgatggaggcgtcggcggcgataggtgctgctacctggtcggggaggaggatgccgtgtggctgctgaggctggtgctgccgtacgtcaacgaggtgctgctaaacctgaggtctctcttctccggcgagcctgcgaccaccatgaagctggcgctgatactgttcgcgatggcccggtgcggcaactttgtcaccctctggacgctggccaaactggtgttctttggggtcttcatcatccccaaggtgtgctcctcttactccacgcagctggcacgatacggcaggttctggctggagaggctgagggacgcctgggagtcgtgcacccacaagaaggccgtggtggcggccgccttcacgctggtctggaacgtctcgtccacggcgtcgcgcgtctgggcggtgttcatgctggcggtggccgtcaagtgctaccaccagcgcgtcggggagttcggctggagcagcagcagcgcgggggcgcaggaacagccagcggacgacgacgacgagccgccgccgccgccgccgaagcacagggcccaggacgagtcgtcgtcgccgcggcaggagttcggggcgccgccgcggcacaggcgggcgccggtctccggcgagttcgcccgcgagaggctcagggctcggggcggcatccagcctcggtgacggttggggttgcatttagaggctgcatgaggctttgatctgttgcggtcctgctcctgcgatcggcaggcaataacgagggatcccatacacgcagacgcagtgtgttcgcgctaaacgcctcgaccaaaccactcgagcccactgctaatgagccacgaatggagttggttggggggatggttcgttctagtggttcgttgaaacaatagagtggttctgctttcgtatttggttcatagacaggac

SEQ ID NO: 215643 - DNA, 2720 bp, Zea Mays
gaatggatgaagacgttctagatatagagaagtagttttggtgtaatatagtaaaatgtgatagaaagtatatataggataaaaaaaatatgaggaaaatgattggagataagtctctgcccacccaagatcctgaaacgacactcgacacctgcccccagtcgcttgccagaacgccaagcacagccccagcactagacgtgcacacaggagcttgcgctcagctctgctcgccgatccaccataccaaaagcgctctccttcgtctccaaccccaccctccctcacaccctcaccagtcacctccacaaacgagagaataaaggtgaaaggacccctcggattcacaacgaaggcagagcaggaaaggaatttcggaagggacgggtacagcccgcagcgccaccacaagggagcacctggaccaggagcctccaagcgcaagcaaccaagcgcagcgcagagcacaacccgacgcccagcacaaccagcagccagggcagcataaagcaatgcagccgggaggcgcggcttccagtaccgccaccggtggacggaggcgcgtgtcggtgcagtccaccaggagcgccggcgccacaccggcgtcgtcggtgtgggaggcgcggatgaagatggacgaggtcaggggcggcgtcaaggtcttcagcgccggcgccgccgacgagccggcggacgaggagggcgtgcgggtctaccgccgcctgcgccgcaaccagagcgagggcggcggcgccggtgccgcggacaccgccgccaagaagaggcgcagctggaaggcttccaagccggtcaccgcgatcggggacctccgcaagtcgcgctccgacgccgccgccgccgtgacgacggccaccaccaccgccactgcggtggttgctaggcgggccgtggcgcgggtatccatgcccgagaagaaggtggcgccggcgccagcggccgccgccggcgaggtcaaggaggtggtggtcgtggaagtgcacaaggctgcggcggcagacgcgaagaacgtggcgcgaggaccagatgaggagttggacgacgacgacgacgaccacgacgacggcgcggagggtgaattgttggacgaggagcaggagacagacgaggaggaagaaaaagagatgctggatctgcaggatcacatggccattgacgacgacgagcaaactgctccgcaccaagtggacgacgacgacgagcaagatcttgagccaccgacaaaagggattaagcccacgctgtcggtggaagaagagagagcgaccaacccagagccggtgaagccgccgcctccagggaagaaactagcctcggtggtcgatctccgagcggtcaatccggaacccatgacccctgctcctccgccagtcgagaagaaggcgacaccgatagtggttcaccgcatgaccaacttcgagctggcacaatcttttccagagaagaaagctttgccggcggtgggtccccggattccgaagacagagcctgccagcagtcctcctggtggtgaggagtatgaggagatccaaggaagaccatctcaaccgagcagaagtcaagcgagaatgcagaacattgtgaatctggtgatgtggaccgacgtgtcaaaatccgcgctggtgttcggactagggactttcttgctcgtctcctcctcctacgccaaagacctaaacttcaacacgatcacggcggcgtcgtatgcaggcctgatctacctcggtctacgcttcctgcgcaagtccatactgagcaggggtgaaagtgtggagtgcgacgatgatggaggcgtcggcggcgataggtgctgctacctggtcggggaggaggatgccgtgtggctgctgaggctggtgctgccgtacgtcaacgaggtgctgctaaacctgaggtctctcttctccggcgagcctgcgaccaccatgaagctggcgctgatactgttcgcgatggcccggtgcggcaactttgtcaccctctggacgctggccaaactggtgttctttggggtcttcatcatccccaaggtgtgctcctcttactccacgcagctggcacgatacggcaggttctggctggagaggctgagggacgcctgggagtcgtgcacccacaagaaggccgtggtggcggccgccttcacgctggtctggaacgtctcgtccacggcgtcgcgcgtctgggcggtgttcatgctggcggtggccgtcaagtgctaccaccagcgcgtcggggagttcggctggagcagcagcagcgcgggggcgcaggaacagccagcggacgacgacgacgagccgccgccgccgccgccgaagcacagggcccaggacgagtcgtcgtcgccgcggcaggagttcggggcgccgccgcggcacaggcgggcgccggtctccggcgagttcgcccgcgagaggctcagggctcggggcggcatccagcctcggtgacggttggggttgcatttagaggctgcatgaggctttgatctgttgcggtcctgctcctgcgatcggcaggcaataacgagggatcccatacacgcagacgcagtgtgttcgcgctaaacgcctcgaccaaaccactcgagcccactgctaatgagccacgaatggagttggttggggggatggttcgttctagtggttcgttgaaacaatagagtggttctgctttcgtatttggttcatagacaggac

SEQ ID NO: 215644 - DNA, 1687 bp, Zea Mays
cgcaattagactgtggtcaatcttccccgctagtccttgttcaccttctccggcggcagcctccaaaccaccctcgcgctctaccactccggtcgtgtagctccccagcaggcaaccaccatcgcgcacccaccggccaccgcgtctacatttgccaatctctgcttgaagcgttctgcccactctttcaaccgagaagttcactattatcctgcgcatgttccctttccccctttcgtcgtggcacgcacgttaggagttcgaccgattgccggaacgtcttccgccgtcttctgcgccatcgaaagagcgatgaggtttgtggtgacgaaagtttgcagcggcggagggaaggcgcgggcgggtgcgctccatatagccggcgccggcattggcattgagacgccggcgctgctgctgtccactcgtaaggggctgccggcattcttgtcctgtgacctccttgcctccttgccactcccggactccctccttctccatgtctgtcctacccattttatagaaggccctccagtgaagacaatatcagctattaggggtttgcacggtatgctgggtttacctgatcacattcttgtagcggcggcaagcgattctattgagagtctgccatcatgtgaagccaccaacaaatttggtgcctcctttgaaactccttcgggtcgtagactggtaaaaccatcagactatatggagttgatttcctgtatgaagcctaatatatgggccagtttggcggatgaggtaccagcttgggtgactgagaaacgaaacaaagtctctgttgacaggacattgcggtggcttgatgcatgtattgctttggatgtggcttctgggactaatagttttggtgtaattgtgggaggatctagcttagaacagcgaaagctatgtgccactgaagtgtcgaagcggaatgtttcaggcttttggattgcaggatttggctttggagagagtattgaagaacgttgcactttgctcaatgccacaacagattgcttgccacgggaaaaacctcggctcgtatctaggcttggtcttccagatacatttaccaacttactatgggtggtttcgcactgatcttccctgttgacatggttgaaagagaaatgcagaatggtgtactcaacactactgatggcgattcaacaaagattaacctgcgtgctacaacatatcggaaggatacgtcacggctagttgatagctgtaattgcttcacatgccaaaatcacacccgtgcgtacctcaatcatttgctcaatgtccatgagatgttggctcaaattcttctggagatacacaatacccatcattatcttcgtttcttccattccatacgggaggcgatcaaggttggagagtttgatcttttccgacaggagttcgttaagaagagacgcacccatttcgctgctgttgtggtctagacgtgaccaagagttcatctggctgtcctcacaagattaacttatcaattaatcagacttgtgtacacctgaatccttactagtcaactttcacgtctatgattgacaagtctgaaaagattcatacattaagtgatagaagttgtgtgctaaacaactgatgcattttcttcattggaaaattaattaccattccttgttacctgatttattcaaacaagttttct

SEQ ID NO: 215645 - DNA, 1649 bp, Zea Mays
caattagactgtggtcaatcttccccgctagtccttgttcaccttctccggcggcagcctccaaaccaccctcgcgctctaccactccggtcgtgtagctccccagcaggcaaccaccatcgcgcacccaccggccaccgcgtctacatttgccaatctctgcttgaagcgttctgcccactctttcaaccgagaagttcactattatcctgcgcatgttccctttccccctttcgtcgtggcacgcacgttaggagttcgaccgattgccggaacgtcttccgccgtcttctgcgccatcgaaagagcgatgaggtttgtggtgacgaaagtttgcagcggcggagggaaggcgcgggcgggtgcgctccatatagccggcgccggcattggcattgagacgccggcgctgctgctgtccactcgtaaggggctgccggcattcttgtcctgtgacctccttgcctccttgccactcccggactccctccttctccatgtctgtcctacccattttatagaaggccctccagtgaagacaatatcagctattaggggtttgcacggtatgctgggtttacctgatcacattcttgtagcggcggcaagcgattctattgagagtctgccatcatgtgaagccaccaacaaatttggtgcctcctttgaaactccttcgggtcgtagactggtaaaaccatcagactatatggagttgatttcctgtatgaagcctaatatatgggccagtttggcggatgaggtaccagcttgggtgactgagaaacgaaacaaagtctctgttgacaggacattgcggtggcttgatgcatgtattgctttggatgtggcttctgggactaatagttttggtgtaattgtgggaggatctagcttagaacagcgaaagctatgtgccactgaagtgtcgaagcggaatgtttcaggcttttggattgcaggatttggctttggagagagtattgaagaacgttgcactttgctcaatgccacaacagattgcttgccacgggaaaaacctcggctcgtatctaggcttggtcttccagaggaggtcttggagggtgtggctgctgagaaatgcagaatggtgtactcaacactactgatggcgattcaacaaagattaacctgcgtgctacaacatatcggaaggatacgtcacggctagttgatagctgtaattgcttcacatgccaaaatcacacccgtgcgtacctcaatcatttgctcaatgtccatgagatgttggctcaaattcttctggagatacacaatacccatcattatcttcgtttcttccattccatacgggaggcgatcaaggttggagagtttgatcttttccgacaggagttcgttaagaagagacgcacccatttcgctgctgttgtggtctagacgtgaccaagagttcatctggctgtcctcacaagattaacttatcaattaatcagacttgtgtacacctgaatccttactagtcaactttcacgtctatgattgacaagtctgaaaagattcatacattaagtgatagaagttgtgtgctaaacaactgatgcattttcttcattggaaaattaattaccattccttgttacctgatttattcaaacaagttttct

SEQ ID NO: 215646 - DNA, 1712 bp, Zea Mays
caattagactgtggtcaatcttccccgctagtccttgttcaccttctccggcggcagcctccaaaccaccctcgcgctctaccactccggtcgtgtagctccccagcaggcaaccaccatcgcgcacccaccggccaccgcgtctacatttgccaatctctgcttgaagcgttctgcccactctttcaaccgagaagttcactattatcctgcgcatgttccctttccccctttcgtcgtggcacgcacgttaggagttcgaccgattgccggaacgtcttccgccgtcttctgcgccatcgaaagagcgatgaggtttgtggtgacgaaagtttgcagcggcggagggaaggcgcgggcgggtgcgctccatatagccggcgccggcattggcattgagacgccggcgctgctgctgtccactcgtaaggggctgccggcattcttgtcctgtgacctccttgcctccttgccactcccggactccctccttctccatgtctgtcctacccattttatagaaggccctccagtgaagacaatatcagctattaggggtttgcacggtatgctgggtttacctgatcacattcttgtagcggcggcaagcgattctattgagagtctgccatcatgtgaagccaccaacaaatttggtgcctcctttgaaactccttcgggtcgtagactggtaaaaccatcagactatatggagttgatttcctgtatgaagcctaatatatgggccagtttggcggatgaggtaccagcttgggtgactgagaaacgaaacaaagtctctgttgacaggacattgcggtggcttgatgcatgtattgctttggatgtggcttctgggactaatagttttggtgtaattgtgggaggatctagcttagaacagcgaaagctatgtgccactgaagtgtcgaagcggaatgtttcaggcttttggattgcaggatttggctttggagagagtattgaagaacgttgcactttgctcaatgccacaacagattgcttgccacgggaaaaacctcggctcgtatctaggcttggtcttccagaggaggtcttggagggtgtggctgctgatacatttaccaacttactatgggtggtttcgcactgatcttccctgttgacatggttgaaagagaaatgcagaatggtgtactcaacactactgatggcgattcaacaaagattaacctgcgtgctacaacatatcggaaggatacgtcacggctagttgatagctgtaattgcttcacatgccaaaatcacacccgtgcgtacctcaatcatttgctcaatgtccatgagatgttggctcaaattcttctggagatacacaatacccatcattatcttcgtttcttccattccatacgggaggcgatcaaggttggagagtttgatcttttccgacaggagttcgttaagaagagacgcacccatttcgctgctgttgtggtctagacgtgaccaagagttcatctggctgtcctcacaagattaacttatcaattaatcagacttgtgtacacctgaatccttactagtcaactttcacgtctatgattgacaagtctgaaaagattcatacattaagtgatagaagttgtgtgctaaacaactgatgcattttcttcattggaaaattaattaccattccttgttacctgatttattcaaacaagttttct

SEQ ID NO: 215647 - DNA, 1671 bp, Zea Mays
caattagactgtggtcaatcttccccgctagtccttgttcaccttctccggcggcagcctccaaaccaccctcgcgctctaccactccggtcgtgtagctccccagcaggcaaccaccatcgcgcacccaccggccaccgcgtctacatttgccaatctctgcttgaagcgttctgcccactctttcaaccgagaagttcactattatcctgcgcatgttccctttccccctttcgtcgtggcacgcacgttaggagttcgaccgattgccggaacgtcttccgccgtcttctgcgccatcgaaagagcgatgaggtttgtggtgacgaaagtttgcagcggcggagggaaggcgcgggcgggtgcgctccatatagccggcgccggcattggcattgagacgccggcgctgctgctgtccactcgtaaggggctgccggcattcttgtcctgtgacctccttgcctccttgccactcccggactccctccttctccatgtctgtcctacccattttatagaaggccctccagtgaagacaatatcagctattaggggtttgcacggtatgctgggtttacctgatcacattcttgtagcggcggcaagcgattctattgagagtctgccatcatgtgaagccaccaacaaatttggtgcctcctttgaaactccttcgggtcgtagactggtaaaaccatcagactatatggagttgatttcctgtatgaagcctaatatatgggccagtttggcggatgaggtaccagcttgggtgactgagaaacgaaacaaagtctctgttgacaggacattgcggtggcttgatgcatgtattgctttggatgtggcttctgggactaatagttttggtgtaattgtgggaggatctagcttagaacagcgaaagctatgtgccactgaagtgtcgaagcggaatgtttcaggcttttggattgcaggatttggctttggagagagtattgaagaacgttgcactttgctcaatgccacaacagattgcttgccacgggaaaaacctcggctcgtatctaggcttggtcttccagaggaggtcttggagggtgtggctgctggtatcgacctttttgactccacagaaatgcagaatggtgtactcaacactactgatggcgattcaacaaagattaacctgcgtgctacaacatatcggaaggatacgtcacggctagttgatagctgtaattgcttcacatgccaaaatcacacccgtgcgtacctcaatcatttgctcaatgtccatgagatgttggctcaaattcttctggagatacacaatacccatcattatcttcgtttcttccattccatacgggaggcgatcaaggttggagagtttgatcttttccgacaggagttcgttaagaagagacgcacccatttcgctgctgttgtggtctagacgtgaccaagagttcatctggctgtcctcacaagattaacttatcaattaatcagacttgtgtacacctgaatccttactagtcaactttcacgtctatgattgacaagtctgaaaagattcatacattaagtgatagaagttgtgtgctaaacaactgatgcattttcttcattggaaaattaattaccattccttgttacctgatttattcaaacaagttttct

SEQ ID NO: 215648 - DNA, 2094 bp, Zea Mays
caattagactgtggtcaatcttccccgctagtccttgttcaccttctccggcggcagcctccaaaccaccctcgcgctctaccactccggtcgtgtagctccccagcaggcaaccaccatcgcgcacccaccggccaccgcgtctacatttgccaatctctgcttgaagcgttctgcccactctttcaaccgagaagttcactattatcctgcgcatgttccctttccccctttcgtcgtggcacgcacgttaggagttcgaccgattgccggaacgtcttccgccgtcttctgcgccatcgaaagagcgatgaggtttgtggtgacgaaagtttgcagcggcggagggaaggcgcgggcgggtgcgctccatatagccggcgccggcattggcattgagacgccggcgctgctgctgtccactcgtaaggggctgccggcattcttgtcctgtgacctccttgcctccttgccactcccggactccctccttctccatgtctgtcctacccattttatagaaggccctccagtgaagacaatatcagctattaggggtttgcacggtatgctgggtttacctgatcacattcttgtagcggcggcaagcgattctattgagagtctgccatcatgtgaagccaccaacaaatttggtgcctcctttgaaactccttcgggtcgtagactggtaaaaccatcagactatatggagttgatttcctgtatgaagcctaatatatgggccagtttggcggatgaggtaccagcttgggtgactgagaaacgaaacaaagtctctgttgacaggacattgcggtggcttgatgcatgtattgctttggatgtggcttctgggactaatagttttggtgtaattgtgggaggatctagcttagaacagcgaaagctatgtgccactgaagtgtcgaagcggaatgtttcaggcttttggattgcaggatttggctttggagagagtattgaagaacgttgcactttgctcaatgccacaacagattgcttgccacgggaaaaacctcggctcgtatctaggcttggtcttccaggtgcctgtgctgtattttccccagtaactttggattttgttatgctgtttccacaggggcaatggcttaggaagcttcactttcttttttgtctgatctgtgacttcttacattttaacctcatcatcataattaacaagctacagcctagctgttaaacttatccaaaatttagcctgtcacttaatggtggtttataaatacattggttagtaattttttttccttttccatatgagaagctttacatagatctttttgacaattttccgaaagttaattctgagatatctttgtattaaaaactttttttttacaattatcacacattgataactcagtacattttgtgacttctagaggaggtcttggagggtgtggctgctggtatcgacctttttgactccacatacatttaccaacttactatgggtggtttcgcactgatcttccctgttgacatggttgaaagagaaatgcagaatggtgtactcaacactactgatggcgattcaacaaagattaacctgcgtgctacaacatatcggaaggatacgtcacggctagttgatagctgtaattgcttcacatgccaaaatcacacccgtgcgtacctcaatcatttgctcaatgtccatgagatgttggctcaaattcttctggagatacacaatacccatcattatcttcgtttcttccattccatacgggaggcgatcaaggttggagagtttgatcttttccgacaggagttcgttaagaagagacgcacccatttcgctgctgttgtggtctagacgtgaccaagagttcatctggctgtcctcacaagattaacttatcaattaatcagacttgtgtacacctgaatccttactagtcaactttcacgtctatgattgacaagtctgaaaagattcatacattaagtgatagaagttgtgtgctaaacaactgatgcattttcttcattggaaaattaattaccattccttgttacctgatttattcaaacaagttttct

SEQ ID NO: 215649 - DNA, 925 bp, Zea Mays
ggataagctgttttcatcaaactgtgtttgatgactttaatgcttctgggactaatagttttggtgtaattgtgggaggatctagcttagaacagcgaaagctatgtgccactgaagtgtcgaagcggaatgtttcaggcttttggattgcaggatttggctttggagagagtattgaagaacgttgcactttgctcaatgccacaacagattgcttgccacgggaaaaacctcggctcgtatctaggcttggtcttccagaggaggtcttggagggtgtggctgctggtatcgacctttttgactccacatacatttaccaacttactatgggtggtttcgcactgatcttccctgttgacatggttgaaagagaaatgcagaatggtgtactcaacactactgatggcgattcaacaaagattaacctgcgtgctacaacatatcggaaggatacgtcacggctagttgatagctgtaattgcttcacatgccaaaatcacacccgtgcgtacctcaatcatttgctcaatgtccatgagatgttggctcaaattcttctggagatacacaatacccatcattatcttcgtttcttccattccatacgggaggcgatcaaggttggagagtttgatcttttccgacaggagttcgttaagaagagacgcacccatttcgctgctgttgtggtctagacgtgaccaagagttcatctggctgtcctcacaagattaacttatcaattaatcagacttgtgtacacctgaatccttactagtcaactttcacgtctatgattgacaagtctgaaaagattcatacattaagtgatagaagttgtgtgctaaacaactgatgcattttcttcattggaaaattaattaccattccttgttacctgatttattcaaacaagttttct

SEQ ID NO: 215650 - DNA, 948 bp, Zea Mays
gcacaattgcccaagtgcggcaacgacctcccactgcttctgattccgcggaagttggatcctggtgctgccaattctgtcaaggatggggtcaatttgggtggtggtggacaggtggagttggagttgggtggataagttggagaggaggacagctgtgggcctcatttgtcttaagagggacattttctgcactagaaatatatggaaatagctctgcaggtagtggaaccatcgtgtatgtgacttatacataacggaatttggtggaagtggcaaccaaggaaatgcaaatttcaatagtgacagtgaaggaaagtgaccatttttatgatacatttaccaacttactatgggtggtttcgcactgatcttccctgttgacatggttgaaagagaaatgcagaatggtgtactcaacactactgatggcgattcaacaaagattaacctgcgtgctacaacatatcggaaggatacgtcacggctagttgatagctgtaattgcttcacatgccaaaatcacacccgtgcgtacctcaatcatttgctcaatgtccatgagatgttggctcaaattcttctggagatacacaatacccatcattatcttcgtttcttccattccatacgggaggcgatcaaggttggagagtttgatcttttccgacaggagttcgttaagaagagacgcacccatttcgctgctgttgtggtctagacgtgaccaagagttcatctggctgtcctcacaagattaacttatcaattaatcagacttgtgtacacctgaatccttactagtcaactttcacgtctatgattgacaagtctgaaaagattcatacattaagtgatagaagttgtgtgctaaacaactgatgcattttcttcattggaaaattaattaccattccttgttacctgatttattcaaacaagttttct

SEQ ID NO: 215651 - DNA, 2249 bp, Zea Mays
tcacccatggccaacaaggtcgccgtcgccagcgtcatcgccgcggtgggcatcgtggccgtgatcggcaccatcgccgcggtgaccagcgccaagaaagcgggcaacaaccacggcggcatgtccgccagcgtgaagctctccacggtgtgcgcctccacgctgtacccgcagaagtgcgagcagagcctcaagcccatcgtcaacgacacctccaatccggaggacgtcctccgggccgcgttcaaagtggcgctggacgaggtcgccgccgccttccagcggtcggtgcacatcggcaaggacgcccaggacaacctcaccaggaacgccatggacgagtgcaagaagctcctggacgacgccaccgaggacctgaggggcatggcgaggctcaagcccgcggacgtggtgcgccacgtcaaggacctccgggtctgggtctccggcgtcatgacctacgtctacacctgcgccgacgggttcgagaagcccgagctcaaggaggccatggacaagatgctgcagaactccaccgaactcagcagcaacgcgctcgccatcctcacacgcctcggcgagctcctgccgcaggaagccaaagctctgaacgccaccctgccgggtgcggggcacggccgccggcttcttggctggcagatgggcgaggccgaggaggtgaccagcggcggccgcgggcttccggccgtcaatgacaagttaggcgagatcgcggacgtagcgaacgcaaacctgaagctcctgtccgatcacgctgccctcagggggaggggggtactgaccacgggcctcgtcggcacgttcgacgagatccaatacgggcggagcggggtgccgcccagcgacttccccaagtggatgccggccagccagcggaggctcctgcagctgcccggctttcagaggcccaacaaggtggtcgcccaggacgggagcggcgacttcaagaccatcaccgaggccatcgccgccatgcccaagaccttcgaggggcgcttcgtcatctacgtgaaggccggcacgtacaaggagtacgtcaccgtgcccaaggacatggtcaacatcttcatgtacggcgacgggccgacgcggacggtggtcaccggcgacaagagcaacacaggcggcttcgccaccatcgccacacgcaccttctctgccgagggcaacggattcatctgcaagtcgatggggttcgccaacacggcggggccggaggggcaccaggcggtggcgatgcacgtgcagggcgacatgtcggtgttcttcaactgccggttcgaggggtaccaggacacgctgtacgtgcacgccaaccggcagttcttccgcaactgcgaggtgctgggcaccgtggacttcgtcttcggcaactcggcggcgctgctccagaactgcctcctgacggtgcgcaagcccggggaaagccagtccaacatggtgacggcgcaggggcggacggaccccaacatgcccacgggcatcgtgctccagggctgccgcatcgtgccggagcaggcgctcttccccgtccgcctccagatccctagctacctcggccggccgtggaaggagtacgcgaggacggtggtgatggagagcaccatcggcgacctcatcaggccggaagggtgggcggagtggatgggcgacctggggctcaagacgctctactacgccgagtacgccaacatcggcccgggcgccggcacaagcaagagagtcagctggccaggctaccgcgtcatcggacaggccgaggccacgcacttcaccgccggcgtcttcatcgacggcatgacgtggctacagagcaccggcacgccaaacgtcatgggcttcaccagatgatcggggtttttctttctgcagtgattttttgagggcagtagtgtgtcgcatgcatgcagcaagcttttagtgtcaggaagctcctgtgcacgcatgcacggtgaatagggtgatctatgttgttactgtgtatacgcaagctcgagagaaataaagtatcagtcagatgagagcgtgagagaaaggcagcttaataaagaactaattaagcaagttcaggatgacctttttgtgttctgttattagaatgttaagattcttttaattcctggttttttcatgcatgtttagcttatttaatttaacttgcaagagtttagctatgtatagtagttatattacagagggaagactatttgagtgatttgccacgatac

SEQ ID NO: 215652 - DNA, 1520 bp, Zea Mays
caggcagcatctattccaaacagacccacaaaagaaccagggcgggttggaattttattcttcatccagttccaaccgcaaagtttgaaagaattcagatggacaacacaggaaacctcaaactgaacgtacactcaggaagtgagaggatgttcagacaatgcaaaacaacagagcaccataagctaaaggcaagagcttaaccagcgctaagggtgtgggtatcaggtcgacgacgatccccgcatcttctgcttcgctgcgtttcgtgaaaggtaacagcagcgccccccagcagtcctgcaacaatgttgtcatcgtcgtcgtcctcctcctcctccttcttgaggcgggtggttccaccctctttgcttatgggcagcttcatgttgccgaagggagtgtcgacatcgatctttcccttgatggtgtatcccgtgcccctccccctgatcatgtcccagacagcggatccgaagtccttgggcctgaagctgaagggcacctgcatcctggtgatcccctgcttctcgatcttggcggtctgtgtgagctcggcggaggcgatgctgtcgtcgccgagccacatctcgtactcgagcaggttgaggccgaggtcgaagtcgttcttgttctcgagcttgaggtggagcgtggcggtggtctcctcgaaggagaagtggtggaacttgatcttctccacgtcgacgtcgggcttgtaagggatggggatctcgccgtccttctggatcgggatcttgacgcggccgatgatggggacgtcgacgaggagcacgacgcggacgaggtaggggatgatgctgcccggctggatgtccttgtaggtgctcttgatgtcgtcgaagacgagcgacaccgggatcttgacggtctcctggccgtgcgcgtggatggtgccggcgtccgggatgaggcccgacaccagcttgcggccgtcgctgtcgatgaggtagtcgatgtccacgagcgggatcgggaccgggttcgggttcttgatgagcacgtccacgacgaggtcggcgcggtggaggctgatgtgcgggatgtggatgccgcacacgtcggccgtgggcttgccgaacccgacgacctcctcgatcttctcgccgatgtcgtggatgaagtccttcaccttgtcgatgaagccgccgccgccctgctccttgtcgccgccgtcctcgtgcttgtccttgcctccgcgctcggtcaccgtcaccgtggggtcgttctccgccgacgacgacatgcttgctctgctagactgttactctgctgagggcgatccgaacgcggacgaagcgagtggaaaccgcgtgccgtgcacccgtgcctgcgggaaaggaggccggtggtcggtgggggactgggggaggtcgaggttgaggctggcactgcccacagccttgtaggctcgcagctcactggagagttgatggctgacagagacaacaagcacgcgtacgaatgtgggtggaccgacccttgtgtgattgtgtcgg

SEQ ID NO: 215653 - DNA, 1663 bp, Zea Mays
gtctctgtcagccatcaactctccagtgagctgcgagcctacaaggctgtgggcagtgccagcctcaacctcgacctcccccagtcccccaccgaccaccggcctcctttcccgcaggcacgggtgcacggcacgcggtttccactcgcttcgtccgcgttcggatcgccctcagagtaacagtctagcagagcaagcatgtcgtcgtcggcggagaacgaccccacggtgacggtgaccgagcgcggaggcaaggacaagcacgaggacggcggcgacaaggagcagggcggcggcggcttcatcgacaaggtgaaggacttcatccacgacatcggcgagaagatcgaggaggtcgtcgggttcggcaagcccacggccgacgtgtgcggcatccacatcccgcacatcagcctccaccgcgccgacctcgtcgtggacgtgctcatcaagaacccgaacccggtcccgatcccgctcgtggacatcgactacctcatcgacagcgacggccgcaagctggtgtcgggcctcatcccggacgccggcaccatccacgcgcacggccaggagaccgtcaagatcccggtgtcgctcgtcttcgacgacatcaagagcacctacaaggacatccagccgggcagcatcatcccctacctcgtccgcgtcgtgctcctcgtcgacgtccccatcatcggccgcgtcaagatcccgatccagaaggacggcgagatccccatcccttacaagcccgacgtcgacgtggagaagatcaagttccaccacttctccttcgaggagaccaccgccacgctccacctcaagctcgagaacaagaacgacttcgacctcggcctcaacctgctcgagtacgagatgtggctcggcgacgacagcatcgcctccgccgagctcacacagaccgccaagatcgagaagcaggggatcaccaggatgcaggtgcccttcagcttcaggcccaaggacttcggatccgctgtctgggacatgatcagggggaggggcacgggatacaccatcaagggaaagatcgatgtcgacactcccttcggcaacatgaagctgcccataagcaaagagggtggaaccacccgcctcaagaaggaggaggaggaggacgacgacgatgacaactgaagtgaggactgctggggggcgctgctgttacctttcacgaaacgcagcgaagcagaagatgcggggatcgtcgtcgacctgatacccacacccttagcgctgattccagaagctcacggcctcgcgggctcaacctcaaaccaagagtgtaatccgcctgttgcatcacatcaacaagttaacacattggatgtcattagatttgtatatgaactgtaggtcattttacctcgcatatctatccaatagaggggcatatgctaggctccatccttctgttgtctaaaccaaaggaagcagcacacaacaactacagctagggatgttgctcgacgacgactgccaaaatcattctccatggtctatcagaaggtagcaaaatagttgtgttaataacatggtcttgctcttcaattaggtgcattttatgttattagtaccacatgttgttgcatcgtgagatgatcctccagtggtaaaatatgcctgttatgtgatcattgac

SEQ ID NO: 215654 - DNA, 1907 bp, Zea Mays
ctccgatcgacgatggccatcgctcaagctcagctgggccgacacaatcacacaagggtcggtccacccacattcgtacgcgtgcttgttgtctctgtcagccatcaactctccagtgagctgcgagcctacaaggctgtgggcagtgccagcctcaacctcgacctcccccagtcccccaccgaccaccggcctcctttcccgcaggcacgggtgcacggcacgcggtttccactcgcttcgtccgcgttcggatcgccctcagagtaacagtctagcagagcaagcatgtcgtcgtcggcggagaacgaccccacggtgacggtgaccgagcgcggaggcaaggacaagcacgaggacggcggcgacaaggagcagggcggcggcggcttcatcgacaaggtgaaggacttcatccacgacctcgtcgtggacgtgctcatcaagaacccgaacccggtcccgatcccgctcgtggacatcgactacctcatcgacagcgacggccgcaagctggtgtcgggcctcatcccggacgccggcaccatccacgcgcacggccaggagaccgtcaagatcccggtgtcgctcgtcttcgacgacatcaagagcacctacaaggacatccagccgggcagcatcatcccctacctcgtccgcgtcgtgctcctcgtcgacgtccccatcatcggccgcgtcaagatcccgatccagaaggacggcgagatccccatcccttacaagcccgacgtcgacgtggagaagatcaagttccaccacttctccttcgaggagaccaccgccacgctccacctcaagctcgagaacaagaacgacttcgacctcggcctcaacctgctcgagtacgagatgtggctcggcgacgacagcatcgcctccgccgagctcacacagaccgccaagatcgagaagcaggggatcaccaggatgcaggtgcccttcagcttcaggcccaaggacttcggatccgctgtctgggacatgatcagggggaggggcacgggatacaccatcaagggaaagatcgatgtcgacactcccttcggcaacatgaagctgcccataagcaaagagggtggaaccacccgcctcaagaaggaggaggaggaggacgacgacgatgacaactgaagtgaggactgctggggggcgctgctgttacctttcacgaaacgcagcgaagcagaagatgcggggatcgtcgtcgacctgatacccacacccttagcgctggttaagctcttgcctttagcttatggtgctctgttgttttgcattgtctgaacatcctctcacttcctgagtgtacgttcagtttgaggtttcctgtgttgtccatctgaattctttcaaactttgcggttggaactggatgaagaataaaattccaacccgccctggttcttttgtgggtctgtttggaatagatgctgcctgccaatgatcctgaaataagctttactgaaaggctttatccatccagattccagaagctcacggcctcgcgggctcaacctcaaaccaagagtgtaatccgcctgttgcatcacatcaacaagttaacacattggatgtcattagatttgtatatgaactgtaggtcattttacctcgcatatctatccaatagaggggcatatgctaggctccatccttctgttgtctaaaccaaaggaagcagcacacaacaactacagctagggatgttgctcgacgacgactgccaaaatcattctccatggtctatcagaaggtagcaaaatagttgtgttaataacatggtcttgctcttcaattaggtgcattttatgttattagtaccacatgttgttgcatcgtgagatgatcctccagtggtaaaatatgcctgttatgtgatcattgac

SEQ ID NO: 215655 - DNA, 2937 bp, Zea Mays
atggtatgtcacaaggaagtgctgaaatggactgttcagatgatgatgttaatactgtttcacgaattccaactacaaataagcctcatgatgagtcattggggaatgtcccaatcagcaaggatggtatcaatactaataataacttaagcatagagctaaagaaagaacacgacagtgatatgcatcaagattgttcatctatgacaaataaggttactattgatgctattgatggtgacaagtgtattaaaacaaaagttggtgttttcagccatgcaggtcagcaggggttccgaaatgaggtttctgctagcgaaaactctaaagacaaacgctctttgaattctgagaagaatactccagtaaataatactgaccatagcatgcaagatgctaagactgctgcaggctccagtaccacagatctccagaagtcatcagctttgccaaaatctgcttctcctaaaatgcaacctactaagcaacctcctaagactttagatagccgtcttgggaagactagaagcccagatataaagtcagagatgtctcaaaatggtatgcaagctgggagctgtagtgagaaccatgcaaaacttgctgctttgaagacagagcatcagaatgaaagtgaagaggtcggtagacactctgatttgcacccaagagactctgtcctgggtgaagactcagaacttgatggtgcttcaagcagtcaacagcatagtgaatatagcaagaagacagcttctgaaaagtcagaacgtgacaaatccaaacctgactcttgtaacatatctgttcagaatgaaaaagatggacaacttggggcaaatttgagagaactggggtatgcttatgtgaacaggaatgaaagatgggagaggttcatggagtctgagagagaaaagagcaatggagaatgccatggtggcagacatgcatctgacgttatgaacaaacgaatgacaaaccaccgtggtggttggcggggtgctggatcccgtggccatctgaggaacttccgaggtccaagaatgcgcaatgagtttgctgatgaatctattggtggcaacaggcactcatttgaagatgaacctgggcacacccgaggtccacataggaggcggcattcaccaccacatggctgcctcatgagagatacggacattgacgaattctacggaagagagattccagagtataggctgccggcccgtggacaaatagaagatctcccagatagcatgatggacgacaggttttttatgccgtattcccatagacaccgtggtcaaggtgatcatgggttcatccacagagacagagacaggagtcattcgcctgctgcacagagaagggttggccatgtgcatttccatcgtggacgatcacctgaagcgatgcgcagatcaccaccgccggtaatgcgaactgacagaacatacatgcctcaccgccatcacaacggaagccatgacgagaggggtgccatgcaaagaaatgacaggaggtgcgccatggaaggtgatgcctcaggcttcgagccaccgctacatccctcccacctagctgagttccatacagtagaggaacttgtgggcagaaggaagtatagggagcggagaccatatcttcattcaacggtgagtgacgaagacgagatgctcccctaccgcacggaggatgacatggagtttgctgaaggaggtactgacctactgcactcacagcttgaccggctaatgaagacgacgtcgttggcctttgggtggactggactggctgatgcatctgccacagatctcggtctcagacgaacccaacacctttttgccagcgtctcccattccatatattgctttgtttttgctgcattattttctcaggacatggtgctgcagcgtctaaagcatactgctccctccctctctctatagtaaccctgggtcctgctccgtttacaagccgagctgctagtacatgtggatgatgaagggtgggtggagacactgaacattttgaggccaaggtcaaagtgaaataagaacccccccggcatgtgctatttttgccctgggtgctagtgcggcccttgtattaaagaccgacttgtctctataatttggtttcgagttgatgtgagtacagctgctgtgggaccgacattccatggaaaaggtgagccgcgcgtgaaggcgacaaacgccacttgggtgaaatttcacatgatctctcgagtgccctccgtggaactggatggagctgcgaagctgctgctgcgtactcgagggattcgttgtccgtgggggctcgacagctccagcgatttggcatcttcattgttctctttctgtggtccagctccagccatacaggcgttgttgtgccgctgtcgtacgcgacccgaacgcgagcgcgatgagagtcgattggtctgtctgccgtcgctttgaccggcgttgcgcttgatggtcaagtcgtcgcctgcgcatagcaaatccacacgtctgcttggtgcttgctttctcgagattaatctcgctatttctcaacaacagcatcacaaagcatttttgcccaatgtgacttctttcctcgaattcctggaaatttcccagttctcgcaaccacgtatatgtattcatgcgaaggcgcatcaagatgtaaagttttacaagaaatgatgcatcctggtccctaccggaacaaaaaatcgcggcaacaccatttcactttgccggcgggccgggccacctgctgatcagctccttctcatacttaatggtgtacgcctgcaggagcagcgtggccggctggtggtacttcgccagggcctgcccggagcctagctgcactagccgtcttttttgctttttaatcttttttcgaaacatttttgtagtttaaattcaaaaaatagacctttatctc

SEQ ID NO: 215656 - DNA, 3132 bp, Zea Mays
aagtccaggacgccaaggctctctcctctcagtttttattgggtgaagaggggccggagcggcggagggggataggggggccggagccgagcggcggagtttctggaggtagacgacgcaggagctcgaaaccctaatcctgaggctgcccgcggcggcgatcgcctcctcttccttggacttatcttgcttcaactattaaggcggagtcaccatgaacgaccaaactaatgaaaaatgtccactttgcttgaacaagatggatttgacagataaacaactgaagccatgtaaatgtggatatgagatatgtctttggtgttggcatcgtataattgatgaatctggcgggaggtgccctggatgccgttctgtatataacaaggataagatcttggagacaagcgccaggaaccaaattttaaaggaactttgtgctgataagtccaactatcaaaaagaacaagtcaagtctcataagcaaacatctgcaaaagttcagttgggacagtcagaaccaaaagatccaaatagcattcgtgtgattcaacggaagcttgtctatattgttggtatgccaactgagttcgccagcgagaagttgctgagacagaagagtttccttggacaatatggaaagatagaaaacattatcattgataatgttggagctaaccaacaggttcctgactctggacgtgttatgttacatttgcaaaagaagtagaagctatcagatgcatacaggcagttgatggttattccttggatggtcgacctttgaaagcaacctttggtgtgacaagatattgtcatatatggctcagcaataaggactgctacaagccaaactgttcgtatgtgcattataaagccccagcagaagaaatttgtacaaaagatgatgtttctgtggtgtgtgcaaggctgcagcactccatgggaatgagtaccaagtgtctccaacatcgttcgggacgtactttgccccctccatgtgactgcagttcaagaaatacaactgccagtggaatctccaaagatatttgcatcaatgatgacagattactacccaatggtgctatcaagtatactagtttaccatcagtcaccactccacgggactcaagcctttcttctggcagtcctccatcgccggcaagtattgttcttcatcaaaggaatgaccatgagagattacacaataatcagcaaaatttgtctgacctcaaacctcaaaggtacataccacctggagggcgtaactgttcaagtgaaatgactacatcagtaaagcatatgcagcctattgagggtgcttggttgcacagctcatcaaatgagcatttgggctccaataacgacaaatctcaagcatcttcacagttaggaaacgataattcaaatcccaagcaaattacttcagcagaaaatggaacatctgacaccgtgcagcaaaagccacagtatgctgatgtagtttctcaaggacaagttgcaccagtgcggcgtcttactgtacttaacaggccgtcaattgcttctagcgatactaggcctaaagcaacaggacaagttgtcaatggtacttcaacaagcttcacaaaacttactttggttcaaaaggcacaagggagctgcattacaattcctagaaaccatccagttccccagatcccagaggaacctgcgcatctgttcgcttcagctagtgttaaatctcatgctggagtagagataatgaatgaatgctcagatatcaaagaaaagatagttcttggaggttataagcaactaccagagagcactgtgtcacacagattgactgcatcacagaatatgagcagcggaactcttcccagtaatctttctgcatcttatgccaaaactcaaggatctgctggatcacacaatctttcagatttgaacatgaagcttgtagcaaagaatcgatcacagctggtaaatcaacaaaatgcaccagtttcagtttctaatacaggtatagcaagagcaagtttctgctgcagcactcttaataagaatgcatcgttgtctgatggtgatagctcgcacaataggcgctgggacacaattcggtctggtcatattgtttcctctcattcttcagatagcactatgctatcaagaccagccagtgcagtatcatccactgatgtggcatctctgcatagaaaggaaaggagacaagcttgtcctcctggatttgagaagcctcatctgtactccggttcaggcaaagcttgctctggacattgctctgcacctgatgccctggtacaagattgtggtattccagatcaacaagactttactagcttgactacagattgcctgaaagatgatggagatgtcacacaaaatctaagcatgaacatctcttcaccacccagtttgaccgataccaaccggaactggagtcagagtcacagacagtttccaggcaccctctttggttggtcaaatgaccctcagtattcattttaccctggtggctcgtcacatccacgtcaagaggctgaaaattgggatggaacttccactagttacatggctactgctactgggggatacaaagtattttcccagggaacaacttcagacatgaggggtggtatggcaggcacattgctccaacagccaataatgtcaactcatgatagatggactgatggaagcagcgattctggaaggaactgccctcaggttgacatttcgtaccgcatgtacagcctattctagcaccagggcgagaggtctgcttcctagaccctaacaacagacatgtacaagtcataccttctaacctagtagatgccaagatgatggatggtggcgaaaatggtgtcagggagtgcttcgtgtttgttgctaaagcttgtaaagatcaaacatggaggagcttcatgtacaaagactgcaggggtgggtatttggtttaacatttggtaaacagtcattctttcacgcatttgctttgcctttgcttgggtgaaatgtgaatttgcgctctcggaccgggtaccaggtgggtgccgggcgcttctcgtttccttgtcctctttttttgtttttgcccccacgctttcagtatagcatgttccatacagt

SEQ ID NO: 215657 - DNA, 342 bp, Zea Mays
tatcataatttttaaagactatggatagcaggtccatctatattgctgacatacctatgaggtgcaaggttatttctgattggttagcttcttacccctttttcatcacatacagaatcggctatcttaaggtcagtgtcccttcataattgttagcacattttatataacaatatgtactgtggttgagagcacacagtcggatgctttttatatttccaaggaattttgtgttctctataagttgtagcatctaactatgtaacttgatgttatagattcaatcacaaaaaatatttaagcatatgaatactgaaataattgattggttgtaggctgggc

SEQ ID NO: 215658 - DNA, 3628 bp, Zea Mays
tatgtatagctctttgtgaacctgtaaattaatgcgggtgtatgatctactaccatcttctaggcaaggtcaatctgacagctaccaactactgtacttccctgcgctgcctcgctccgtccaacggtcagccggtggtcgtcgccgggttcgggtaagggtcggtccagcaccagtcctctgccacggccttcttccatctcctgttgaacagctgcggctcggtgtaggaccgctacctgaccgctaaccggtctgccgtccccaatgccgacgtggcagccgtcatcgtcgccttgccgccgtcgccgagcttagggacgttgcggctccggtcgccctgcgcgcagtagctaagcttgtagtccatgccccaggcgtagatgaggtcgttctggatcatgtgccacgcgcaccgccacgccgcgcgcgagaacacgggcaccatcatctccacccaccccgcgcacggcgggcccatgttgttgccgtagcaccggccgtgcccgctcgtcttgtagtaccgccggtggacgcccccgctccgcgcggcgcgcgccgtgagctggtggtggatctgcgaccgccggtcgagcgccggctgcgagatctccagccgctcctccctcacgacccgcaggtaccggagcgggtcgacggcgagatggatggggtagcggaggggagcgcggggatgggatcagcggctgctgggcgccattagcggctgcgcgctgggagttgcgcgagatccacgcttggcgtgctggcggtcgcggatgtggctccccatcgtgggaggcaaggtgggctaggtcgcggatgtggcggtcgctgatggcgctccccatcgtgggaggcagggtgggcgaggtcgacggcgagatagatggggtagcggatgggagcgcgggggcggcgcgggatgcaggcgcgggcaggggcgggattgcaggagggacgacgttgagggcaaggagagggtttcgggggaggagatgggaggtcgggggcgacggtttccagacgagagggtttcggggcgcgataggagcgggatcggttgcaaacagtgtcactcaccacgccgagaacaactcgcaaacggttcgtggccgcaatacacggttccgatccaggctgcaagcgagcgagcatggcggcgtagtcgtaggcccgccctccagatggaggcctgccgcctcatgccgtccactagctgagcaggtcacggcaagcgtgcgtccgtcgaccaccagttcagttcggttgccgagaagtgaatacgactgtgtccgcccgtgtgagctggacgtacgcgaggctgcggcggcggcggctcagctagtcgtcgtcgacccccccgaaatcagataaacaccagccacgcaaaaaatcgccgtatccagtcagatcttcctcctcccaaatccatcgctagccagcctgctgctagcacgcacagtaccacacagtacgtgctcaaataatgctcgctcctggcctcctgctaccaaggaccaagaaaaggagggccggcgaggacgtctggccgtctgggtccctatatatgagacagcgaggaggtgggtgtgaaggctgtgcccagtgagctcagctcgatccatcgatcggagagcttttgcactgcaccagctctgaagccatggctgctgcttcttcctccatggacaggatcgcccagtgggtgtcgtcccaggaggtcccgaccgacctcaccgtccgcatcgccgactccgtcttctctctccacaaggcggtgatggtgcccaagtgcggctacatccgccgggccgtggcggcgagccagacgcagggcccggggggcggcgccgtcgagctggacctctccgcgctgccgggcggcgctgacgccttccagaaggcggcgcgctgctgctacggcgacagcctcgagatcacggcgcgcgacgcggcggcactccgctgcgccgcggagttcctcgacgcgccggacctggcccgccgcgccgacgacttcctcgcgcaggccgcgctgcgcgcgctccccggcgccgccgccgtcctgcggtcctgcgaggcgctgctcccggccgccgacgagctcggcgtcgcgcgccgcgccgcggacgccgtcgcgctcggggtctgcaacgaggcgctgttcccgacgccgcgggcgccgcccgggtggtgggcggccgagctggcggcgctgtcgccggcgtcgttccggagggtggtcgcggcgctgcggtgccgccgggccgggcccgaggtggtggccgccgcggccgccgcgtacgcggagcgcgtcctggccggggtcctcgcggcgcccggccgccgggacgcggaccagcgcgcgctgctggaggccgtcgtggacgcgctgcctcccgccgccgacgcgcccctcccggccgccttcctctgccgcctcctccgcgccgcggtcaccgccgaggcgtccgccaagacgtgccgcgacatggagctccgcgtcgcggccgtgctggaccaggccaccgcgggggacctgctgggcgtcgcgctcgacggcgccggggagcgcgtcgtcaacgcggacaccgtccgccgcgtcgtcgccgcgtgcgtcgagcgccagcagacgcagcagggccggcgggcgtccctggccggaggtccggcaggtgagctcagcgcgctggagaaggtggcgaagacggtggatgaggtggcggcggagatggcgtcgcacgagtcgctgcctatctccaagttcgtgggcgtggcgggcgcggtgcccagggacgcgcgcccgtcgcacgactgcctgtaccgcgccgtggacatctacctcaagacacacccggggctggacgagatcgagcgggagaaggtgtgcagcgtcatggacccgctcaggctgtcgtaccaggcgcggatgcacgcgtcgcagaacaagcggctgccgctgcaggccgtgctcagcgtgctctactacgaccagctgaagatccgtagcgcggacggcagcggcggcacggaggaagggtgggagacacagtcggccgccgggaaggcccgtgcgcaggcgcgggcggacgtgtcgctggcaagggagaacgaggcgctgcggttggagctggcgcggatgcgagcgtacgtgtcagggatgcagcagagcagcaaggggagcgggtcgaggccatcgtcgtcatcgctggtaccaggcccagcgacggcgacggggaagaaggcaagcttcttagggtcggtgtcgcggacgttgagccggctgaacccgtttaagggcgggtgggccaaggacacgaccagcattgccgatgggcgtgacaggacttccatgcatgtggtgaagcccaagaggaggaggttctccatcggctaattcttttgtgatatatcgatatgatcgtgtcatcgtgtgtgtgacttatattaaatcactgtgattagaggctagaacaaggggtgtggatgtttgtactttctctgtcaatgaaaaaacaatatgcactacaaaggcaaaagtgtaggttaaaatagtggactaaggagtaaatattaatagtactgttggggtcgtgcttcggtgcgccgaaggtctcacacgaag

SEQ ID NO: 215659 - DNA, 1429 bp, Zea Mays
ttgacaattgtatgatgtatatgtaggttttcatgggcttaactatggtggtcactgagggaatttataacttcattacactcatgactgtattgttacttgatttctacaacaaaaagaaagagaatgattcaggggtttctaagtatatgttgaaacaccccagtcttaattatgatgatcgtaaaaggcttgaggtttttcttgataatcatatccctattattggaggagtggttggatacattgtaattgggacaatgtgtgcagttgttaccccttggatctttcaccaaattaagttctatcatatagccatattgttcgtaacaatttttccacttttcttcttcagtaacacatatgtgacaggactcacagattggtcagtttcgacaacctattgcaaggttgtacttttcattatagcagcatggattgccaaacccggtgcagttattgctggccttgtagcttgtggtctagcattgatatcccttaatgtatcttgtcaagcaatgcaagatctcaggacaggttatatgacactgacttctccaagagttgtagttgcagggcatatgtatggtgtactaattgcttctgttattaacccactcatctatcttttcttcaaagcgcatgcaagaaaatctggcccccttggaacaaagaattcgatatacccatgcccctctgcagcagtgtatcgtgccattgccctacttagtactggaggagtaaaggagctacctaaacattgtttcacattctgtttcatcaccatcttcctaacagtaactgttgaaacagttagattggtgtctcaaagaaaagattggaaagtgcagcattacatcccttgtatgacagcaatagcactaccattccttgttggacctaccttcaccatcgattttgctctaggttcagtagtattgatgctttggactaaggtaaatcgacaaagtgcagcattgctatcatctgcagttgcagcaggcttagtatgtggagacggtatatggtatctaccatcatcattattaggtttcttcaatgtggatcctccaatctgtatgagattcctagcaagtggaaaaccagcggagatggcagatgcgttcttaagtacattggggacatgaggaacgccatgaagaacataagcatatataattttattatagggattagtggaagctattgtaaagatgcacacttgtatttctatgttatgtagcttagttttccaaataaaatgatactttttcatattttagaaagtttcacataatagatatataaaatcatatgatactgccatttgagtgcaaaacaagaggtttgcacataacatctataaaattataaactctttcctgttttcatttttacaattttaattcaaaatcagatatcagatcgg

SEQ ID NO: 215660 - DNA, 2447 bp, Zea Mays
gtgcatccgaagccctccatagtccatacgcgtcgagcacggaggagccagcaaactgtttctctttaataatagagaccagtagtaagcagaaacactaccgatcgacacataccacaggcaagaagggccgggagagagagagagagagcttggcgctcgatcatcaggcaccataattcgttcgtcgtcatggacgccacgatcggagagtcggcaccgtcggtggagagggcgttcgaggggcagccgcatcccgggttctgggggctggtgacgccgcgatccatggccgtcgcggtggtgtacgcgttcgtgttctccatggtgtcgatgcgcatctacatgatagtggggctcgtcggcgccttcaacatgccctcgaacatcctctgcttcgtcaccctccggggcctcgtgtccctgctgcggcgctgcgggatcgccgccgccccgttcaccaggcaggagaacgtcttcctccagaccagcgtcatcacatgcgtcaacgtggcggtcgcaaacaaggaagacgttgttgaggacgtgccgatggggagatacgggctactgattttcttcgctagtacgctgggaataatggcaatgatacccatggtgaaggtcatgatccttgattacagactgctatttccaacaggctcagttgtagctcaccttataaatagttttcatacccctcaaggagcatatgtagcaaaactgcaggttcgtgctttaataaaagcatttgccggaagcatttcttggtctatattccaatggttttataccggaggtgatagttgtggatttcaggtcttcccaacattcgggctggaactatataagcgcagattctattttgacttctctgcatcatgggttggtcttggtatgattgttccacatgttgtaaacttcgggttgctttttggaggctgcatatctggaggaatcatatatcctttccttcaaagtaaaaaaggtcaatggtatcacactgaaaatccatcatctttgaatggaattaacggatacaaggttttcatgggcttaactatggtggtcactgagggaatttataacttcattacactcatgactgtattgttacttgatttctacaacaaaaagaaagagaatgattcaggggtttctaagtatatgttgaaacaccccagtcttaattatgatgatcgtaaaaggcttgaggtttttcttgataatcatatccctattattggaggagtggttggatacattgtaattgggacaatgtgtgcagttgttaccccttggatctttcaccaaattaagttctatcatatagccatattgttcgtaacaatttttccacttttcttcttcagtaacacatatgtgacaggactcacagattggtcagtttcgacaacctattgcaaggttgtacttttcattatagcagcatggattgccaaacccggtgcagttattgctggccttgtagcttgtggtctagcattgatatcccttaatgtatcttgtcaagcaatgcaagatctcaggacaggttatatgacactgacttctccaagagttgtagttgcagggcatatgtatggtgtactaattgcttctgttattaacccactcatctatcttttcttcaaagcgcatgcaagaaaatctggcccccttggaacaaagaattcgatatacccatgcccctctgcagcagtgtatcgtgccattgccctacttagtactggaggagtaaaggagctacctaaacattgtttcacattctgtttcatcaccatcttcctaacagtaactgttgaaacagttagattggtgtctcaaagaaaagattggaaagtgcagcattacatcccttgtatgacagcaatagcactaccattccttgttggacctaccttcaccatcgattttgctctaggttcagtagtattgatgctttggactaaggtaaatcgacaaagtgcagcattgctatcatctgcagttgcagcaggcttagtatgtggagacggtatatggtatctaccatcatcattattaggtttcttcaatgtggatcctccaatctgtatgagattcctagcaagtggaaaaccagcggagatggcagatgcgttcttaagtacattggggacatgaggaacgccatgaagaacataagcatatataattttattatagggattagtggaagctattgtaaagatgcacacttgtatttctatgttatgtagcttagttttccaaataaaatgatactttttcatattttagaaagtttcacataatagatatataaaatcatatgatactgccatttgagtgcaaaacaagaggtttgcacataacatctataaaattataaactctttcctgttttcatttttacaattttaattcaaaatcagatatcagatcgg

SEQ ID NO: 215661 - DNA, 3848 bp, Zea Mays
ctgggggcagtcacgcacgcaagcacccctcctgttccatttcaccacggccgcggcctttgtgtggctgtggcctccgtctcgtgctatctcttcttcgagttcttccgcctcccctccccttcctccccccctcggcaaagcccgccttctctctcggtctcgacgcgacccgccgctccctgcggctgcgcgcccaattcacgccccactggaggcggcggcgagcgcacgagtgcctcagcgccgccgatgaggctgcgccgcgccatgcagacctcgccgcccaccgtgtccgcgtcgtctctagagtgcgtgagctcgtgcagggccgcctcgtggaaggggggcggaaggccctacgaatgcagcgtactcttgtgcgcgtggaacgcgccgcgcgcgctcacgggcgcgctcgccagcaccgcgcagtgctcgtcgtgcggccacgccgaggccggaggcggctggaggaggcgcgggcggtcgcgtcggagtaacaactcgttaccgcgcatcaccctggatgaggacatcaatagagggaaatttggttatgatccatcgcgtgcctactctacaagttttgtcagatcttggtctactattgttgaccgaacatggagatcttactgctattcatcatctgattctttcatctctccagagactttgtgggaggatctcaaaccagctgtttcatatcttcaacctgaagagttaaaatttgtgcatgatgctttgaagttggcatatgaagcacacagtggacaaaaacggcgaagtggagaaccattcattattcatcctgttgaagttgctcgtattcttggagagcatgaacttgactgggaatccatcgctgctggtttattgcatgacactgttgaagatacgaatgtggttacttttgaaagaatagaaaatgagtttgggccaactgtgcgacgtattgttgaaggggagacaaaggtgtctaagttggggaaacttcagtgtaaaagtgagggtagcacaaaacaagatattaaagcagaagacctaaggcagatgtttcttgccatgacagaagaggttcgtgtgattattgtcaaactggcagacaggttgcataacatgcgcactctcacacatatgcctcagcacaagcagtatgccatcgccgtggagacactgcaggtctttgcccctttagcaaaactccttgggatgtaccggataaagtctgagctggaatatctatccttcatgtacgttaaccccactggttttgctgaactaaggaaaagagttgaagacttgtacaagtcccatgaacaagaattggaagaggcaaatagaattttaaggcaaaagattgctgaggatgagtttctcgatcttgttagtgttgaaaccgaagtgcgttcagtttacaaagagctctacagcatttacaaaactacactcaaatccaagagttcaataaatgaggtgaatcaggttgctcagctgagaatcatcataaaaccaaaatcttgcaatggtgttggcccattgtgcactgcacaacagatctgctatcatgttcttggccttgttcatggcatatggacacccattcctcaagctgtggaagattacattgcaactccaaaacctaatgggtaccaaagtctacacacaacagtgataccatttcttaacgagagtatgttccatttggaagttcagataagaacagaagatatggatttaatagcagaaagaggcattgctgcacattacagtggaagaagggtggcttctggacctgttggccttggaatatcaagtggaagaaatgccaaggggaaagtaatctgcttgaacaacacagactttgctctgaggattggttggctcaatgcaatccgcgagtggcaagaagagtttgttggtaatatgagttctagggaatttgttgatactatcacccgagatcttctaggaagccgtgtctttgtgtttactcctaaaggcgagattaaaaacctgcctaagggagccacggtggttgattatgcttatctgattcatactgaaatcggcaacaaaatgattgcagcaaaggtgaatggcaatctggtttcaccaattcatgtacttgcaaatgctgaagtggtggagattataacttatgataaattatctagtaagtatgcattccagcgtcaccagcagtggctacagcacgcaaaaactcgcagtgctagacacaaaattatgagattcttaagggagcaagctgctctttctgctgctgaaattactgctgacgcagttaatagttttgttgctgatcttgaagatgaaagtgatagtgagctttcacttccaagcaccaagaaagaagatagtaaattcaactgggagaagatattaagttctgataaattattctttgtcaacaaaagtagtgatggctttttacctgttaataatgtctatccaaaggtcaatgggaagcaaaacaaaactgttaaggatttgggcatcaaaatcaatggtcattctacaattcgaggtgatagcttcagtgagttaatgcaccctagcaattccacctgcaaggaagttttccctggtttggatgactggaaatctggtaaaatttctggttggcataatacggaaggcaactctgtccaatggctttgcatagcctgtgttgatcgaaaagggatgatggcggaggttacatctgctcttacagcttgtggaattactgtatgttcctgtgtggcagaagtcagtaaaaggaggggaatgggtgctatgctgttccattttgagggaagctatgagaacgtggtcagtgcttgtttgagtgttgacatgatttttggtgttcttggttggtctgtggggtgtagctggtgtccattgggtgctcttgagtgctaatgggtatcaagagacgtatactgcagtagttcaccactaatactatcttcctccaagatgatgataatgttggaagcaccaagacatcggtggctcaaaattttgttggtcagatccttaaaatctgggaacatagagcttgtccatattcctcattttggaaacgttcgtccgttccggagacgtgggaacaatctcgtcccccatctcatccttgtagtgttaaaatcctttttaagcacgttcccgttcctcaacctcatcgatccagaaacttggttgctaaggtcagatcatgattggacaggtgagcgagtggaatcctttacttctctgtcaaatcagaaagtgagggtgagcaaagtagaactagatatatatggttcattctgaaagtgagtgtacatagcagagtgagtagggttgggctatggctaacaaatcgtacatatgatcatgtaaaacactgttttgcattgcgaattacactgtttacattgtgtagtttgaaataagagatagagatgaataagctgccgactatggagagtcagtgcatgctgggattgattggattatacagaaggccttgtaaaagattgttaagggcggttcttctcactttgtggttcgcatatactagtttgcttaaatgtgcagctagaattttgacctggacgctaattccaaattttgtctgtgtttagtttcctacctctgcatgtaaatgttattgtatagcttcagttttgcgagtcaaaatttgagcatacttaactggcagatgcacgcttctggattacttgccatttcctgcagtatgaatggtaacttaattagaggtttggttctgatgatggtgaccctttcatgaacatctccaaataagatgatggtgaccctttttggattaattgtat

SEQ ID NO: 215662 - DNA, 1703 bp, Zea Mays
cagctcatgggtgaagttttgaaattatctagtaagtatgcattccagcgtcaccagcagtggctacagcacgcaaaaactcgcagtgctagacacaaaattatgagattcttaagggagcaagctgctctttctgctgctgaaattactgctgacgcagttaatagttttgttgctgatcttgaagatgaaagtgatagtgagctttcacttccaagcaccaagaaagaagatagtaaattcaactgggagaagatattaagttctgataaattattctttgtcaacaaaagtagtgatggctttttacctgttaataatgtctatccaaaggtcaatgggaagcaaaacaaaactgttaaggatttgggcatcaaaatcaatggtcattctacaattcgaggtgatagcttcagtgagttaatgcaccctagcaattccacctgcaaggaagttttccctggtttggatgactggaaatctggtaaaatttctggttggcataatacggaaggcaactctgtccaatggctttgcatagcctgtgttgatcgaaaagggatgatggcggaggttacatctgctcttacagcttgtggaattactgtatgttcctgtgtggcagaagtcagtaaaaggaggggaatgggtgctatgctgttccattttgagggaagctatgagaacgtggtcagtgcttgtttgagtgttgacatgatttttggtgttcttggttggtctgtggggtgtagctggtgtccattgggtgctcttgagtgctaatgggtatcaagagacgtatactgcagtagttcaccactaatactatcttcctccaagatgatgataatgttggaagcaccaagacatcggtggctcaaaattttgttggtcagatccttaaaatctgggaacatagagcttgtccatattcctcattttggaaacgttcgtccgttccggagacgtgggaacaatctcgtcccccatctcatccttgtagtgttaaaatcctttttaagcacgttcccgttcctcaacctcatcgatccagaaacttggttgctaaggtcagatcatgattggacaggtgagcgagtggaatcctttacttctctgtcaaatcagaaagtgagggtgagcaaagtagaactagatatatatggttcattctgaaagtgagtgtacatagcagagtgagtagggttgggctatggctaacaaatcgtacatatgatcatgtaaaacactgttttgcattgcgaattacactgtttacattgtgtagtttgaaataagagatagagatgaataagctgccgactatggagagtcagtgcatgctgggattgattggattatacagaaggccttgtaaaagattgttaagggcggttcttctcactttgtggttcgcatatactagtttgcttaaatgtgcagctagaattttgacctggacgctaattccaaattttgtctgtgtttagtttcctacctctgcatgtaaatgttattgtatagcttcagttttgcgagtcaaaatttgagcatacttaactggcagatgcacgcttctggattacttgccatttcctgcagtatgaatggtaacttaattagaggtttggttctgatgatggtgaccctttcatgaacatctccaaataagatgatggtgaccctttttggattaattgtat

SEQ ID NO: 215663 - DNA, 2419 bp, Zea Mays
gcatggcatccccagctggatcgcgcagaagtaaacgccgcatcccaaatccccatcccacctcgtcctcctctccactctctcttctccctccaataattttctcctctctgcttgctccagttccaagcaccaccgaatcagggcgagtgggagcagagggaatcccatgtctccgcccctcgctggagtagatcctcggggagccggcgtggagctgccgcggtagaaagccagctgagcctgcgagcgcctgatccagcccgatcgggatcgatgggtggggaggcgccggagccgcggcggctgacccgcgctctgagcatcggtggcggtggcggcggctgggttcccgatgagatgctgcaactggtgttggggtttgttgaggacccgcgcgaccgggaggccttgtcgctggtgtgtcgccggtggcaccgcatcgacgcgctctcgcggaagcacgtgacggtgcccttctgctacgccgtgtccccggcacgcctgctcgcgcggttcccgcggctcgagtcgctcgcggtgaaggggaagccccgcgcggccatgtacgggctcatacccgacgactggggcgcctacgcccgcccatgggtcaccgagctcgccgcgccattcgagtgcctcaaggcgctccacctgcgacgcatggtcgtcacagacgacgacctcgccgagctcatccgtgccagggggcacatgctgcaggagctgaagctcgacaagtgcaccggcttctccacggatggactccgcctcgtcgcccgctcatgcagtcaactgtcctgttctggcaacattgaatttccacatgactgagcttgaagtgatgccagttgacctagagcttcttgcaaagagctgcaagtcactgatttccttgaagattggcgattgtgatctttcagatttgatagggttcttccaatctgccacatcactggaagaatttgctggagggacatttaatgggcaaggggaactcaccaagtatggggatgttaaatttccatcaagaatatgctccttgggacttactttcatgggtgcaaatgaaatgcctattatatttcctttttctgcgatactaaagaagctggatttgcagtacactttcctcaccaccgaagaccattgccagctcattgcaaaatgcccgaacttactagttctcgcggtgaggaatgtgattggggatagaggattaggagttgttgcagatacgtgcaagaagctccaaaggctcagaattgagcgaggagacgatgaaggaggtgtgcaagaagagcagggaggggtctctcaagtgggcttgacagctatagcggtaggctgtcgtgaactggaatacatagctgcctatgtgtctgatataaccaatggggccttggaatctatcgggacattctgcaaaaaactctatgacttccggcttgttctgctcgatagagaagagaggataacagatttgccactggacaatggtgtccgggctttgttgaggggctgcaccatgcttcggaggtttgctctgtacttgagaccaggagggctctcagatgcaggtctcggctacattggacagtgcagtggaaacattcaatacatgcttctcggtaacgttggggaaaccgatgatggattgatcagtttcgctctgggatgtgtaaacctgcgaaagcttgagctcaggagctgttgcttcagcgagcgagctctggccctcgcaatactaagtatgccttccctgaggtacgtatgggttcagggctacaaagcgtctcaaacaggccgagacctgatgctcatggcgaggcccttctggaacatagagtttacacctcccagttcccagaatgctggtcggttgatagaagatggggaaccttgcgtagatagtcatgctcagatactggcatacggctctcttgctggtaagaggttggactgcccacaatccgtggtcactttgtatcctgcgtgagtgtaaatagactgagggcccgtttggtgcccatggaaccgttgtctggaacaatttctggtaggattgcttgctgatttgtataggctttgatcagctggaaacaaatgaacaaggcctaagctcgtgtctttctctcacgtccttgctttcttagcctcatggtcaacaagaatggtgttgataacacgatatgtgcttattgtattgatctagatggctagctgctacgtactgcaatcagctactagtagttgagatgacctggattctggaataagcccttgctatcttcgcctgtactgctatctaatcctaggaagcatgtatatgtatactggtaaaagtaacgatggaagatgtgagtctgattgcccgccctgatttgtctcatgggaggtataagactatctccag

SEQ ID NO: 215664 - DNA, 2537 bp, Zea Mays
cagggcgcgtgtgcgcctcgtgcgtgcgtgtgcgccgatcaaattccctgcccggcccccagccgacgtggcatggcatccccagctggatcgcgcagaagtaaacgccgcatcccaaatccccatcccacctcgtcctcctctccactctctcttctccctccaataattttctcctctctgcttgctccagttccaagcaccaccgaatcagggcgagtgggagcagagggaatcccatgtctccgcccctcgctggagtagatcctcggggagccggcgtggagctgccgcggtagaaagccagctgagcctgcgagcgcctgatccagcccgatcgggatcgatgggtggggaggcgccggagccgcggcggctgacccgcgctctgagcatcggtggcggtggcggcggctgggttcccgatgagatgctgcaactggtgttggggtttgttgaggacccgcgcgaccgggaggccttgtcgctggtgtgtcgccggtggcaccgcatcgacgcgctctcgcggaagcacgtgacggtgcccttctgctacgccgtgtccccggcacgcctgctcgcgcggttcccgcggctcgagtcgctcgcggtgaaggggaagccccgcgcggccatgtacgggctcatacccgacgactggggcgcctacgcccgcccatgggtcaccgagctcgccgcgccattcgagtgcctcaaggcgctccacctgcgacgcatggtcgtcacagacgacgacctcgccgagctcatccgtgccagggggcacatgctgcaggagctgaagctcgacaagtgcaccggcttctccacggatggactccgcctcgtcgcccgctcatgcagaatgtcaaattaatgataaaggcagtgaatggatccgcgatcttgcagtcaactgtcctgttctggcaacattgaatttccacatgactgagcttgaagtgatgccagttgacctagagcttcttgcaaagagctgcaagtcactgatttccttgaagattggcgattgtgatctttcagatttgatagggttcttccaatctgccacatcactggaagaatttgctggagggacatttaatgggcaaggggaactcaccaagtatggggatgttaaatttccatcaagaatatgctccttgggacttactttcatgggtgcaaatgaaatgcctattatatttcctttttctgcgatactaaagaagctggatttgcagtacactttcctcaccaccgaagaccattgccagctcattgcaaaatgcccgaacttactagttctcgcggtgaggaatgtgattggggatagaggattaggagttgttgcagatacgtgcaagaagctccaaaggctcagaattgagcgaggagacgatgaaggaggtgtgcaagaagagcagggaggggtctctcaagtgggcttgacagctatagcggtaggctgtcgtgaactggaatacatagctgcctatgtgtctgatataaccaatggggccttggaatctatcgggacattctgcaaaaaactctatgacttccggcttgttctgctcgatagagaagagaggataacagatttgccactggacaatggtgtccgggctttgttgaggggctgcaccatgcttcggaggtttgctctgtacttgagaccaggagggctctcagatgcaggtctcggctacattggacagtgcagtggaaacattcaatacatgcttctcggtaacgttggggaaaccgatgatggattgatcagtttcgctctgggatgtgtaaacctgcgaaagcttgagctcaggagctgttgcttcagcgagcgagctctggccctcgcaatactaagtatgccttccctgaggtacgtatgggttcagggctacaaagcgtctcaaacaggccgagacctgatgctcatggcgaggcccttctggaacatagagtttacacctcccagttcccagaatgctggtcggttgatagaagatggggaaccttgcgtagatagtcatgctcagatactggcatacggctctcttgctggtaagaggttggactgcccacaatccgtggtcactttgtatcctgcgtgagtgtaaatagactgagggcccgtttggtgcccatggaaccgttgtctggaacaatttctggtaggattgcttgctgatttgtataggctttgatcagctggaaacaaatgaacaaggcctaagctcgtgtctttctctcacgtccttgctttcttagcctcatggtcaacaagaatggtgttgataacacgatatgtgcttattgtattgatctagatggctagctgctacgtactgcaatcagctactagtagttgagatgacctggattctggaataagcccttgctatcttcgcctgtactgctatctaatcctaggaagcatgtatatgtatactggtaaaagtaacgatggaagatgtgagtctgattgcccgccctgatttgtctcatgggaggtataagactatctccag

SEQ ID NO: 215665 - DNA, 1390 bp, Zea Mays
cacagctattccctgttttttatgttgtcaaatgagatatgccatgcaacaagcatttaagtcaatgatgacccagtcagcaccaaactcatttggctccaactcgcctttcccatttagcatgccgccacaggcatctcctactgctccaagcacttacccgtacttggaaccaaagaaagatacttccccgcatgtgtcaactgttgatgtctcagctaatgaagtggaagccactggaacatcgaaagaggtggatgttactgaaacgccaaaaccttcaaagaagtttgcatttgttgatgtttctcccgaagagttgcagcaaaagaacctccaatcttcaccggagacggtagatgtaaaacatgatagtacatacagtgaaagtaaggaggatactgaggaacaagttcccacaattagtacaaacactgaaagtaaggaggatactgaggaaaaagttcccacaaatggagcatcttttaagctgaacgaaggtgctgctcatgggccaactgaatctaataactcggcatctatgctatccgttgagacaattgagaaaatgatggaagatccagctgtgcagaagatggtgtatccctacttgcctgaagagatgcggaacccaaattcattcaagtaatccaatgtaccgccaacaactacaggatatgctaaataacatgggcgcaactcctgatcaatgggataaccgcatgcttgatcaccttaagaacttcgaccttagcagtccagaagtgcggcagcagtttgcgcaagttggcatgactcctgaggaagtagtatcgaaaataatggcaaacccagatgtagctgttgcattccagaatccaaaaatacagacagccatcatggactgctcgcagaaccctcttaacattgtaaaataccaaaatgacaaggaggtcatggatgttttcatgaagatatcacaaatcttcccccaaattaacggctagctgatcttcgtcgtgggatagcacttctgatttttgtcggcccgtcatctccagtctggagggctgctgcggtagcatctatcaagaaaagggtcgtgacgctccgatataccctccccgtgtcaaggtttttgagtttcttatgtacatcatgtgatgtagcggccttggtttagctatgagtaattgagtatgacccttgccagttcattaagtcaggctattgacatagcagggtccaagtttttattaagccagccaatcagtggaaaggtgcagcagagacggttcgtatcagatcaattttgatatataattgttattattaatctgtaatatattagagacacaatggcaatgcaagtaatctgttacgacatttcctgaccatatttgaccgggta

SEQ ID NO: 215666 - DNA, 4149 bp, Zea Mays
gcccaacgcatggagggttgtggcgcatggaacacggtggaaactgccaacgcgctaggatccgtagcggacggcgatctgtcttcgactgctctctgccatcgctgtggcgaccccgacggagccaagcgacggttcatcttcttgcggcggcggcgacctcgagctgattgcagcgagaaggcggggacaaatcgatctcccctagctggctacacccgatggagccgagggttccttgcgttgacggcggcggcgacggcctcgagctgagggccgcgagaaggcatcgacgggagggcgggcgaatccacgtcctcgatgcgcaaatcctggagcctcagcgacagagatcgaatccattcaggaacatctttcatctattaactcaacgagaggtcttacctcgaacgaaacaccatgctaaaaggatatggaataactctccaaaatatgatcctcatttaattgagttaaggttttcagatgcagatgctaaacttggtattttatcttgggcagaatcactgtccctgcatcgctggtctgccaagtattgccctcttttgccacctcctaggtcaactattgcagctgctttcagtccagatggaaaatcacttgcgtccacacatggtgaccatactgtgaaaataatggactgccatacagggaaatgtgtgaaggttttgagtggacatcgacgcactccttgggtggtcaggtaccatcctttacattctgacattctggctagtggaagtttggatcatgaggttcgtctgtgggatgctaatacttcagactgtattggatcacaagacttccatcggccaattgcgtccattgcatttcatggaagaggagagattctggcagttgcatcaggtcacaaattgtacatatggaactacaataagagagatgatgcttctgtcccaaccatcatactaaggacccgccgttcgttgagagctgtgcattttcacccgcatggcgctccatatcttctaacagcagaggttaataatatagagtctgcagactcaccgctgactctggcaagatcatctggatattcaaactacccttcggccctgctggtgtcaaacactaattctagattctgtccacttcctgagtccaatgtgacgtcaccgtgcttactgtggcctgcgtacctcagagatgatgggattttacatgtgcttggcaatgccagtagttcaaccattgtgcagcagagatcatcattagttcaaccttccacatcagatactgcaaatctacagcttgaacagtttgctacccctatggatgtatgtcctggagagccaacttcatttaataacatatcagatgcagtaactgtgcctacttcaaatgcaattgaaatgcatggtgctggcggccagtctaacccaagactgcagggcagcagctctattagtaatcttgagaggttcagtgctagagatgctttgcaagtgtcttccctgagcagcattgagccaatcccatcaacagctgggtcttcgggatccaattcacgccgtgctatgccactgaatatgctcctcactggtggattagatgttcaaatgttccaaagaaatgtaggaagtggacaacaggatcattttctcttcggcgactcaagtaactgggaagtgccatttgtgcagggttttttgatgacccaaaaccatacaggtttgcaccctgcacttgtgaacaataatgtccttgaagacctatctggtgctggtactgcagggattaacaactcaactagggaatcatcacacatgcataactttggacgtccaggtgcttcatcatcgattccccttacttctggcagttctaggagaccaaatcgacactatgcctcacgctctgtgcctggggttgggagtttgctcctagtaggtcctcaaattgacgaagctgaagctcatgctgcttcactaggtgctggttcagaaatcactgcgtcgatgcttgctcctggtactgaattgccttgtacagtgaagctcagaatatggcggcatgatatcaatgaaccatgtgttcctttagcacctgaggcatgccgtctgacgatttctcatgccgttctttgcagtgaaatgggtgcccatttttccccatgtggacgatttcttgtagcctgcgttgcatgtttgttgcctcaaacagaaggtggccgtggtagccaattgcctgtgccttatgaagaggctggatcatcaccaactcgtcatccacttccctctcaccgagttatttatgagcttcgggtttattcgcttgaggaggagacatttggggatattcttgcttctagagcaataagggcagcacattgcttaacttccattcagttctcacctacatccgaacacatacttttggcatatggtcgtcgtcatagctcgctgcttaggagcatagtcgtggagggagaaaatgggattcctgtatatactattttggaggtatatagagtttcagatatggagcttgtgagagtgcttcctagtgccgaagatgaagtcaatgttgcatgctttcatcctttaccaggaggtggccttgtttatgggactaaggaagggaagctcaggatccttcaacacaatggcgcaaacatgataaacatggggtcgggttgcttcattgaggaaaatatggttgagatccagaggtatgcattggaatgctgaataagcttgaccacatcatgtgaattttaggcttacttccatggcttcatctgtgtgatccgtccaagggaaaacattagatccatctccaactacattagaacagataattctcaatgggctctttcaagtgccttggggactggaaacattggtatccagtttactgattggaatcgtgtccttacaagcatcattagctcttacaacttgctgaagcaagctgccctacaaattttttccgctggatcaggagccttgaatatttgtccagttttgcaggtgggcttggatgtccaataagctagctcgattttgacagtaggttgctttatgtttttaaccctttggagcgcctttgcaacctttgatcatccttatctgcctttacgttttttgtgtggcaaccgtgctatttatggttaagtctgtctaggttaatcatgttttgtaaaaaatggatatggttctagtggaaaattgtttttctaaccttggaaaaattattctagtcccgttcatactattttctgcatttaggtgtttggtttcttagtcaccctcctttctatttgggaggcctccttgagacatattgtttggctttttagggacaaagtgactaagtttaggaggtaggaaccaacaccctcttagtgcatgttgtatggacactaaagttacttttgaactacatatgttacgtgtaaacacgatccagtaaaagaatgtttttatcatagcctctagaatatatatttctttggcagtagaatgattctaatgccttgctatttacaacttgatttaggtctttgcaggggcggcaggagatgtaaatctacatggccaccgtcgtggctgccatcacgatgcttctttttgttgtatacttcacctatcctaacaagcggtcgatgatgcaagaaattacaaaggcgaatgggattctctgggtttgattttacacgtgataatcatgtatttttttcctgttctcgtctgggttgattaatcattaaacgtttggagtttctatatctgtatgaaatagcatctgttgcaacataagaatatggttgacactagacgtctacaagggctggtctagaatgccgtgctattgtcattattttttaagtttaccaagagctatctgaacgcgttccatttggattgaggtgtattgaagtggatggatgaggattttgattagtagtggatttattccctcttaatccttgtagatttaggagaaaacgaacatggcctaaattatttttttcatttcttccctggtggaatattattagacgccagttacatttaatgctcggtcgacaaagttgtcatgaaaatcatggaatcatttggtttctttgggatttttatttttaaccctcaaaaaaataaaaaa

SEQ ID NO: 215667 - DNA, 4267 bp, Zea Mays
gtggaaactgccaacgcgctaggatccgtagcggacggcgatctgtcttcgactgctctctgccatcgctgtggcgaccccgacggagccaagcgacggttcatcttcttgcggcggcggcgacctcgagctgattgcagcgagaaggcggggacaaatcgatctcccctagctggctacacccgatggagccgagggttccttgcgttgacggcggcggcgacggcctcgagctgagggccgcgagaaggcatcgacgggagggcgggcgaatccacgtcctcgatgcgcaaatcctggagcctcagcgacagagatcgaatccattcaggaacatctttcatctattaactcaacgagaggtcttacctcgaacgaaacaccatgctaaaaggatatggaataactctccaaaatatgatcctcatttaattgagttaaggttttcagatgcagatgctaaacttggtattttatcttgggcagaatcactgtccctgcatcgctggtctgccaagtattgccctcttttgccacctcctaggtcaactattgcagctgctttcagtccagatggaaaatcacttgcgtccacacatggtgaccatactgtgaaaataatggactgccatacagggaaatgtgtgaaggttttgagtggacatcgacgcactccttgggtggtcaggtaccatcctttacattctgacattctggctagtggaagtttggatcatgaggttcgtctgtgggatgctaatacttcagactgtattggatcacaagacttccatcggccaattgcgtccattgcatttcatggaagaggagagattctggcagttgcatcaggtcacaaattgtacatatggaactacaataagagagatgatgcttctgtcccaaccatcatactaaggacccgccgttcgttgagagctgtgcattttcacccgcatggcgctccatatcttctaacagcagaggttaataatatagagtctgcagactcaccgctgactctggcaagatcatctggatattcaaactacccttcggccctgctggtgtcaaacactaattctagattctgtccacttcctgagtccaatgtgacgtcaccgtgcttactgtggcctgcgtacctcagagatgatgggattttacatgtgcttggcaatgccagtagttcaaccattgtgcagcagagatcatcattagttcaaccttccacatcagatactgcaaatctacagcttgaacagtttgctacccctatggatgtatgtcctggagagccaacttcatttaataacatatcagatgcagtaactgtgcctacttcaaatgcaattgaaatgcatggtgctggcggccagtctaacccaagactgcagggcagcagctctattagtaatcttgagaggttcagtgctagagatgctttgcaagtgtcttccctgagcagcattgagccaatcccatcaacagctgggtcttcgggatccaattcacgccgtgctatgccactgaatatgctcctcactggtggattagatgttcaaatgttccaaagaaatgtaggaagtggacaacaggatcattttctcttcggcgactcaagtaactgggaagtgccatttgtgcagggttttttgatgacccaaaaccatacaggtttgcaccctgcacttgtgaacaataatgtccttgaagacctatctggtgctggtactgcagggattaacaactcaactagggaatcatcacacatgcataactttggacgtccaggtgcttcatcatcgattccccttacttctggcagttctaggagaccaaatcgacactatgcctcacgctctgtgcctggggttgggagtttgctcctagtaggtcctcaaattgacgaagctgaagctcatgctgcttcactaggtgctggttcagaaatcactgcgtcgatgcttgctcctggtactgaattgccttgtacagtgaagctcagaatatggcggcatgatatcaatgaaccatgtgttcctttagcacctgaggcatgccgtctgacgatttctcatgccgttctttgcagtgaaatgggtgcccatttttccccatgtggacgatttcttgtagcctgcgttgcatgtttgttgcctcaaacagaaggtggccgtggtagccaattgcctgtgccttatgaagaggctggatcatcaccaactcgtcatccacttccctctcaccgagttatttatgagcttcgggtttattcgcttgaggaggagacatttggggatattcttgcttctagagcaataagggcagcacattgcttaacttccattcagttctcacctacatccgaacacatacttttggcatatggtcgtcgtcatagctcgctgcttaggagcatagtcgtggagggagaaaatgggattcctgtatatactattttggaggtatatagagtttcagatatggagcttgtgagagtgcttcctagtgccgaagatgaagtcaatgttgcatgctttcatcctttaccaggaggtggccttgtttatgggactaagggaagctcaggatccttcaacacaatggcgcaaacatgataaacatggggtcgggttgcttcattgaggaaaatatggttgagatccagaggtatgcattggaatgctgaataagcttgaccacatcatgtgaattttaggcttacttccatgaaagacttctctgcaggcttcatctgtgtgatccgtccaagggaaaacattagatccatctccaactacattagaacagataattctcaatgggctctttcaagtgccttggggactggtatgggactctttgcactttaggattaactaatattcctggtatggatataatatcttttctctgctgctagctacaagggacctgagtatcttaagtcgattttgtacacagtaggataatcaagtaattaatgctgtaggaaacattggtatccagtttactgattggaatcgtgtccttacaagcatcattagctcttacaacttgctgaagcaagctgccctacaaattttttccgctggatcaggagccttgaatatttgtccagttttgcaggtgggcttggatgtccaataagctagctcgattttgacagtaggttgctttatgtttttaaccctttggagcgcctttgcaacctttgatcatccttatctgcctttacgttttttgtgtggcaaccgtgctatttatggttaagtctgtctaggttaatcatgttttgtaaaaaatggatatggttctagtggaaaattgtttttctaaccttggaaaaattattctagtcccgttcatactattttctgcatttaggtgtttggtttcttagtcaccctcctttctatttgggaggcctccttgagacatattgtttggctttttagggacaaagtgactaagtttaggaggtaggaaccaacaccctcttagtgcatgttgtatggacactaaagttacttttgaactacatatgttacgtgtaaacacgatccagtaaaagaatgtttttatcatagcctctagaatatatatttctttggcagtagaatgattctaatgccttgctatttacaacttgatttaggtctttgcaggggcggcaggagatgtaaatctacatggccaccgtcgtggctgccatcacgatgcttctttttgttgtatacttcacctatcctaacaagcggtcgatgatgcaagaaattacaaaggcgaatgggattctctgggtttgattttacacgtgataatcatgtatttttttcctgttctcgtctgggttgattaatcattaaacgtttggagtttctatatctgtatgaaatagcatctgttgcaacataagaatatggttgacactagacgtctacaagggctggtctagaatgccgtgctattgtcattattttttaagtttaccaagagctatctgaacgcgttccatttggattgaggtgtattgaagtggatggatgaggattttgattagtagtggatttattccctcttaatccttgtagatttaggagaaaacgaacatggcctaaattatttttttcatttcttccctggtggaatattattagacgccagttacatttaatgctcggtcgacaaagttgtcatgaaaatcatggaatcatttggtttctttgggatttttatttttaaccctcaaaaaaataaaaaa

SEQ ID NO: 215668 - DNA, 3346 bp, Zea Mays
gtggaaactgccaacgcgctaggatccgtagcggacggcgatctgtcttcgactgctctctgccatcgctgtggcgaccccgacggagccaagcgacggttcatcttcttgcggcggcggcgacctcgagctgattgcagcgagaaggcggggacaaatcgatctcccctagctggctacacccgatggagccgagggttccttgcgttgacggcggcggcgacggcctcgagctgagggccgcgagaaggcatcgacgggagggcgggcgaatccacgtcctcgatgcgcaaatcctggagcctcagcgacagagatcgaatccattcaggaacatctttcatctattaactcaacgagaggtcttacctcgaacgaaacaccatgctaaaaggatatggaataactctccaaaatatgatcctcatttaattgagttaaggttttcagatgcagatgctaaacttggtattttatcttgggcagaatcactgtccctgcatcgctggtctgccaagtattgccctcttttgccacctcctaggtcaactattgcagctgctttcagtccagatggaaaatcacttgcgtccacacatggtgaccatactgtgaaaataatggactgccatacagggaaatgtgtgaaggttttgagtggacatcgacgcactccttgggtggtcaggtaccatcctttacattctgacattctggctagtggaagtttggatcatgaggttcgtctgtgggatgctaatacttcagactgtattggatcacaagacttccatcggccaattgcgtccattgcatttcatggaagaggagagattctggcagttgcatcaggtcacaaattgtacatatggaactacaataagagagatgatgcttctgtcccaaccatcatactaaggacccgccgttcgttgagagctgtgcattttcacccgcatggcgctccatatcttctaacagcagaggttaataatatagagtctgcagactcaccgctgactctggcaagatcatctggatattcaaactacccttcggccctgctggtgtcaaacactaattctagattctgtccacttcctgagtccaatgtgacgtcaccgtgcttactgtggcctgcgtacctcagagatgatgggattttacatgtgcttggcaatgccagtagttcaaccattgtgcagcagagatcatcattagttcaaccttccacatcagatactgcaaatctacagcttgaacagtttgctacccctatggatgtatgtcctggagagccaacttcatttaataacatatcagatgcagtaactgtgcctacttcaaatgcaattgaaatgcatggtgctggcggccagtctaacccaagactgcagggcagcagctctattagtaatcttgagaggttcagtgctagagatgctttgcaagtgtcttccctgagcagcattgagccaatcccatcaacagctgggtcttcgggatccaattcacgccgtgctatgccactgaatatgctcctcactggtggattagatgttcaaatgttccaaagaaatgtaggaagtggacaacaggatcattttctcttcggcgactcaagtaactgggaagtgccatttgtgcagggttttttgatgacccaaaaccatacaggtgcttcatcatcgattccccttacttctggcagttctaggagaccaaatcgacactatgcctcacgctctgtgcctggggttgggagtttgctcctagtaggtcctcaaattgacgaagctgaagctcatgctgcttcactaggtgctggttcagaaatcactgcgtcgatgcttgctcctggtactgaattgccttgtacagtgaagctcagaatatggcggcatgatatcaatgaaccatgtgttcctttagcacctgaggcatgccgtctgacgatttctcatgccgttctttgcagtgaaatgggtgcccatttttccccatgtggacgatttcttgtagcctgcgttgcatgtttgttgcctcaaacagaaggtggccgtggtagccaattgcctgtgccttatgaagaggctggatcatcaccaactcgtcatccacttccctctcaccgagttatttatgagcttcgggtttattcgcttgaggaggagacatttggggatattcttgcttctagagcaataagggcagcacattgcttaacttccattcagttctcacctacatccgaacacatacttttggcatatggtcgtcgtcatagctcgctgcttaggagcatagtcgtggagggagaaaatgggattcctgtatatactattttggaggtatatagagtttcagatatggagcttgtgagagtgcttcctagtgccgaagatgaagtcaatgttgcatgctttcatcctttaccaggaggtggccttgtttatgggactaaggaagggaagctcaggatccttcaacacaatggcgcaaacatgataaacatggggtcgggttgcttcattgaggaaaatatggttgagatccagaggtatgcattggaatgctgaataagcttgaccacatcatgtgaattttaggcttacttccatgaaagacttctctgcaggcttcatctgtgtgatccgtccaagggaaaacattagatccatctccaactacattagaacagataattctcaatgggctctttcaagtgccttggggactggtctttgcaggggcggcaggagatgtaaatctacatggccaccgtcgtggctgccatcacgatgcttctttttgttgtatacttcacctatcctaacaagcggtcgatgatgcaagaaattacaaaggcgaatgggattctctgggtttgattttacacgtgataatcatgtatttttttcctgttctcgtctgggttgattaatcattaaacgtttggagtttctatatctgtatgaaatagcatctgttgcaacataagaatatggttgacactagacgtctacaagggctggtctagaatgccgtgctattgtcattattttttaagtttaccaagagctatctgaacgcgttccatttggattgaggtgtattgaagtggatggatgaggattttgattagtagtggatttattccctcttaatccttgtagatttaggagaaaacgaacatggcctaaattatttttttcatttcttccctggtggaatattattagacgccagttacatttaatgctcggtcgacaaagttgtcatgaaaatcatggaatcatttggtttctttgggatttttatttttaaccctcaaaaaaataaaaaa

SEQ ID NO: 215669 - DNA, 2012 bp, Zea Mays
acctcattcctcaaaccaaacaaggaacatctttcatctattaactcaacgagaggtcttacctcgaacgaaacaccatgctaaaaggatatggaataactctccaaaatatgatcctcatttaattgagttaaggttttcagatgcagatgctaaacttggtattttatcttgggcagaatcactgtccctgcatcgctggtctgccaagtattgccctcttttgccacctcctaggtcaactattgcagctgctttcagtccagatggaaaatcacttgcgtccacacatggtgaccatactgtgaaaataatggactgccatacagggaaatgtgtgaaggttttgagtggacatcgacgcactccttgggtggtcaggtaccatcctttacattctgacattctggctagtggaagtttggatcatgaggttcgtctgtgggatgctaatacttcagactgtattggatcacaagacttccatcggccaattgcgtccattgcatttcatggaagaggagagattctggcagttgcatcaggtcacaaattgtacatatggaactacaataagagagatgatgcttctgtcccaaccatcatactaaggacccgccgttcgttgagagctgtgcattttcacccgcatggcgctccatatcttctaacagcagaggttaataatatagagtctgcagactcaccgctgactctggcaagatcatctggatattcaaactacccttcggccctgctggtgtcaaacactaattctagattctgtccacttcctgagtccaatgtgacgtcaccgtgcttactgtggcctgcgtacctcagagatgatgggattttacatgtgcttggcaatgccagtagttcaaccattgtgcagcagagatcatcattagttcaaccttccacatcagatactgcaaatctacagcttgaacagtttgctacccctatggatgtatgtcctggagagccaacttcatttaataacatatcagatgcagtaactgtgcctacttcaaatgcaattgaaatgcatggtgctggcggccagtctaacccaagactgcagggcagcagctctattagtaatcttgagaggttcagtgctagagatgctttgcaagtgtcttccctgagcagcattgagccaatcccatcaacagctgggtcttcgggatccaattcacgccgtgctatgccactgaatatgctcctcactggtggattagatgttcaaatgttccaaagaaatgtaggaagtggacaacaggatcattttctcttcggcgactcaagtaactgggaagtgccatttgtgcagggttttttgatgacccaaaaccatacaggtttgcaccctgcacttgtgaacaataatgtccttgaagacctatctggtgctggtactgcagggattaacaactcaactagggaatcatcacacatgcataactttggacgtccaggtgcttcatcatcgattccccttacttctggcagttctaggagaccaaatcgacactatgcctcacgctctgtgcctggggttgggagtttgctcctagtaggtcctcaaattgacgaagctgaagctcatgctgcttcactaggtgctggttcagaaatcactgcgtcgatgcttgctcctggtactgaattgccttgtacagtgaagctcagaatatggcggcatgatatcaatgaaccatgtgttcctttagcacctgaggcatgccgtctgacgatttctcatgccgttctttgcagatttggggatattcttgcttctagagcaataagggcagcacattgcttaacttccattcagttctcacctacatccgaacacatacttttggcatatggtcgtcgtcatagctcgctgcttaggagcatagtcgtggagggagaaaatgggattcctgtatatactattttggagttgcatgatactttttgatacatgggattcaaaatgatttgcttattat

SEQ ID NO: 215670 - DNA, 1062 bp, Zea Mays
  misc_feature (1062)..(1062): n is a, c, g, or t
atggttcttctgaatccaggtcacatgtcaggtttgcatggataaggagagcctgaaggaatacattctatgcgaatataaccgtgatgctgactcctaccgtgcctgatctgaatgaataaacatgacccacaccagaactttaaatcctttttggaggaagctcttattttttccctcaaacaccaggagagctgcatatctttaggctgtctccagcaaggttctctaaatttcgtcctctaaagaaatattctttgtcctttacagcatcctctaaaaaattttgtcctctatatcttcttcatctccggcaacatcctctaaaaccggtcctctatatctacagttttaacataatccatatattattaataaaacaaatatccgtgatcattgcatgcatattaatccgtatttatttacaaaattacgagacatttaaatactgcaaattattttttattcatattaataaatatgttgtacagctgcactcgcacagtggcacaattgcattttttctctttgttggatgctcgtccggtgactttcgcatcgcgctgccgcttttcctcactggccgagctcgtccgctgctgctcctcctcgatcgccatgcaccacgccgcagacgagctcctccgttcttctgctcctcgcctactgtcgcgctcgtgctcctccaggcggtccgccgcacaagctcgtccttgtccctggtgatttgctgcgcgggctgcttctcgtctttggcgatcggcgctggcgatcggcgcgtgtgctcctcctcgtccccgacgattcgattcactggacgggcgggctgcttctcgtcttcggcggcggccgatgtctattgtgttgcccacgctcattggccggatagcggacgcacaaccatccgccacaaatagcgtgcgcaaggaccatcctctactttaccggaacctttacatccttgttggacacgatacaggatgtttggttctctaaatttggcgtacaggacggtatagcggcccttgctggagcaagtcttatatattagagagaaaaaan

SEQ ID NO: 215671 - DNA, 2641 bp, Zea Mays
cttaaagagatcacaaataacttttattgaatcattttcatgtggataatcatcaccgagccggttacctagttcgttcgatatcaagccgtaactactacacaaaacacaagttacacaaccccggctcccgctggcgcacacgctcctcacgtgccgcacccgaaacgtcccaagaaaaaagggagaaaactcaccgaaaagtctacccacctgggccctggccacctcccccctgctcgctcacgacccccaacacgcgagtacgcgacgacgcccctcacaaaaacaggggccaaaaaggataaaaaaaagtggggaaaagaacgccgggaatgggcaagcagcagcaggcgccaccggcgcggcggtccccggcgatgtcggcgcctccgccgccgaagcgccggaagaagaagggccgcccgtccctgctcgacctccagaagcggagcctccgcctcgagcagcagcagctaccccaggggcgccgctccaaccgcaggagcgccggctccgcggacgaggacgacgatgggcccgcctccggctccggccgccgcgagaagaagctgcgcctcgtcatgggcctccacgacggatcagccaagggagaaaagatgaggaaagcgacggatgggcgtgaagagccgtcagattccgggcccacaacacctttaccgaacaaaaagttgttgctcttcatcctcgacaggctacagaagaaggatacgtatggtgtattttcagagcctgttgatcctgaagagctacctgactatcatgacattataaagcatccaatggatttttcgacaataagaaagaagctcgataaggaggcctatttcaacttggagcaatttgaggatgatgtgttcctgataacctccaacgcgatgtgttacaattcaccagatacaatatactatcgacaggcacgaggtattcaagagattgctaaaaaggattttgagaatcttaggcaagatagtgatgccagtgaaccagaaccggaaccagaacgagaacccaagccggagcccgaaccagaagaaccaaagccacagcctcgccggggcaggcctccaaacaagaataatgccaaacagaaagttgggaagccaccagcagaacgtgccactgcagacttttctggtgcaacacttgctactgcggcaaatattggacggcatgcacaggcagatgttgatctgtcacgaagagtaatggataaagcgatgattgcggatgtgttgagagcttcttttgccaacctaaggaatgagcacaactggtctggtgagcggaagtttgaaagacttgaagcttactcaggttatgggggtacatggtctgcaaaaacggggaagaggccgattctgatggaagatagtcgccggagcacatattatgagactcaaccatccagttcaatatatgagctgccggtatcgtcctcctacaatgggaccgagaagctgctagtaccagttggggttcagttaccgcagtcctattcccacagcctggcacgttttgctgcacaacttggccctgttggctgggaaattgcgtcaagacgacttgaacggagccttgctcctggaacaaagtttggtcgtggctgggtaggagatggtgaaacgccgccgaacccatttcagacacctgtactcgctgcattttcagaaacaatggcaccaccgagcagtatagcagcatcaggtgagcagccatctatgaacgcgccccccgccacagaggcctgtgctggcagcataagccatcgggtgggatctcagccatgtgcttctatcagcacagtgcagacgataaattccgaagcattagcaagccagcaatgcggatccgtaccacaggtttctataaaccgaggcgaacgtgctgttgagatgaagggcagcactaataatcttcacgggcacccggccatgccgcaaactatgaatggtttcaatgccgttccaggacgggtgctgttcccacctgcggctcaactggtggtgagtcagatgcagacacatacggctgattgagtaacaagtagccattggatcaacattgtcaacatggcaattgaacattgcccgcttccattcatcagtcgcggtcaccaagcgacgacggccttaagccgcaccctgccagtggcttggcgcccaccacattgggggtgtctggtcgctgttgaatcgtcgcgcctcaacctggcgctgcaactgtgaatctgttgtgtaattgcgtaagtaggaattaggatgataacgtgcatagatgtgttgggcggatggtgtaacagcggtgagttgcagtttggagatttagcgattctgaatgtgtagtagaaaaaccacaggggaaacgaaacaacatctgtatagactattcaggatcaggaggtttttttagcgtttcggcgactagcaacaggtgcgatcgagcatgaaatcgtgcgaaccagattgtctgttgccggtattgtttctatatacatcaatctgacggtgttctgggttgcaggtaccacagtccacagtgtaggtaagaagtagaatcatgcggcaacaacatgaatgccctgttccaatctcgcgagataaactttagcagctttttt

SEQ ID NO: 215672 - DNA, 1505 bp, Zea Mays
agatctctgtacttggtaactgggcctgggagaaaagatgaggaaagcgacggatgggcgtgaagagccgtcagattccgggcccacaacacctttaccgaacaaaaagttgttgctcttcatcctcgacaggctacagaagaaggatacgtatggtgtattttcagagcctgttgatcctgaagagctacctgactatcatgacattataaagcatccaatggatttttcgacaataagaaagaagctcgataaggaggcctatttcaacttggagcaatttgaggatgatgtgttcctgataacctccaacgcgatgtgttacaattcaccagatacaatatactatcgacaggcacgaggtattcaagagattgctaaaaaggattttgagaatcttaggcaagatagtgatgccagtgaaccagaaccggaaccagaacgagaacccaagccggagcccgaaccagaagaaccaaagccacagcctcgccggggcaggcctccaaacaagaataatgccaaacagaaagttgggaagccaccagcagaacgtgccactgcagacttttctggtgcaacacttgctactgcggcaaatattggacggcatgcacaggcagatgttgatctgtcacgaagagtaatggataaagcgatgattgcggatgtgttgagagcttcttttgccaacctaaggaatgagcacaactggtctggttatgggggtacatggtctgcaaaaacggggaagaggccgattctgatggaagatagtcgccggagcacatattatgagactcaaccatccagttcaatatatgagctgccggtatcgtcctcctacaatgggaccgagaagctgctagtaccagttggggttcagttaccgcagtcctattcccacagcctggcacgttttgctgcacaacttggccctgttggctgggaaattgcgtcaagacgacttgaacggagccttgctcctggaacaaagtttggtcgtggctgggtaggagatggtgaaacgccgccgaacccatttcagacacctgtactcgctgcattttcagaaacaatggcaccaccgagcagtatagcagcatcaggtgagcagccatctatgaacgcgccccccgccacagaggcctgtgctggcagcataagccatcgggtgggatctcagccatgtgcttctatcagcacagtgcagacgataaattccgaagcattagcaagccagcaatgcggatccgtaccacaggtttctataaaccgaggcgaacgtgctgttgagatgaagggcagcactaataatcttcacgggcacccggccatgccgcaaactatgaatggtttcaatgccgttccaggacgggtgctgttcccacctgcggctcaactggtggtaccacagtccacagtgtaggtaagaagtagaatcatgcggcaacaacatgaatgccctgttccaatctcgcgagataaactttagcagctttttt

SEQ ID NO: 215673 - DNA, 1891 bp, Zea Mays
gaacattcttgatgttgaagcacaaaacccttgctgatgcacatggagacgtttgtaatgatcataataaaaaggctcaaggatgccaaccttttcgtgtcacaaggagggctcatcattctagattttttctttctaatttctgttgtgattggtttgcttgctgagtcttcagaggaagtaaagacagacactgacaggaatgtcttagttatgtttgatatcctcaggctttcatttgcccaaacagttgaaaatgtttttgcactatctttcttagtgaaagatggtagggtggaaataactgtagatgatagcaggcatatagtacggccaaggaatgcacctgctgctagcgctatagcctcaggagaagtctcatacagtcattttgtttttagatttgacttcaaggactggaagcttatgaaagaagttgttacagagggagaagagctgttgccacataggacttcccagagcaatctttgcaacgaagaaaacgaccaaataaatctggaggcacgtgcgcaaataacgcctatcaggaaactcacccggaaccgaggattggtcttgcaggatcatgtagtcgaggaaactcctgaagagaaccaagcgtttaagcgcaggcgcctttttaggaatcaagattgacctagcaattgcttggcatgagtagtgtaggcaggcaacctggcttgtgttgtatgcaaaaaattgcctgagcttgagtaacgtgtctttcactaggtctgttgtgccatgctgtcttgttcttggcacagctcgtgcttatctgaacttccagttgtgccagcggagtagggctgtaattataaattgtttgaagttctggtcacatcttgcaactacagaatggtgtttgtagggctgagtgtaactagccagcttggctcgtgttgggtcattaagggtgtgtttggttggatgtatatggaaggatggaaagggacggccacagattctatagtgtttggattagagtcgtgtgggacaagataaacatcggagtaattttggtggcggtgtgattcaaaaaattgaggagacgctatcgtccccgtgtcatactactttgatctcaaactaaacacattctaactcatttatcatggcaagatgtgtctcgggtaagcttgttaggctgtcatagtttatccatcctatctcttattttaaattttatttttttgtaaatattataatttacagtgcaaaacagtgttttacacgtctatatagacgatctactacaaacaaccttaagaaatgagttaaaagttcaactcaacttgcctttgctcgttaacatcttgagcaaatcaatgctaaagagaagttgctcaaatcaatgcgtgattgtgatccttcgtctgtgcaccactagattgtaagagttgtcttcttgttttaattttttttgttattcctaccattaaattgggcattcaatacctgttcattatctttatgcttatgcaatccaataatgatggaaaataactgacttggctgctctcttgagttgtggcaacggaagttccaggccccgttgcagctgggagtggttttatactcgctgatgacatcaagtcttaggtgcttccattgatcaataactcagggaaatatggagggatcatgatgtggttcaagtactatgatgatcaagatggctacaattcttgagtgaagagtgatgtttaggttgttgcctatggtgtgtgacaatatctgtgtgttacttgtgtgtatgtgagaaattatgtgactctggagtctggatagtgcaataagtattactcaagtatatgattgaatcttatgtcatactattcaaattatgtcatattgtatcttttaaggt

SEQ ID NO: 215674 - DNA, 1429 bp, Zea Mays
  misc_feature (1428)..(1429): n is a, c, g, or t
gttccccatcgcgacccttgcaccgggtccacgctgaccctcttcacgggggcggcgaaagatctcagccgcgacgggttcgagcgccggcgagcgctcgcccacctgggcctataaactggccccggctcctcttctcgcgtcgcagagcccagcctcgggatgacgtggcgtatcgcgacaccgccacagctcactcaaccgcgcgggtctccaacgaaccccttgtagaagcttccaaaccctagcgcaggaggaagaggagcgtggaggagctccaggaatggcgaaggcgaggaagcagaagggtgacggtagcggtacgggcggaggcgccaccgttctccaccagaaactctgcctctccatcgacatggagaaccagctgatctacgggtacactgagataaaagctcttctagctgaaaacgacacatttgctctacatgctgacaatatgacgatcaggagcattctggtggatggtgaaactgttgagttcgactattcccctcattggaaaaatgaaactgatcaacctaattggtcttcaatatcatgtttgaacactgttgctgatgctgcatgttcaacatatacttcgtctctaaatcgagaagctacaccaaatcttattgtgtcatctgagagatcaatcaagtcaatgattgagcagcagttagatgaaaacagtgaaaaatatgaagaaaatagtggaaggcttgaaaaacatggtggaaagaccatccaaacttcctatgatcaaattgttaatggctgcaatggttctgcagtggaagagggaatagaaaattctgcagtggaagaagggaaaaaaaaggaaaaggaaaaagagaaggaagagaaaaatggaaatgagaagagcaaggaaaatggaaatgagactgaaaatgaaaaggtgaagaacataaaactggttcacatagattatattttggagaaggctgaaactggcattcactttgttggcaatgtcatgcatagcagtaatcagataaggcgggcacactgttggtttccttgtgttgatactgccacacaacgctatttgacttagaatttacagtcagcacagatttcatcgctgtcagcaacggtgacttgctttaccaggtcttaagtaaggaagatccttcaaaaaaaacctatgtgtataaattgaacactccagttagtgcacagtggatatccttggttgttggtccacttgaaattctccttgacagaaatgacataaatgtgtcacacatctgtttatctcctgccttgtcaaagcttcagaacactattgcatttttccacgatgcatacagctgttatgaagactatcttgctgcaccgtttcccttaggtttatacaagcagatttttcttccatctgaaatgacagtattaccggcaagcttnn

SEQ ID NO: 215675 - DNA, 1346 bp, Zea Mays
  misc_feature (1345)..(1346): n is a, c, g, or t
gttccccatcgcgacccttgcaccgggtccacgctgaccctcttcacgggggcggcgaaagatctcagccgcgacgggttcgagcgccggcgagcgctcgcccacctgggcctataaactggccccggctcctcttctcgcgtcgcagagcccagcctcgggatgacgtggcgtatcgcgacaccgccacagctcactcaaccgcgcgggtctccaacgaaccccttgtagaagcttccaaaccctagcgcaggaggaagaggagcgtggaggagctccaggaatggcgaaggcgaggaagcagaagggtgacggtagcggtacgggcggaggcgccaccgttctccaccagaaactctgcctctccatcgacatggagaaccagctgatctacgggtacactgagataaaagctcttctagctgaaaacgacacatttgctctacatgctgacaatatgacgatcaggagcattctggtggatggtgaaactgttgagttcgactattcccctcattggaaaaatgaaactgatcaacctaattggtcttcaatatcatgtttgaacactgttgctgatgctgcatgttcaacatatacttcgtctctaaatcgagaagctacaccaaatcttattgtgtcatctgagagatcaatcaagtcaatgattgagcagcagttagatgaaaacagtgaaaaatatgaagaaaatagtggaaggcttgaaaaacatggtggaaagaccatccaaacttcctatgatcaaattgttaatggctgcaatggttctgcagtggaagagggaatagaaaattctgcagtggaagaagggaaaaaaaaggaaaaggaaaaagagaaggaagagaaaaatggaaatgagaagagcaaggaaaatggaaatgagactgaaaatgaaaagagtaatcagataaggcgggcacactgttggtttccttgtgttgatactgccacacaacgctgtccatttgacttagaatttacagtcagcacagatttcatcgctgtcagcaacggtgacttgctttaccaggtcttaagtaaggaagatccttcaaaaaaaacctatgtgtataaattgaacactccagttagtgcacagtggatatccttggttgttggtccacttgaaattctccttgacagaaatgacataaatgtgtcacacatctgtttatctcctgccttgtcaaagcttcagaacactattgcatttttccacgatgcatacagctgttatgaagactatcttgctgcaccgtttcccttaggtttatacaagcagatttttcttccatctgaaatgacagtattaccggcaagcttnn

SEQ ID NO: 215676 - DNA, 1392 bp, Zea Mays
  misc_feature (1391)..(1392): n is a, c, g, or t
cgcgcgccgaggctgccgttccccatcgcgacccttgcaccgggtccacgctgaccctcttcacgggggcggcgaaagatctcagccgcgacgggttcgagcgccggcgagcgctcgcccacctgggcctataaactggccccggctcctcttctcgcgtcgcagagcccagcctcgggatgacgtggcgtatcgcgacaccgccacagctcactcaaccgcgcgggtctccaacgaaccccttgtagaagcttccaaaccctagcgcaggaggaagaggagcgtggaggagctccaggaatggcgaaggcgaggaagcagaagggtgacggtagcggtacgggcggaggcgccaccgttctccaccagaaactctgcctctccatcgacatggagaaccagctgatctacgggtacactgagataaaagctcttctagctgaaaacgacacatttgctctacatgctgacaatatgacgatcaggagcattctggtggatggtgaaactgttgagttcgactattcccctcattggaaaaatgaaactgatcaacctaattggtcttcaatatcatgtttgaacactgttgctgatgctgcatgttcaacatatacttcgtctctaaatcgagaagctacaccaaatcttattgtgtcatctgagagatcaatcaagtcaatgattgagcagcagttagatgaaaacagtgaaaaatatgaagaaaatagtggaaggcttgaaaaacatggtggaaagaccatccaaacttcctatgatcaaattgttaatggctgcaatggttctgcagtggaagagggaatagaaaattctgcagtggaagaagggaaaaaaaaggaaaaggaaaaagagaaggaagagaaaaatggaaatgagaagagcaaggaaaatggaaatgagactgaaaatgaaaaggtgaagaacataaaactggttcacatagattatattttggagaaggctgaaactggcattcactttgttggcaatgtcatgcatagcagtaatcagataaggcgggcacactgttggtttccttgtgttgatactgccacacaacgctgtccatttgacttagaatttacagtcagcacagatttcatcgctgtcagcaacggtgacttgctttaccagttagtgcacagtggatatccttggttgttggtccacttgaaattctccttgacagaaatgacataaatgtgtcacacatctgtttatctcctgccttgtcaaagcttcagaacactattgcatttttccacgatgcatacagctgttatgaagactatcttgctgcaccgtttcccttaggtttatacaagcagatttttcttccatctgaaatgacagtattaccggcaagcttnn

SEQ ID NO: 215677 - DNA, 1283 bp, Zea Mays
  misc_feature (1282)..(1283): n is a, c, g, or t
cgcaaagacacagccgcagcagtcaggtattcacgcgcgccgaggctgccgttccccatcgcgacccttgcaccgggtccacgctgaccctcttcacgggggcggcgaaagatctcagccgcgacgggttcgagcgccggcgagcgctcgcccacctgggcctataaactggccccggctcctcttctcgcgtcgcagagcccagcctcgggatgacgtggcgtatcgcgacaccgccacagctcactcaaccgcgcgggtctccaacgaaccccttgtagaagcttccaaaccctagcgcaggaggaagaggagcgtggaggagctccaggaatggcgaaggcgaggaagcagaagggtgacggtagcggtacgggcggaggcgccaccgttctccaccagaaactctgcctctccatcgacatggagaaccagctgatctacgggtacactgagataaaagctcttctagctgaaaacgacacatttgctctacatgctgacaatatgacgatcaggagcattctggtggatggtgaaactgttgagttcgactattcccctcattggaaaaatgaaactgatcaacctaattggtcttcaatatcatgtttgaacactgttgctgatgctgcatgttcaacatatacttcgtctctaaatcgagaagctacaccaaatcttattgtgtcatctgagagatcaatcaagtcaatgattgagcagcagttagatgaaaacagtgaaaaatatgaagaaaatagtggaaggcttgaaaaacatggtggaaagaccatccaaacttcctatgatcaaattgttaatggctgcaatggttctgcagtggaagagggaatagaaaattctgcagtggaagaagggaaaaaaaaggaaaaggaaaaagagaaggaagagaaaaatggaaatgagaagagcaaggaaaatggaaatgagactgaaaatgaaaaggtgaagaacataaaactggttcacatagattatattttggagaaggctgaaactggcattcactttgttggcaatgtcatgcatagcagtaatcagataaggcgggcacactgttggtttccttgtgttgatactgccacacaacgctgtccatttgacttagaatttacagtcagcacagatttcatcgctgtcagcaacggtgacttgctttaccagctgttatgaagactatcttgctgcaccgtttcccttaggtttatacaagcagatttttcttccatctgaaatgacagtattaccggcaagcttnn

SEQ ID NO: 215678 - DNA, 1395 bp, Zea Mays
  misc_feature (1394)..(1395): n is a, c, g, or t
ccgcaaagacacagccgcagcagtcaggtattcacgcgcgccgaggctgccgttccccatcgcgacccttgcaccgggtccacgctgaccctcttcacgggggcggcgaaagatctcagccgcgacgggttcgagcgccggcgagcgctcgcccacctgggcctataaactggccccggctcctcttctcgcgtcgcagagcccagcctcgggatgacgtggcgtatcgcgacaccgccacagctcactcaaccgcgcgggtctccaacgaaccccttgtagaagcttccaaaccctagcgcaggaggaagaggagcgtggaggagctccaggaatggcgaaggcgaggaagcagaagggtgacggtagcggtacgggcggaggcgccaccgttctccaccagaaactctgcctctccatcgacatggagaaccagctgatctacgggtacactgagataaaagctcttctagctgaaaacgacacatttgctctacatgctgacaatatgacgatcaggagcattctggtggatggtgaaactgttgagttcgactattcccctcattggaaaaatgaaactgatcaacctaattggtcttcaatatcatgtttgaacactgttgctgatgctgcatgttcaacatatacttcgtctctaaatcgagaagctacaccaaatcttattgtgtcatctgagagatcaatcaagtcaatgattgagcagcagttagatgaaaacagtgaaaaatatgaagaaaatagtggaaggcttgaaaaacatggtggaaagaccatccaaacttcctatgatcaaattgttaatggctgcaatggttctgcagtggaagagggaatagaaaattctgcagtggaagaagggaaaaaaaaggaaaaggaaaaagagaaggaagagaaaaatggaaatgagaagagcaaggaaaatggaaatgagactgaaaatgaaaagtaatcagataaggcgggcacactgttggtttccttgtgttgatactgccacacaacgctgtccatttgacttagaatttacagtcagcacagatttcatcgctgtcagcaacggtgacttgctttaccaggtcttaagtaaggaagatccttcaaaaaaaacctatgtgtataaattgaacactccagttagtgcacagtggatatccttggttgttggtccacttgaaattctccttgacagaaatgacataaatgtgtcacacatctgtttatctcctgccttgtcaaagcttcagaacactattgcatttttccacgatgcatacagctgttatgaagactatcttgctgcaccgtttcccttaggtttatacaagcagatttttcttccatctgaaatgacagtattaccggcaagcttnn

SEQ ID NO: 215679 - DNA, 524 bp, Zea Mays
cacagccgcagcagtcaggtattcacgcgcgccgaggctgccgttccccatcgcgacccttgcaccgggtccacgctgaccctcttcacgggggcggcgaaagatctcagccgcgacgggttcgagcgccggcgagcgctcgcccacctgggcctataaactggccccggctcctcttctcgcgtcgcagagcccagcctcgggatgacgtggcgtatcgcgacaccgccacagctcactcaaccgcgcgggtctccaacgaaccccttgtagaagcttccaaaccctagcgcaggaggaagaggagcgtggaggagctccaggaatggcgaaggcgaggaagcagaagggtgacggtagcggtacgggcggaggcgccaccgttctccaccagaaactctgcctctccatcgacatggagaaccagctgatctacggttgttcagtgctccttagcggggatgggttgaggcgccaggattagggtttggagctcgaggtggagcagggagttaaagatgcga

SEQ ID NO: 215680 - DNA, 2504 bp, Zea Mays
cggatccccagtcagtttctttccattcgcattcattcattcccgtttcgttcctcaccagctcctccttccagaaccccagagtctccgaccctcgattccgaaacctaccggatttgcggctgctggagtcgccgtcgtcgtgggaaaccgatcaggtggcaagtaaagcacaagggtggactgtgtggtgctcataaggaacaaccctcttcttttctggcgggagaataccaaatggcccagctgttgcaccatcaggattctgggttctatgacaaggaattacatgggtgccgatggggtattcttcaattctttggatttcgccgtcgccagcggtccgcaaagatgcaacctgacaagaaacatggtccggagaaaaacagtcgtggaagtagacgccgaagccgctcctatgctccattgaaaaacgaagacagtgaaattttggatgatgacaaaaatactgaggttacaaaaaaacagaaggcctcccaaaaaaattctggcaaggctagtttgaggtccttgattctaaggaaattatatggaaaggaaggtcaggaagaaaagatgcttccagttgcaccaaagctactccgcactatttcgacagacgacatctccatgaagcgaaagagccaccgtagcatttcaatggacggggttcttcacaaggtcccttatgggaagaaggtgtctggagatgtgatcagtgaaggtctcccccgatcagcctctgcgacgtatgatagggatggtgtgaaaccttactttggtactgctacaaagaggcatgtaaaccaaggttttcggcgttcacgttccctcagtgaatcttgggaaagttactcacgcttacttgattccatctcaagcaatgaatctaaaagagtactgacaagctctaagtctactagggttcattccccagatggccctagtgtgattgcttcactgcaaagaacttctgaagccttcaggtcccaaggtttggataaacgtgatgaaaatcttgtaactgcagaagatgcatcggcaccacattttgaagagaaaactgacgtcgatgtagatgtggaagttgctaagggtgagagctcaagcgatacggttcctggtggctctgagaatcctcctttacctgacgagtacgttgatcacaaaagtgaagaagacacatgcactgctccttcaccttcagaagctgttgatgtttcagaagaacagacagtaagttgtgatgataacaatcaggttccctcatctgaggtcaagctgtatggcgactgttcaacatcatcaggaattgacatcccagaagaacatgcagagatttatgacgataaccaaatccactcatcaacacaggctgattcatatacttctctatcttcaaagggcatcaccatttcagaagagcacacttcaacttctcatgaaaaccaaatgcacccattccagatttcaaaacccatagaaggtaccttttgtgctccttaccccggtggcgagtttgaagcagacataagtctaagctgtgaacaagaaactgaaagcccaatgtctattcttcacgtggccttctcagatgatcctgatagtccggtgaaacacaccccgctggatgatacgttgttgaacccaagaattctccatttagataatgctgatgcttcagctggcactgctgccatacaaaaaggcgattttgacggtctccaagtagatccaaggcatgaaattgagttcaaccatgtgaaggatatattcaagaagtcaagtttcagcaatgagatactgtttgatgaatggtgttcacagaacatcacagctctccaagaggtggattgccagcactacgaggccgccgcagcatcatttgacttcacggacatgtctgctgatcagctacttctgttcgacctgacaaacgaaggtctgctggacatctacaagaaatactctgtttccgagtccagattctcctggttctcctcttttgaccgaccaaaacctgtcggaaaccgtgtcctcaaggagctgtggtctggattgagctgtcatctggatgaacggccacggtccagcatcgaagtcgacacgattttgtcgaatgacctagtagccaggagcgacccctggacgactttttcgggagatgctgatcatgtggggaacaagttggtagactttgtatttgacaagcttctgactgagctcgttcttcagcttgcagagttttgagtttcaggcatttatttttgtccttttctctgcgtttattaggagttctacattgtgcaaaggcatgggatcattctgatgtacatagtacaaaattccttttgtttttcctttgagcataaggtgatctggggattagtgttgttaggtcctcctaggataggaattcagttgatgcactggtataaatgaatggaagagagagcaacatttttactccactttttgtacgtacaccttgaaagaactacttg

SEQ ID NO: 215681 - DNA, 3113 bp, Zea Mays
atgggaggagacagtggaggcaaagaaattgaaaaggttcatgaatatgacactaccaagactgtcagagaaaataacatattctcgcaagatgaaatcaacaattttcaacagtatatattgcgaataattggaagtagtcagatggctggaacctctttgactcagagtggaacaacacaatcaccaagcagtcagatgtgcacacaaatgtcgttcccatatgtgtcaaaccaggggggatacatggacctgatgatggaacagatacgtaactcacaaggagaatcagcaagtgatgaatgcaatgaaatgcatagtggcatggacacacaaaatgaaaccatgaacaacaccacactagaaaagccatgggagacatacacacaaatgattcttgagagcgacaccctgcttgcagatgcaaacatgtccaaggaaaggtgtggagcttgggaaaaagcaataaacatatgcagcataactcagaggagaatacatacaagaattttgaagtggatggatgttcaagagacatttgggggatgcattgaagccggtgcatctaaatatggtgaagcagtataccacagagatctctttgaaggaatgcatgtagaacaactacctgattgtgcaccaaatgtagatggaagggcagttgaaacatcaagtgctcgtgaaaactttgatgctgcagaatttaaaaaaacagatggaagtgaagaagagttaacagaggatcagatcgatgccttcattatgagtgagcagatagctgcattagaaggaaacaatgcaccaatagacagcaaatatacacctcaagttgggatggaatttaagaccaggggagatgcagagcacttcttattcttctatgggtttttggctggttttaaaccagcaatcacccacactttcagaacttccaacaaaaaaagaaacaatgaggttacaaaggtggagctgaaatgtaacaagcatggaaaaacaaaaaaagctgatcagcaggaacaagataattgcatagaacatcaggggagcgagaaagggccaaaaaggaatacaaatgtccaggttaaaacagactgcagagtagtcatggttataaaagaacatcaacagaagtgggtgatcgataggttagacttggaacacaatcatgatcttagaccagcagacagcaacaacatgtttagcggacataaatacatgactgaaatggaaaaaggagttatacgaacattgaaccacaacaacatacctactcgaaagatgattgctatattgtcttatctgagaggaggtatgacagcattgccgtacaaaaaaaaagatgtaagtaactacagaactaaattaaacaaggaagtaacaggaaatgatatgacacaagcactgcagtttttccaggaaaaacagaaggaagatcccaatttcttctatagaattgtcattggagaagataaaaaagtgaagcacatgttttgggccgatgggacatctttgaaatactacgagatgtatggagattgcatcagtttcgacaccacatacatggctaacaagtacaacctaccatttgcgccatttgtgggagttacagggcatgcacatacatgcttgttcgcatgtgcattcatttctgatgaaacaatagaaacattcaagtggatattcagcacattccttgaggccatgggaggaaaacaccctcgaacaataataacagatcaagataaagcaatgagaaccgcaatcaaagaggtcttccctgaaacagtgcataggaattgcttcttccacataaaaagcaaatgctaccagaaaaatggaaattgctttgcaagaaatttaggaatggcagaggactttgaggacatagttaactattcactaactgtgcatgaatttgagagggactggaagaaaatggttgaggactaccacctagaaaacaataagtatttcaacaaaatgtgggaaacaagagctaggttcataccggtatacttcaaaaatgacttcttcccattcttgcaaagtacaggaagaagcgagggcacaaactcaaggtttaaagacaatgtggcttcaacttatagtgtgattagcttcttgcgtgagtaccaaaggattgtggaacaagtgaatgtgtcagaggagtatgaggataatgaaagcaatcggaaacgtccaaaggaactaatgtttggatatacaatagagaggcaagcacaagaagcatacaataggaacatattcaaaaaattccagtcccagttgcaaacaaccccaaaactaagttacaacagaacagctgccccgcatacttttgaagtgtatccaaaaacaaaccaggaacacaaaccacataaaacaaggaggtaccttgttatggctaacctaacatatggaatggaagagttcacttatgtatgcggcaagtttgacaaggatggcattttatgctcccacatacttaaagtaatcattgaagaagggctcacgaaaatcccagaggaatacataatggacaggtggaagaaaaaacaaaaccaaaaagatacaccactgatgcatgcatcaatggcaactcatccagtactaaggcataacctattgagtcggaaagcagcattgctcacatcagcagcagcaaaaacagagaagactatgcagtatatatctgaagaattagacaaactacaagaaaaggtttgccaaatgctatcatcagaagaagttataatagggggaccttggacaggaacagtgggagggaacaatgctgaaaatcagagcagaccaatagttgaaattctgaagaaccctgaagcagtgaaacagaaaggaaggccaaaaaaacctacaaggctaaaaccaatagtagaggaaatccgcagcaagatgaagaaggcagagcagaaaaaaacaagaaaacaaacaatgcagcagcaagcccacaaggaaaagagaagaagaagatgaaaagatcagcaacttgtagtgttaccgctccgctcccacagaaccaccacccactcatgctatgaagatgcaggaaaatggagaaaaaagaacgtttcaatggggaagaagtgaaggga

SEQ ID NO: 215682 - DNA, 2458 bp, Zea Mays
atgggcaacgtctgcgtcgggcctcgattctcgaagaactgtggcttcttcggcaacttctccctgtggccctcccgctcccgcaactccggcaccccctccaaccccaccaccacctcccgctccgttcccgtggtccaggtccagccgagcgaatccgacgccaagccgcagcccgcgcagagcaccgcggctccggcacccgtcgtcatatccgagccggcacagctttcccagccgcagccagcaagcaaacccgacccgtcaccaccactgccggcgtcgcaacagcatgctcaagctcagcagcagcaggcgtcggcgccgcgtcagcagtcccggaagaaagcggcgcacatcaagcgcatctccagcgcggggctgcaggtggagtcggtgctccggcgcaagaccgacaacctcaaggacatgtacagcctgggacggaagctcgggcaggggcagttcggcaccacgtacctgtgcgtggacaaggcgacggggctggagtacgcgtgcaagtcaatcgcgaagcggaagctggtcaccgacgaggacgtggaggacgtccggcgcgagatccagatcatgcaccacctcgcggggcaccccaacatcatcgccatccgcggcgcgtacgaggactccgtggccgtgcacgtcgtcatggagctctgcgccggcggggagctgttcgaccgcatcgtgcggagggggcactacacggagcggcaggcgggggagctggcccgcgtcatcgtcgccgtcgtggaatcgtgccactcgctcggggtcatgcaccgggacctcaagccggagaacttcctcttcgtcggcaacgacgaggagtcgccgctgaagaccatcgacttcggcctctccatgttcttccgcccaggcgaggagttcacggacgtcgtcgggagcccgtactacgtggcgccggaggtgctgaagaagcgctacgggcaggaggccgacgtgtggagcgccggcgtaatcatctacatccttctctgcggggtgccgccgttctgggcggagacggagcagggcatcttcgagcaggtgctgcacggctcgctggacttcgactccgacccctggccgagcgtgtcgggggacgccaaggacctgcttcggaaggtgctcgtcagggaccccaagaagcgcctcaccgcgcaccaagtgctatgccacccgtggctgcagaccatcgcctctgcgcctgataagccgctggactctgcggtgttgtcccggctgaagcagttctcggcgatgaacaagctcaagaagatggcgttgagggtgaacaagctgcttctttcctgcgatacgatatataggtttcagggaacgaacatggatgtcagtcatcttcaattcgttgcgcaggtgatcgcggagaacctgtcggaggaggagatcgcggggctcaaggagatgttcaagatgatggacaccgacaacagtgggcagatcaatttcgaggagctcaaggccggacttgagaaagtcggtgctaacatgaaggagtccgagatatatcagctcatgcaagctgcggatatcgacaacagtggcaccatagattatggagagttcatagctgccacactgcatctcaacaaaattgaaagggaagaccatctctttgccgccttccaatactttgataaagacggcagtggatacatcacagctgatgagctgcagcaagcatgtgacgagttcggaatagaggatatcagactcgaagacatgattggcgaagtggatcaagacaatgatgggcgcatagattacaacgagttcgtcgccatgatgcaaaaaccaacagccggatatggcaagaaaggtcatcggtataaccttagcattggttttagggatgctttgaaggcaaatagctgacaatgttgcccatcatactaagtgacgtggtgttgtgcatacgtgttgtaattgtaaacggaactcgggttctgattaattcataggatctttttttgatcaaagtcctgaacccagctttattagaaagtcgccgagtttaaacgaaggaaggccacaccaacaaaccgggtgccagatggagacagacgcggaaaagttctaagacaactgaacccttctttcctcaaggctccagcagatccaaggctagcttctcagtcaccgactccgccaacaccttggacttgggtttggaaagtggcttctaggatttgatcagcattaacaagatgtttggtccggcctttttttttgttttggcccgcaaccgttcacagcgctacccgatagcgttgtttttagtttggttggaccagctggtaatcgatcacgtcgactgtcagcccatatcaactcgttaccgctcaacagagaccgtatcgattccctcacgtcgcccctcacctttcctcgtgccgcctgttgcccctccccttcc

SEQ ID NO: 215683 - DNA, 2627 bp, Zea Mays
gccatttttagctcctctcctcgtttcgctccccgaccgcgaccatctctaatccgtccacccaaacctcgaccaccaatttccatccttccacctccgatcgcctcccggcggaacgtggtgcgttccgccgtcgccgccgcattgccatgcccctgcagactcgggagggcaggaggaggaggaggaaacacgagtacacggggttgtgatcgccgccgcggcctgcccgatgggcaacgtctgcgtcgggcctcgattctcgaagaactgtggcttcttcggcaacttctccctgtggccctcccgctcccgcaactccggcaccccctccaaccccaccaccacctcccgctccgttcccgtggtccaggtccagccgagcgaatccgacgccaagccgcagcccgcgcagagcaccgcggctccggcacccgtcgtcatatccgagccggcacagctttcccagccgcagccagcaagcaaacccgacccgtcaccaccactgccggcgtcgcaacagcatgctcaagctcagcagcagcaggcgtcggcgccgcgtcagcagtcccggaagaaagcggcgcacatcaagcgcatctccagcgcggggctgcaggtggagtcggtgctccggcgcaagaccgacaacctcaaggacatgtacagcctgggacggaagctcgggcaggggcagttcggcaccacgtacctgtgcgtggacaaggcgacggggctggagtacgcgtgcaagtcaatcgcgaagcggaagctggtcaccgacgaggacgtggaggacgtccggcgcgagatccagatcatgcaccacctcgcggggcaccccaacatcatcgccatccgcggcgcgtacgaggactccgtggccgtgcacgtcgtcatggagctctgcgccggcggggagctgttcgaccgcatcgtgcggagggggcactacacggagcggcaggcgggggagctggcccgcgtcatcgtcgccgtcgtggaatcgtgccactcgctcggggtcatgcaccgggacctcaagccggagaacttcctcttcgtcggcaacgacgaggagtcgccgctgaagaccatcgacttcggcctctccatgttcttccgcccaggtgcctgtctgtctgtctgtccacgcgaggagttcacggacgtcgtcgggagcccgtactacgtggcgccggaggtgctgaagaagcgctacgggcaggaggccgacgtgtggagcgccggcgtaatcatctacatccttctctgcggggtgccgccgttctgggcggagacggagcagggcatcttcgagcaggtgctgcacggctcgctggacttcgactccgacccctggccgagcgtgtcgggggacgccaaggacctgcttcggaaggtgctcgtcagggaccccaagaagcgcctcaccgcgcaccaagtgctatgccacccgtggctgcagaccatcgcctctgcgcctgataagccgctggactctgcggtgttgtcccggctgaagcagttctcggcgatgaacaagctcaagaagatggcgttgagggtgatcgcggagaacctgtcggaggaggagatcgcggggctcaaggagatgttcaagatgatggacaccgacaacagtgggcagatcaatttcgaggagctcaaggccggacttgagaaagtcggtgctaacatgaaggagtccgagatatatcagctcatgcaagctgcggatatcgacaacagtggcaccatagattatggagagttcatagctgccacactgcatctcaacaaaattgaaagggaagaccatctctttgccgccttccaatactttgataaagacggcagtggatacatcacagctgatgagctgcagcaagcatgtgacgagttcggaatagaggatatcagactcgaagacatgattggcgaagtggatcaagacaatgatgggcgcatagattacaacgagttcgtcgccatgatgcaaaaaccaacagccggatatggcaagaaaggtcatcggtataaccttagcattggttttagggatgctttgaaggcaaatagctgacaatgttgcccatcatactaagtgacgtggtgttgtgcatacgtgttgtaattgtaaacggaactcgggttctgattaattcataggatctttttttgatcaaagtcctgaacccagctttattagaaagtcgccgagtttaaacgaaggaaggccacaccaacaaaccgggtgccagatggagacagacgcggaaaagttctaagacaactgaacccttctttcctcaaggctccagcagatccaaggctagcttctcagtcaccgactccgccaacaccttggacttgggtttggaaagtggcttctaggatttgatcagcattaacaagatgtttggtccggcctttttttttgttttggcccgcaaccgttcacagcgctacccgatagcgttgtttttagtttggttggaccagctggtaatcgatcacgtcgactgtcagcccatatcaactcgttaccgctcaacagagaccgtatcgattccctcacgtcgcccctcacctttcctcgtgccgcctgttgcccctccccttcc

SEQ ID NO: 215684 - DNA, 2809 bp, Zea Mays
atggctgcccggtgtcccggccacttcgcctgcctccctccctccctcactctcttccgtcttcccaatgaaaacctgcgaggaaaatgtgaagacgggaccccacgcgaccaacagcagacccacagggatgctgatcggaggcggtgtcttctacttgtaggcgcaaccgcaggccgcagccccaccgctcccccgtccatcttctccaactagtggcagcgcggtcgcaaccgctcacccaccgctccctcccccaaatttctccgcaatcttagcactacccgttagggagcaacgccgacacagcaaaggcacaagaggaggccaggcaacagctgcagaaacgcaggcgccgcaatgcagggctccaataccaaatctagctccgccgaggcgaagagcaacagcaaaccggacaaggagaagaaggggggcggaggcggcacgccgccaacccccaaggacagcaagccgcgcaagccggccgtgcccaaggcaagcgccgccggccatggcacgccgcgggcggctgacaagtcccccggctcggggtcggccgaccgcaaggcgcccacgcccaaggccgccgcctctcgcctcgccacgcctcccgagcccgcaaagcggccgcaggagcagcaggcgcagcttgccgagatccgtgaagagctcgtgaaggccaaagagcagttgctggagaacgagaaggagaagtgcagagttcttgctgagctggagcgtgccaagaaggtggctgatgaggccaatgccaagctgcaagatgctcttgatgtgcaaaggagggctattgaggcgcaggaggcagacaaactccctgccggagagtcgaagcaggcaagcatccacgaccagcaggaggatgatgacgctgtgctgcggtcgacagtggagcagcttgagaaggctaggtacgagctggccgatgcagtcgatgccaagaatgaagccctcagccaggtagatgatgccgttagggcttctgaggtgaaggcccaggaagttgagcatctcattgcagaggttacacgcctcaaagggctggttgattccaaggtggatggcaacaggaagaagactgcagagaggattcagaatcttgaagaagagaactttgcattaaagcttgagcttcagaaaaaaaaggctgctgaagaaaaggcggttcgattggagcgcatgattgatgaacttgagagtgatgttgatgatgctaggaattttggttccaagtcaaagcagttagctgatgaatggcagaagaaggcacagcttctcgaggtcagattggaagaggctgatcagtctaatattttgaagggtgaatctttgaattcagcaatggaagaattggattcaacaagtagtttgcttcgtgacagagaatctgaagttgctgctcttcgtgacaaagtaaggttctttgaggatgagcagacaaagctcaagaatgatattgttgtgtccggccaacgggcagatgcagcagagaaagaggcggcggatctatggacagaggttgaagggcttaggctgaagctccatacagtggaagaagagaaaatggaggccctgaacagtgataagagtactaccttagaaactgagaccttgaatgaacagaagaaccagctgactgacaagcttgaggcaaacaaagatgagcttgagaaaactaagaaggcaatggagggtctggcctcagccttacaggaaatgtcagctgaatccagagaggcgcaagagaagtaccttctcaaacaagatgagattgagcgtgctcaggcacaggtagaggagcttagcttgagtctgaagaatactaaggagaactatgagctattgcttgatgaggcaaactatgagaaggtttgccttacgaaaacagttgaaagactgaaagcagaagcaaagagtgcacatgaggaatggcattccaaagagctaagttttgtcaattctattaagaattcagaggaagagatagttgctatcagagttcagatgatcaggaccttggaggttgttaaagagaaagaacgtgaaaacactgagttgcaggagaagctgcagcagcttgagtctcagctaatggaagcaaacagaatcagggaggaagccagcgctgaaactatccgatggaaggagaacatattagaccaagagaatgaattacagaacataaaacaggagaacgacgacctgcaggcaaaggaattagcagcttctgagaaggttaaggaactctctttccagcttgctaatgtaaaagatagcctgataaatggtaacaccaaggaaggagataatgagaaggggggtactgaagaggatgatgaacctgttgtggtagttgccaaaatgtgggagaacggcaagtttgctgactgtgattcatctaaggagaaggataatgatggtgactcgcaggttgatttggaatcaaacaagggggatgcaggtcttgacagcaatgggttgcactcaactaatgagagcagtggcagagcatcaactaaacagccgcaacagcataagaagcctttgctgaagagattcggtggtttgctgaagaagaaaagcgaaaagtagcataaaaccatctgatgatattctttgttctatcttttgacatatttctacatatttctttgattagctatctagttcctgagtcttcccccgatattatggtaaactgagtgatggatgcttcaaagaatacaaaatgtcgcctgtatttacatcactgccatgtcttacttttttgtatgtttggcgatcattt

SEQ ID NO: 215685 - DNA, 1192 bp, Zea Mays
atactaggagcccctaggtttgggaatccctatgataataaattggatttattcctcttttatctattgcaccgctagcgtgcaccggtgattgggtgagcaagcctttccaatctctcgctcttgtgaccctacgccaagagtgggtgaataggttttttttggaaagcacatttctattaggccctcaacactgggtccactcaagagtccgcttcccttcattcctggcctcctcagtcatctagtttcaccagtgttttggttggagggaataaagatgccatgttgtcagttgatgctcgatgcaattatgtctatgaatcatactgccaccagcacaccatcatggttgcgtcgtttgcatgcgaaaaaaggaatatctgtgccatccaacctacaaattgatgacttcatcaatggagatggatcccaaccttcactatgcttgcctgtaccaacttcttcctaccaccaccataaaaatcttcttgacatttccaaaaaccaacatcaaaaggctactgagaccgaacaatgtaaaccacctaacagtcagacacaacaaagcccaaggtttgaaaaacctcacatgccacaaccacagcccaaagccatgatttctaatgttttggggaccccttccattgatcccatggataccttgcccctcaaggcttttcgcaagaaaaagaaatccaccagcagcacattgtgcaacaaatccatcaataaagagatgcagaccaccttcatgatgtcaaacgttctagatgtcccctcatgtaattcgatagaaaccacaccttataatcccatatgcaagcagccaaaacccaataccaatgtcaccaatgctttagcaatcccctcctccactccaatgaataccatacagcctcgcaaaggtatgaaaatgaacacaaaaggaaaaaatcggtatgaaggcaagtggaatggtaatatttattacaccatcgtcgacaccagtattgataaatgcaagggcaccaaaaaatcaatttgtagcaatgacttcatggtctctagcaaaaatcctaagcagacctttgaacaacatgattccatcataaagggaaagcgaaggtttaatctcctctccaatctacaagaaaagtatgagaaggataaagaggtcaccttacaggaaaaagtagaattgagttgctag

SEQ ID NO: 215686 - DNA, 1768 bp, Zea Mays
atactaggagcccctaggtttgggaatccctatgataataaattggatttattcctcttttatctattgcaccgctagcgtgcaccggtgattgggtgagcaagcctttccaatctctcgctcttgtgaccctacgccaagagtgggtgaataggttttttttggaaagcacatttctattaggccctcaacactgggtccactcaagagtccgcttcccttcattcctggcctcctcagtcatctagtttcaccagtgttttggttggagggaataaagatgccatgttgtcagttgatgctcgatgcaattatgtctatgaatcatactgccaccagcacaccatcatggttgcgtcgtttgcatgcgaaaaaaggaatatctgtgccatccaacctacaaattgatgacttcatcaatggagatggatcccaaccttcactatgcttgcctgtaccaacttcttcctaccaccaccataaaaatcttcttgacatttccaaaaaccaacatcaaaaggctactgagaccgaacaatgtaaaccacctaacagtcagacacaacaaagcccaaggtttgaaaaacctcacatgccacaaccacagcccaaagccatgatttctaatgttttggggaccccttccattgatcccatggataccttgcccctcaaggcttttcgcaagaaaaagaaatccaccagcagcacattgtgcaacaaatccatcaataaagagatgcagaccaccttcatgatgtcaaacgttctagatgtcccctcatgtaattcgatagaaaccacaccttataatcccatatgcaagcagccaaaacccaataccaatgtcaccaatgctttagcaatcccctcctccactccaatgaataccatacagcctcgcaaaggtatgaaaatgaacacaaaaggaaaaaatcggtatgaaggcaagtggaatggtaatatttattacaccatcgtcgacaccagtattgataaatgcaagggcaccaaaaaatcaatttgtagcaatgacttcatggtctctagcaaaaatcctaagcagacctttgaacaacatgattccatcataaagggaaagcgaaggtttaatctcctctccaatctacaagaaaagtatgagaaggataaagaggtcaccttacaggaaaagagcacaaaagtcaagaataatcatgacactagggatacgacaagtgcagtcatagagaggccccaaagcattgatatcactaccattgacactagtatcaatggatggaaagccaccaaacacctcatccataggggacaagtttgggagattgttgatagaaaatccacaatacggcctctacacaagaaattgtctacgatgaggaagagaaaatggctacacacaaggaataatgctttttagaggtaaaggtgtcattaaaatattggatggtcaaattcaaactcaaaaaggactagatgttctcaaccagtactagaagacaatggtgacactactattcaaatacaaaccataaggaggaggaagatctcagacatcataacattaatttaaaggggaaaattaagccaatgattatgtaggaaatatattgttactttattattactgatgaattatgttgattcagttaccatcagattgtttcatcctttctattcgttaaagtcgtcattaaactaaaatagatattttaattcttgtggttgctggcaagataatgaaataatatgctttattaaaaaaata

SEQ ID NO: 215687 - DNA, 1771 bp, Zea Mays
atactaggagcccctaggtttgggaatccctatgataataaattggatttattcctcttttatctattgcaccgctagcgtgcaccggtgattgggtgagcaagcctttccaatctctcgctcttgtgaccctacgccaagagtgggtgaataggttttttttggaaagcacatttctattaggccctcaacactgggtccactcaagagtccgcttcccttcattcctggcctcctcagtcatctagtttcaccagtgttttggttggagggaataaagatgccatgttgtcagttgatgctcgatgcaattatgtctatgaatcatactgccaccagcacaccatcatggttgcgtcgtttgcatgcgaaaaaaggaatatctgtgccatccaacctacaaattgatgacttcatcaatggagatggatcccaaccttcactatgcttgcctgtaccaacttcttcctaccaccaccataaaaatcttcttgacatttccaaaaaccaacatcaaaaggctactgagaccgaacaatgtaaaccacctaacagtcagacacaacaaagcccaaggtttgaaaaacctcacatgccacaaccacagcccaaagccatgatttctaatgttttggggaccccttccattgatcccatggataccttgcccctcaaggcttttcgcaagaaaaagaaatccaccagcagcacattgtgcaacaaatccatcaataaagagatgcagaccaccttcatgatgtcaaacgttctagatgtcccctcatgtaattcgatagaaaccacaccttataatcccatatgcaagcagccaaaacccaataccaatgtcaccaatgctttagcaatcccctcctccactccaatgaataccatacagcctcgcaaaggtatgaaaatgaacacaaaaggaaaaaatcggtatgaaggcaagtggaatggtaatatttattacaccatcgtcgacaccagtattgataaatgcaagggcaccaaaaaatcaatttgtagcaatgacttcatggtctctagcaaaaatcctaagcagacctttgaacaacatgattccatcataaagggaaagcgaaggtttaatctcctctccaatctacaagaaaagtatgagaaggataaagaggtcaccttacagaaggaaaagagcacaaaagtcaagaataatcatgacactagggatacgacaagtgcagtcatagagaggccccaaagcattgatatcactaccattgacactagtatcaatggatggaaagccaccaaacacctcatccataggggacaagtttgggagattgttgatagaaaatccacaatacggcctctacacaagaaattgtctacgatgaggaagagaaaatggctacacacaaggaataatgctttttagaggtaaaggtgtcattaaaatattggatggtcaaattcaaactcaaaaaggactagatgttctcaaccagtactagaagacaatggtgacactactattcaaatacaaaccataaggaggaggaagatctcagacatcataacattaatttaaaggggaaaattaagccaatgattatgtaggaaatatattgttactttattattactgatgaattatgttgattcagttaccatcagattgtttcatcctttctattcgttaaagtcgtcattaaactaaaatagatattttaattcttgtggttgctggcaagataatgaaataatatgctttattaaaaaaata

SEQ ID NO: 215688 - DNA, 1759 bp, Zea Mays
ctaggagcccctaggtttgggaatccctatgataataaattggatttattcctcttttatctattgcaccgctagcgtgcaccggtgattgggtgagcaagcctttccaatctctcgctcttgtgaccctacgccaagagtgggtgaataggttttttttggaaagcacatttctattaggccctcaacactgggtccactcaagagtccgcttcccttcattcctggcctcctcagtcatctagtttcaccagtgttttggttggagggaataaagatgccatgttgtcagttgatgctcgatgcaattatgtctatgaatcatactgccaccagcacaccatcatggttgcgtcgtttgcatgcgaaaaaaggaatatctgtgccatccaacctacaaattgatgacttcatcaatggagatggatcccaaccttcactatgcttgcctgtaccaacttcttcctaccaccaccataaaaatcttcttgacatttccaaaaaccaacatcaaaaggctactgagaccgaacaatgtaaaccacctaacagtcagacacaacaaagcccaaggtttgaaaaacctcacatgccacaaccacagcccaaagccatgatttctaatgttttggggaccccttccattgatcccatggataccttgcccctcaaggcttttcgcaagaaaaagaaatccaccagcagcacattgtgcaacaaatccatcaataaagagatgcagaccaccttcatgatgtcaaacgttctagatgtcccctcatgtaattcgatagaaaccacaccttataatcccatatgcaagcagccaaaacccaataccaatgtcaccaatgctttagcaatcccctcctccactccaatgaataccatacagcctcgcaaaggtatgaaaatgaacacaaaaggaaaaaatcggtatgaaggcaagtggaatggtaatatttattacaccatcgtcgacaccagtattgataaatgcaagggcaccaaaaaatcaatttgtagcaatgacttcatggtctctagcaaaaatcctaagcagacctttgaacaacatgattccatcataaagggaaagcgaaggtttaatctcctctccaatctacaagaaaagtatgagaaggataaagaggtcaccttacagagcacaaaagtcaagaataatcatgacactagggatacgacaagtgcagtcatagagaggccccaaagcattgatatcactaccattgacactagtatcaatggatggaaagccaccaaacacctcatccataggggacaagtttgggagattgttgatagaaaatccacaatacggcctctacacaagaaattgtctacgatgaggaagagaaaatggctacacacaaggaataatgctttttagaggtaaaggtgtcattaaaatattggatggtcaaattcaaactcaaaaaggactagatgttctcaaccagtactagaagacaatggtgacactactattcaaatacaaaccataaggaggaggaagatctcagacatcataacattaatttaaaggggaaaattaagccaatgattatgtaggaaatatattgttactttattattactgatgaattatgttgattcagttaccatcagattgtttcatcctttctattcgttaaagtcgtcattaaactaaaatagatattttaattcttgtggttgctggcaagataatgaaataatatgctttattaaaaaaata

SEQ ID NO: 215689 - DNA, 2413 bp, Zea Mays
aagaagtcggatctgctcagggaagcgcaaaggggaaccgcaagcgacgacgttcgaaggaggtagaggcatcatcggaggagagttccaccgcgcggtctgctcgtccatttcgtcgatttaggtaatttatgaatccagtagatcttgttttgaatgagattcattgtttgtgaacttgttttgaatgagattcaaatatatatgtatgtgtgtgaactctgaaatacttatttataggctaacaatgtgtctaacgatttcttgatatatacacctgtccagaggcggatctacagtgtgggcaatgtgggccatggccccacatcaatttttgtaatattcataataccatataggattagattagagggagcaggagtctcaggtccatttcgttccagcgtccatccggtcacggcccatgccccattggcccattcgttgttcacccaggaggccagaatctcagctctttcgtcacgtcttgtgttggccgcctgccgccgccggccgcctgcatcccaccgcggcatcgccgatcgcgtcatcgcgacatcgccccacaccacaggacaccacataatagatatgtgaataatcaaggccatgtgatggaacggtttcttgccctcaagcatgtcaaggatactacatcagatgccttgaaggaagctatttttggccttcttgatcaccatggattatctatatccaagataagggggcaaggatatgatggagcatcgaatatgcgagcaagtgttgagagaatattttcggcaatgaacatcattaagagagaattgcgtaacaaaattgaagatgattggatgaatgatttgatggtttgctatacggagaaagagatattcaaatcccttgatgatgagattattactagaagattccagcgtcttaaaactagaagaatgcaattgcctcgagtcacaactacaagattgacaacttagtgattggatttttgttggtgattttggtgtcgcactgcaaattaagagagaaatttcggatggatggcacacacaacagcaggggtgatagctcacagccgcaaggtcaagctggttggaacccataccagccccctcctccacctgcctggaacccatacatgtttccaatgcaacctcagcctgtatcagttgaccacactcaagcgaatgtggttctgggggctgatgaggtagatgtacttcatccagaggattcagtaccttcaatcctgaaacgaggaaggactaagttagggaacttcagcccacaagaagatgtaaacctggtgaaagcatggttggaagttagctgtgatcctgtcataggtaacggccaaaaaggagacatgttctggaagagggtggtggaacgatataattttcggaggggggcaaactcagaaagaagcctcaggtctctgcagagccgctggaccaataatatcaagcctgaggttggaaaatttgcaggctactatgcagaagccctgcgacaaaatcccagtggaatgtcagatgctgacaaaacatcacttgcagctaccaactttgcggaggttgaagggcatgcgtttggattcatgcactgttggggccgtatgaaggacgagcccaaatggggtaacccaacacaacttgggactgaagctcatctagaaggcgacggcttggaagaggactccaacagggtgcacggtgatgcagacaagtcagctggaaaaaggccggttggtagggacagagctaaagcagcgaacaagaaatctaaatcggtgtcaggtgatacatcttcttcagagtacgctagtaggatgcaggacctgtccattcaaaaaataaatatcatgcaagaagaaagcgtgcgcaaaggcgagcgattccagcagcttgctacaattgatgagaaaaggtaccaggaaatgtgtagtcacaaccaatcggtattagatattgagcaagagaaagttagaatcatgcgtgagaagcatgacagggaggagaagaaggaggatgagaggattctgagtattaatttggactcctgcacaccttccctgagaatgtattatgaagctttgcaggaggacataatggcgaagcttgctgctagacgccaagggaggcatgccccataaggctctcatgtgttgctgttagaataattttcccatatgctattatgtagtaattgttagaacaattgcattattcaatcctgttgtactggtgaggacaattttccacaattcagtcatgttgtaactgtgtgtattaatttgtgaggacaatttccattttttatgattgcagaataatatgctcacattattatgatatgtgcactatccatttttatgtgcactgtccattattatgatatgtgcacttcctttgaa

SEQ ID NO: 215690 - DNA, 1381 bp, Zea Mays
gcagtcgcgagtaaagaacaacagcaggccaccgctgctataaaaccctccgcctccaccggcggctcgccaaactccgtttcgaattctagggttttgctgctctccgaccccgagctccgaaggccgcagcatcaggcgcggcccccctcgcgtgtgaccgagatggcgctgccgaatcaggggaccgttgattaccccagcttcaagctcgtcatcgtcggcgatggtggaactggtaaaactacatttgtgaagaggcatctcactggagagtttgagaagaaatatgaaccaaccattggtgtggaagttcatccgttggatttcaccactaactgtggtaagatcaggttctactgctgggataccgcagggcaagagaagtttggtggcctcagggatggatactatatccatggccagtgtgcgatcatcatgtttgatgtaacctcaaggcttacttacaagaatgttcctacgtggcatagggacctgtgcagggtctgtgaaaacatccccattgtcctctgcggtaataaggttgatgtgaagaacaggcaggtcaaagccaagcaggttactttccacaggaagaagaatctgcagtactatgaaatttctgccaagagcaactacaactttgagaaacctttcctgtacctcgcaaggaagctggctgggtaattgactacccttcttctgtgcattgcatttagtagtcacaaccaattaccactctatgtttgttcttgacaatgtctttgtttttaacagtgatccgaaccttcactttgttgaagctgttgctcttaagcctccggaagttaccatcgacatggctatgcagcagcatgaagctgagcttgctgcagcagctgcacaacctcttcctgatgacgatgatgatctgattgagtagaaaggatcatgagtcttggacttgagcaggagttgtgccttgcacgatttaagttgttctagggtggactctctcttgagttatcattgtctggatcatttttttctccttggacttgttgcaacttttgagtgtggaaatggattggaatagtcgccatgaatttgctggctactttatacatgtctttgttcataaaccttgttttaagatgaagttgtggcaatcctcttagtgctaatataatgttctattgtcagctgtacaatgtagaaatgcttctatcttttttttttcgtgcacgttccaggtgtatttttaggtttagggcttagtgtatctaaactagcgcttagtgtatagttcgtatcatcgtgtgtttggtgtctggttatggctctcgactgtatagattgatatatacatttgagctagttgggtcgtagtagtctaagaaag

SEQ ID NO: 215691 - DNA, 1290 bp, Zea Mays
gcagtcgcgagtaaagaacaacagcaggccaccgctgctataaaaccctccgcctccaccggcggctcgccaaactccgtttcgaattctagggttttgctgctctccgaccccgagctccgaaggccgcagcatcaggcgcggcccccctcgcgtgtgaccgagatggcgctgccgaatcaggggaccgttgattaccccagcttcaagctcgtcatcgtcggcgatggtggaactggtaaaactacatttgtgaagaggcatctcactggagagtttgagaagaaatatgaaccaaccattggtgtggaagttcatccgttggatttcaccactaactgtggtaagatcaggttctactgctgggataccgcagggcaagagaagtttggtggcctcagggatggatactatatccatggccagtgtgcgatcatcatgtttgatgtaacctcaaggcttacttacaagaatgttcctacgtggcatagggacctgtgcagggtctgtgaaaacatccccattgtcctctgcggtaataaggttgatgtgaagaacaggcaggtcaaagccaagcaggttactttccacaggaagaagaatctgcagtactatgaaatttctgccaagagcaactacaactttgagaaacctttcctgtacctcgcaaggaagctggctggtgatccgaaccttcactttgttgaagctgttgctcttaagcctccggaagttaccatcgacatggctatgcagcagcagcatgaagctgagcttgctgcagcagctgcacaacctcttcctgatgacgatgatgatctgattgagtagaaaggatcatgagtcttggacttgagcaggagttgtgccttgcacgatttaagttgttctagggtggactctctcttgagttatcattgtctggatcatttttttctccttggacttgttgcaacttttgagtgtggaaatggattggaatagtcgccatgaatttgctggctactttatacatgtctttgttcataaaccttgttttaagatgaagttgtggcaatcctcttagtgctaatataatgttctattgtcagctgtacaatgtagaaatgcttctatcttttttttttcgtgcacgttccaggtgtatttttaggtttagggcttagtgtatctaaactagcgcttagtgtatagttcgtatcatcgtgtgtttggtgtctggttatggctctcgactgtatagattgatatatacatttgagctagttgggtcgtagtagtctaagaaag

SEQ ID NO: 215692 - DNA, 855 bp, Zea Mays
gcagtcgcgagtaaagaacaacagcaggccaccgctgctataaaaccctccgcctccaccggcggctcgccaaactccgtttcgaattctagggttttgctgctctccgaccccgagctccgaaggccgcagcatcaggcgcggcccccctcgcgtgtgaccgagatggcgctgccgaatcaggggaccgttgattaccccagcttcaagctcgtcatcgtcggcgatggtggaactggtaaaactacatttgtgaagaggcatctcactggagagtttgagaagaaatatgaaccaaccattggtgtggaagttcatccgttggatttcaccactaactgtggtaagatcaggttctactgctgggataccgcagggcaagagaagtttggtggcctcagggatggatactatatccatggccagtgtgcgatcatcatgtttgatgtaacctcaaggcttacttacaagaatgttcctacgtggcatagggacctgtgcagggtctgtgaaaacatccccattgtcctctgcggtaataaggttgatgtgaagaacaggcaggtcaaagccaagcaggttactttccacaggaagaagaatctgcagtactatgaaatttctgccaagagcaactacaactttgagaaacctttcctgtacctcgcaaggaagctggctggtgatccgaaccttcactttgttgaagctgttgctcttaagcctccggaagttaccatcgacatggctatgttactttccacaggaagaagaatctgcagtactatgaaatttctgccaagagcaactacaactttgagaaacctttcctgtaccttgcaaggaagctggctg

SEQ ID NO: 215693 - DNA, 607 bp, Zea Mays
gcagtcgcgagtaaagaacaacagcaggccaccgctgctataaaaccctccgcctccaccggcggctcgccaaactccgtttcgaattctagggttttgctgctctccgaccccgagctccgaaggccgcagcatcaggcgcggcccccctcgcgtgtgaccgagatggcgctgccgaatcaggggaccgttgattaccccagcttcaagctcgtcatcgtcggcgatggtggaactggtaaaactacatttgtgaagaggcatctcactggagagtttgagaagaaatatgaaccaaccattggtgtggaagttcatccgttggatttcaccactaactgtggtaagatcaggttctactgctgggataccgcagggcaagagaagtttggtggcctcagggatggatactatatccatggccagtgtgcgatcatcatgtttgatgtaacctcaaggcttacttacaagaatgttcctacgtggcatagggacctgtgcagggtctgtgaaaacatccccattgtcctctgcggtaataaggttgatgtgaagaacaggcaggtcaaagccaagcagggtctgtgaaaacatccccattgtcctc

SEQ ID NO: 215694 - DNA, 4162 bp, Zea Mays
cccgtgtctcgtatcgccattctacccaaccgcaacgaaaatgagcccaggcgataaaggctgagtccgtccgtcgaaaagcgagcgcagagtgggagagagaagggggtcgattcggagagatcgagaaagaggagggaggcggagggcgacgtggcggtgggtgctgaagcggagcctgcagcgcccgctcgagtactcgccggatcgcccgacctgccggtacagcgctgcagacagcctgatccggccgatccggcgggaatggcggcgcgaggagggatctagcggaggtggtggggtcgcgcggcaatggcggaggcagagccgcggcgccggtgggcggtgtgggcgctactgctgctgctccaccccgccgcgctcgtgctcgccaacaccgaaggtgatgccttgcatagcttacgtaccaacttaaatgatcctaataatgttctacaaagttgggatcccactctggtcaacccctgcacttggtttcatgttacctgcaataatgacaacagtgtcatcagagttgatcttggaaatgctgcactatcaggaactttggttccgcaacttggacagctctaaaacttgcagtacctggagctctacagtaataatatcagcggaattatacctagtggatttggaaaccttacaaacttggtcagtttggatttgtacctgaacaacttcactggtccaataccagattcattggggaagctattgaagctgcggttcttgcgtcttaacaacaacagcctttctggttcaattccaaaatcattaactgctatcactgcactccaagttctggatctgtcaaataacaatttgtctggagaagttccatcaactggttccttttctttattcacccctatcagttttgcgaacaaccctaacttatgtggtcctggcaccacaaaaccttgtcctggtgctcctcccttttctccacctccatacaaccctacaccccctgtgcaatcaccaggaagtagctcttctagtactggagcaattgctggtggagtggctgctggcacagccttgctatttgctgttcctgcaattagttttgcctattggcagcgcaggaaaccacaagaacatttctttgaagtacctgccgaggaagatccagaggtgcatcttggccagcttaaaagattttcactacgagaattacaagttgcaacagatggcttctgcaataagaacattcttggaagaggtggatttggcaaagtctacaaaggacggctggcagatggatctttggttgctgttaagagactaaaggaggagcgcacgcctggtggggaattacagtttcaaacagaagttgagatgattagtatggctgtacacagaaatctattgcgtcttcgtggattctgtatgacaccaacagaaaggttgcttgtgtatccatacatggctaatggaagtgttgcatcacgtttaagagaccgggcaccagctgaacctccgctagattggcaaacaaggagaaggattgctttgggttctgctaggggcctgtcttatttacatgaccattgtgacccaaagattattcatcgtgatgtcaaagctgcaaatattttgttagatgaagacttcgaggctgtggtgggggattttggtttggccaaactaatggattacaaggatacccatgtaactactgctgttcgtggaacaattgggcacattgcacctgaatacctttcaacaggaaaatcctctgagaaaactgatgtatttggctatggaattacacttttagagcttattacaggacagcgggccttcgatctagcttgccttgctaatgatgatgatgtcatgcttcttgattgggtaattaactatgccatttcctctgttcaaattgcaacttaaatgttcatgccttttttgtggcttccatactgtgtaggggttggtggtcaatttttcctatgtaaccgttaaaaaacttgctaatcatttgatccaatgacaaagagcttttgataatgtctaaggaataaatattttaactgaattggtgcattgtgataggctgacagctgaacaagtagtgacatgctcctgtccctgaaagtcaagggattgctcaaggagaagaaactggagagtctggtcgaccaagatctagaacacaactacgtcgacgttgaggtggaatctctggtacaggtcgcactcctctgcactcagagcaaccccatggaacgccctaagatgtcagaggttgtgaggatgctcgaaggcgatggtctcgccgagagatgggaggagtggcagaaagcggaagtagtacggcaagaggtcgagctaggccctcatcgaacttcggaatggatcctcgacttgaccgacaacctccacgctgaacagctgtcagggccgaggtgaaggcagctttggactcactgattcttgtatcttgcaagggcaatagcgatgtgtatcaatcatcctagtcaagaatcccccatttgttcataccaatcgttgggtgaagcgaggagatgtggtcagccatgatgtgcattggatgtatgttgctgaggtgacatggctgagttcatatatgcgagggcagcagagctcgacaagctagtgtcgtgcgctgtcggtgcatgcactagtggtcctggatttgcgaaggtagggggagctaaggtgctgtggctgtcatctgggtctgcgataagttaattgtactgacagttgacatctaactattttgtgtatctaatgtaaggttggaaggaactgacgcgaaccgttctgactcccctcctacaaaaggatcggatgatataggtgtgcctatggacctgttctgggtggcaaggttaatcagaagtttccgtgctgagtgttgtaattatgtctctagactgtactctgtagtggcgaacttaagagttagtttgatggacaggaaaatgaaggggattcctctcctatggatcttctctatttttctgtccaaactaaatcagccctaatgagggtgggacgttagggtggggatgtatagacgtcatgtaatggaggaggtgcatatttcttagggtacatctacacatcctaaactgaatatagcttcgcccccctatttatatcgatgatctcaattttcgtgcatgtcggttaaccagtcagtactccagatggtaccgtgcatctcgccccaacttggcgtaacttcattctagatttctagctctcaagttaatgcatacgaatgaggggttttctcgacttgtgtgtatacacgcgaaagctgtcttaccctgcagatcgagataaaattgtaatacaagtggggatgttcgtcagtttcagttagtacagtgacaaagtagagaacaagtttgctattggataaaccactgcagatttacatgcagtgctttgtcaaaataacggtagaagttggtgcatcacatctgatgaaacgatacttctttgtccctgcttctccggtcggtttacttacctcaaatcagcacttcaagggcggcttgtttaggagccagcgaaatggaggggattcgagaggctaaaatcccctccaatctgctccatcccctggctcccacacatgtcccaaatggagaatgtatacctttccgagcaaatctgttcagccaactcgatgacaacgtggattgccatctgtttgactagtggttagtactagcagatggccaaacacttcagtatcactcaattcaacctaggtgttagaaattcctttcagcactcactttgggtgactgcattttcagctatatgcaaacaaacatctccggcgatgggcccattcgagatgagatattagaggaaactgaacctttgcaatagatgatggttcagttgcctctaatcctcacttcagatggcacaaatgaatggatgttggtagtgtacatcttcatcagactatcgactgaaggtgagatattggaggaaaacaaaccgaccggcagcaccctccgttgctgaatccgatacccagccggtttgctttcctccaactctcactttcagtgcctgacacttttctagcttttcgtaacagggtggaatgggtaagaacagagactagctgtttggaggtgag

SEQ ID NO: 215695 - DNA, 4359 bp, Zea Mays
cccgtgtctcgtatcgccattctacccaaccgcaacgaaaatgagcccaggcgataaaggctgagtccgtccgtcgaaaagcgagcgcagagtgggagagagaagggggtcgattcggagagatcgagaaagaggagggaggcggagggcgacgtggcggtgggtgctgaagcggagcctgcagcgcccgctcgagtactcgccggatcgcccgacctgccggtacagcgctgcagacagcctgatccggccgatccggcgggaatggcggcgcgaggagggatctagcggaggtggtggggtcgcgcggcaatggcggaggcagagccgcggcgccggtgggcggtgtgggcgctactgctgctgctccaccccgccgcgctcgtgctcgccaacaccgaaggtgatgccttgcatagcttacgtaccaacttaaatgatcctaataatgttctacaaagttgggatcccactctggtcaacccctgcacttggtttcatgttacctgcaataatgacaacagtgtcatcagagttgatcttggaaatgctgcactatcaggaactttggttccgcaacttggacagctctaaaacttgcagtacctggagctctacagtaataatatcagcggaattatacctagtggatttggaaaccttacaaacttggtcagtttggatttgtacctgaacaacttcactggtccaataccagattcattggggaagctattgaagctgcggttcttgtaagatatctgaagacatccacattgattttccctactatttacagtagagtaaaacctgttaagagtaggaatcacgcacactgaatctgtctgtcatcattggttgcttcatcccatcttttgtattgaccaagggagatcttctatgacattgagatttcactaggccacatacatggtagctgctttgttaaaatcatgattttgttcttatgaatgcagttactttgttaataaaaggttaaagaaaatagctgcctagcctcattgggtcccatacattggaagaggtaagattttccaggacagagttgctattgatggtagcgttgagtgattccttgtgttcaaaagtgactcttgacgtatgtatattgtataattagattattcatatccagcaatctgtttttgatgttttaaggtgtctatctctatcatggtgttaggtttttaacttattatagtttctaagttttctcattttttatgaaattacctgtggatgtttctaatttgacacatctttgaacttttgtgcggggcataggcgtcttaacaacaacagcctttctggttcaattccaaaatcattaactgctatcactgcactccaagttctggatctgtcaaataacaatttgtctggagaagttccatcaactggttccttttctttattcacccctatcaggaagtagctcttctagtactggagcaattgctggtggagtggctgctggcacagccttgctatttgctgttcctgcaattagttttgcctattggcagcgcaggaaaccacaagaacatttctttgaagtacctgccgaggaagatccagaggtgcatcttggccagcttaaaagattttcactacgagaattacaagttgcaacagatggcttctgcaataagaacattcttggaagaggtggatttggcaaagtctacaaaggacggctggcagatggatctttggttgctgttaagagactaaaggaggagcgcacgcctggtggggaattacagtttcaaacagaagttgagatgattagtatggctgtacacagaaatctattgcgtcttcgtggattctgtatgacaccaacagaaaggttgcttgtgtatccatacatggctaatggaagtgttgcatcacgtttaagagaccgggcaccagctgaacctccgctagattggcaaacaaggagaaggattgctttgggttctgctaggggcctgtcttatttacatgaccattgtgacccaaagattattcatcgtgatgtcaaagctgcaaatattttgttagatgaagacttcgaggctgtggtgggggattttggtttggccaaactaatggattacaaggatacccatgtaactactgctgttcgtggaacaattgggcacattgcacctgaatacctttcaacaggaaaatcctctgagaaaactgatgtatttggctatggaattacacttttagagcttattacaggacagcgggccttcgatctagcttgccttgctaatgatgatgatgtcatgcttcttgattgggtcaagggattgctcaaggagaagaaactggagagtctggtcgaccaagatctagaacacaactacgtcgacgttgaggtggaatctctggtacaggtcgcactcctctgcactcagagcaaccccatggaacgccctaagatgtcagaggttgtgaggatgctcgaaggcgatggtctcgccgagagatgggaggagtggcagaaagcggaagtagtacggcaagaggtcgagctaggccctcatcgaacttcggaatggatcctcgacttgaccgacaacctccacgctgaacagctgtcagggccgaggtgaaggcagctttggactcactgattcttgtatcttgcaagggcaatagcgatgtgtatcaatcatcctagtcaagaatcccccatttgttcataccaatcgttgggtgaagcgaggagatgtggtcagccatgatgtgcattggatgtatgttgctgaggtgacatggctgagttcatatatgcgagggcagcagagctcgacaagctagtgtcgtgcgctgtcggtgcatgcactagtggtcctggatttgcgaaggtagggggagctaaggtgctgtggctgtcatctgggtctgcgataagttaattgtactgacagttgacatctaactattttgtgtatctaatgtaaggttggaaggaactgacgcgaaccgttctgactcccctcctacaaaaggatcggatgatataggtgtgcctatggacctgttctgggtggcaaggttaatcagaagtttccgtgctgagtgttgtaattatgtctctagactgtactctgtagtggcgaacttaagagttagtttgatggacaggaaaatgaaggggattcctctcctatggatcttctctatttttctgtccaaactaaatcagccctaatgagggtgggacgttagggtggggatgtatagacgtcatgtaatggaggaggtgcatatttcttagggtacatctacacatcctaaactgaatatagcttcgcccccctatttatatcgatgatctcaattttcgtgcatgtcggttaaccagtcagtactccagatggtaccgtgcatctcgccccaacttggcgtaacttcattctagatttctagctctcaagttaatgcatacgaatgaggggttttctcgacttgtgtgtatacacgcgaaagctgtcttaccctgcagatcgagataaaattgtaatacaagtggggatgttcgtcagtttcagttagtacagtgacaaagtagagaacaagtttgctattggataaaccactgcagatttacatgcagtgctttgtcaaaataacggtagaagttggtgcatcacatctgatgaaacgatacttctttgtccctgcttctccggtcggtttacttacctcaaatcagcacttcaagggcggcttgtttaggagccagcgaaatggaggggattcgagaggctaaaatcccctccaatctgctccatcccctggctcccacacatgtcccaaatggagaatgtatacctttccgagcaaatctgttcagccaactcgatgacaacgtggattgccatctgtttgactagtggttagtactagcagatggccaaacacttcagtatcactcaattcaacctaggtgttagaaattcctttcagcactcactttgggtgactgcattttcagctatatgcaaacaaacatctccggcgatgggcccattcgagatgagatattagaggaaactgaacctttgcaatagatgatggttcagttgcctctaatcctcacttcagatggcacaaatgaatggatgttggtagtgtacatcttcatcagactatcgactgaaggtgagatattggaggaaaacaaaccgaccggcagcaccctccgttgctgaatccgatacccagccggtttgctttcctccaactctcactttcagtgcctgacacttttctagcttttcgtaacagggtggaatgggtaagaacagagactagctgtttggaggtgag

SEQ ID NO: 215696 - DNA, 3758 bp, Zea Mays
cccgtgtctcgtatcgccattctacccaaccgcaacgaaaatgagcccaggcgataaaggctgagtccgtccgtcgaaaagcgagcgcagagtgggagagagaagggggtcgattcggagagatcgagaaagaggagggaggcggagggcgacgtggcggtgggtgctgaagcggagcctgcagcgcccgctcgagtactcgccggatcgcccgacctgccggtacagcgctgcagacagcctgatccggccgatccggcgggaatggcggcgcgaggagggatctagcggaggtggtggggtcgcgcggcaatggcggaggcagagccgcggcgccggtgggcggtgtgggcgctactgctgctgctccaccccgccgcgctcgtgctcgccaacaccgaaggtgcgcggtgatgccttgcatagcttacgtaccaacttaaatgatcctaataatgttctacaaagttgggatcccactctggtcaacccctgcacttggtttcatgttacctgcaataatgacaacagtgtcatcagagttgatcttggaaatgctgcactatcaggaactttggttccgcaacttggacagctctaaaacttgcagtacctggagctctacagtaataatatcagcggaattatacctagtggatttggaaaccttacaaacttggtcagtttggatttgtacctgaacaacttcactggtccaataccagattcattggggaagctattgaagctgcggttcttgcgtcttaacaacaacagcctttctggttcaattccaaaatcattaactgctatcactgcactccaagttctggatctgtcaaataacaatttgtctggagaagttccatcaactggttccttttctttattcacccctatcaggaagtagctcttctagtactggagcaattgctggtggagtggctgctggcacagccttgctatttgctgttcctgcaattagttttgcctattggcagcgcaggaaaccacaagaacatttctttgaagtacctgccgaggaagatccagaggtgcatcttggccagcttaaaagattttcactacgagaattacaagttgcaacagatggcttctgcaataagaacattcttggaagaggtggatttggcaaagtctacaaaggacggctggcagatggatctttggttgctgttaagagactaaaggaggagcgcacgcctggtggggaattacagtttcaaacagaagttgagatgattagtatggctgtacacagaaatctattgcgtcttcgtggattctgtatgacaccaacagaaaggttgcttgtgtatccatacatggctaatggaagtgttgcatcacgtttaagagaccgggcaccagctgaacctccgctagattggcaaacaaggagaaggattgctttgggttctgctaggggcctgtcttatttacatgaccattgtgacccaaagattattcatcgtgatgtcaaagctgcaaatattttgttagatgaagacttcgaggctgtggtgggggattttggtttggccaaactaatggattacaaggatacccatgtaactactgctgttcgtggaacaattgggcacattgcacctgaatacctttcaacaggaaaatcctctgagaaaactgatgtatttggctatggaattacacttttagagcttattacaggacagcgggccttcgatctagcttgccttgctaatgatgatgatgtcatgcttcttgattgggctgacagctgaacaagtagtgacatgctcctgtccctgaaagtcaagggattgctcaaggagaagaaactggagagtctggtcgaccaagatctagaacacaactacgtcgacgttgaggtggaatctctggtacaggtcgcactcctctgcactcagagcaaccccatggaacgccctaagatgtcagaggttgtgaggatgctcgaaggcgatggtctcgccgagagatgggaggagtggcagaaagcggaagtagtacggcaagaggtcgagctaggccctcatcgaacttcggaatggatcctcgacttgaccgacaacctccacgctgaacagctgtcagggccgaggtgaaggcagctttggactcactgattcttgtatcttgcaagggcaatagcgatgtgtatcaatcatcctagtcaagaatcccccatttgttcataccaatcgttgggtgaagcgaggagatgtggtcagccatgatgtgcattggatgtatgttgctgaggtgacatggctgagttcatatatgcgagggcagcagagctcgacaagctagtgtcgtgcgctgtcggtgcatgcactagtggtcctggatttgcgaaggttggaaggaactgacgcgaaccgttctgactcccctcctacaaaaggatcggatgatataggtgtgcctatggacctgttctgggtggcaaggttaatcagaagtttccgtgctgagtgttgtaattatgtctctagactgtactctgtagtggcgaacttaagagttagtttgatggacaggaaaatgaaggggattcctctcctatggatcttctctatttttctgtccaaactaaatcagccctaatgagggtgggacgttagggtggggatgtatagacgtcatgtaatggaggaggtgcatatttcttagggtacatctacacatcctaaactgaatatagcttcgcccccctatttatatcgatgatctcaattttcgtgcatgtcggttaaccagtcagtactccagatggtaccgtgcatctcgccccaacttggcgtaacttcattctagatttctagctctcaagttaatgcatacgaatgaggggttttctcgacttgtgtgtatacacgcgaaagctgtcttaccctgcagatcgagataaaattgtaatacaagtggggatgttcgtcagtttcagttagtacagtgacaaagtagagaacaagtttgctattggataaaccactgcagatttacatgcagtgctttgtcaaaataacggtagaagttggtgcatcacatctgatgaaacgatacttctttgtccctgcttctccggtcggtttacttacctcaaatcagcacttcaagggcggcttgtttaggagccagcgaaatggaggggattcgagaggctaaaatcccctccaatctgctccatcccctggctcccacacatgtcccaaatggagaatgtatacctttccgagcaaatctgttcagccaactcgatgacaacgtggattgccatctgtttgactagtggttagtactagcagatggccaaacacttcagtatcactcaattcaacctaggtgttagaaattcctttcagcactcactttgggtgactgcattttcagctatatgcaaacaaacatctccggcgatgggcccattcgagatgagatattagaggaaactgaacctttgcaatagatgatggttcagttgcctctaatcctcacttcagatggcacaaatgaatggatgttggtagtgtacatcttcatcagactatcgactgaaggtgagatattggaggaaaacaaaccgaccggcagcaccctccgttgctgaatccgatacccagccggtttgctttcctccaactctcactttcagtgcctgacacttttctagcttttcgtaacagggtggaatgggtaagaacagagactagctgtttggaggtgag

SEQ ID NO: 215697 - DNA, 3842 bp, Zea Mays
ttcgattccatcccaccccaccacccgtgtctcgtatcgccattctacccaaccgcaacgaaaatgagcccaggcgataaaggctgagtccgtccgtcgaaaagcgagcgcagagtgggagagagaagggggtcgattcggagagatcgagaaagaggagggaggcggagggcgacgtggcggtgggtgctgaagcggagcctgcagcgcccgctcgagtactcgccggatcgcccgacctgccggtacagcgctgcagacagcctgatccggccgatccggcgggaatggcggcgcgaggagggatctagcggaggtggtggggtcgcgcggcaatggcggaggcagagccgcggcgccggtgggcggtgtgggcgctactgctgctgctccaccccgccgcgctcgtgctcgccaacaccgaaggtgatgccttgcatagcttacgtaccaacttaaatgatcctaataatgttctacaaagttgggatcccactctggtcaacccctgcacttggtttcatgttacctgcaataatgacaacagtgtcatcagagttgatcttggaaatgctgcactatcaggaactttggttccgcaacttggacagctctaaaacttgcagtacctggagctctacagtaataatatcagcggaattatacctagtggatttggaaaccttacaaacttggtcagtttggatttgtacctgaacaacttcactggtccaataccagattcattggggaagctattgaagctgcggttcttttactttgttaataaaaggttaaagaaaatagctgcctagcctcattgggtcccatacattggaagaggcgtcttaacaacaacagcctttctggttcaattccaaaatcattaactgctatcactgcactccaagttctggatctgtcaaataacaatttgtctggagaagttccatcaactggttccttttctttattcacccctatcaggaagtagctcttctagtactggagcaattgctggtggagtggctgctggcacagccttgctatttgctgttcctgcaattagttttgcctattggcagcgcaggaaaccacaagaacatttctttgaagtacctgccgaggaagatccagaggtgcatcttggccagcttaaaagattttcactacgagaattacaagttgcaacagatggcttctgcaataagaacattcttggaagaggtggatttggcaaagtctacaaaggacggctggcagatggatctttggttgctgttaagagactaaaggaggagcgcacgcctggtggggaattacagtttcaaacagaagttgagatgattagtatggctgtacacagaaatctattgcgtcttcgtggattctgtatgacaccaacagaaaggttgcttgtgtatccatacatggctaatggaagtgttgcatcacgtttaagagaccgggcaccagctgaacctccgctagattggcaaacaaggagaaggattgctttgggttctgctaggggcctgtcttatttacatgaccattgtgacccaaagattattcatcgtgatgtcaaagctgcaaatattttgttagatgaagacttcgaggctgtggtgggggattttggtttggccaaactaatggattacaaggatacccatgtaactactgctgttcgtggaacaattgggcacattgcacctgaatacctttcaacaggaaaatcctctgagaaaactgatgtatttggctatggaattacacttttagagcttattacaggacagcgggccttcgatctagcttgccttgctaatgatgatgatgtcatgcttcttgattgggctgacagctgaacaagtagtgacatgctcctgtccctgaaagtcaagggattgctcaaggagaagaaactggagagtctggtcgaccaagatctagaacacaactacgtcgacgttgaggtggaatctctggtacaggtcgcactcctctgcactcagagcaaccccatggaacgccctaagatgtcagaggttgtgaggatgctcgaaggcgatggtctcgccgagagatgggaggagtggcagaaagcggaagtagtacggcaagaggtcgagctaggccctcatcgaacttcggaatggatcctcgacttgaccgacaacctccacgctgaacagctgtcagggccgaggtgaaggcagctttggactcactgattcttgtatcttgcaagggcaatagcgatgtgtatcaatcatcctagtcaagaatcccccatttgttcataccaatcgttgggtgaagcgaggagatgtggtcagccatgatgtgcattggatgtatgttgctgaggtgacatggctgagttcatatatgcgagggcagcagagctcgacaagctagtgtcgtgcgctgtcggtgcatgcactagtggtcctggatttgcgaaggttggaaggaactgacgcgaaccgttctgactcccctcctacaaaaggatcggatgatataggtgtgcctatggacctgttctgggtggcaaggttaatcagaagtttccgtgctgagtgttgtaattatgtctctagactgtactctgtagtggcgaacttaagagttagtttgatggacaggaaaatgaaggggattcctctcctatggatcttctctatttttctgtccaaactaaatcagccctaatgagggtgggacgttagggtggggatgtatagacgtcatgtaatggaggaggtgcatatttcttagggtacatctacacatcctaaactgaatatagcttcgcccccctatttatatcgatgatctcaattttcgtgcatgtcggttaaccagtcagtactccagatggtaccgtgcatctcgccccaacttggcgtaacttcattctagatttctagctctcaagttaatgcatacgaatgaggggttttctcgacttgtgtgtatacacgcgaaagctgtcttaccctgcagatcgagataaaattgtaatacaagtggggatgttcgtcagtttcagttagtacagtgacaaagtagagaacaagtttgctattggataaaccactgcagatttacatgcagtgctttgtcaaaataacggtagaagttggtgcatcacatctgatgaaacgatacttctttgtccctgcttctccggtcggtttacttacctcaaatcagcacttcaagggcggcttgtttaggagccagcgaaatggaggggattcgagaggctaaaatcccctccaatctgctccatcccctggctcccacacatgtcccaaatggagaatgtatacctttccgagcaaatctgttcagccaactcgatgacaacgtggattgccatctgtttgactagtggttagtactagcagatggccaaacacttcagtatcactcaattcaacctaggtgttagaaattcctttcagcactcactttgggtgactgcattttcagctatatgcaaacaaacatctccggcgatgggcccattcgagatgagatattagaggaaactgaacctttgcaatagatgatggttcagttgcctctaatcctcacttcagatggcacaaatgaatggatgttggtagtgtacatcttcatcagactatcgactgaaggtgagatattggaggaaaacaaaccgaccggcagcaccctccgttgctgaatccgatacccagccggtttgctttcctccaactctcactttcagtgcctgacacttttctagcttttcgtaacagggtggaatgggtaagaacagagactagctgtttggaggtgag

SEQ ID NO: 215698 - DNA, 975 bp, Zea Mays
aaaaaacggccggcctctcctactatgattgcatccgccatcgggcctcgtcgatcgccgcctcctgctcggcttcttcccacctgcggttgcaccgatcacccagggagggacagggcagctcgccggtccaactccgacgaccggccggccatgagctaccaggctcctcctcccggcaccgcagcctacccgccgccgggcacggcctacccgccgccaggccagcaggcgtacccgccgcctgcctacggtgcgccgccacccatggccgccggcgggtacccgcccccgccgcctccgcagccgcaggactccaagcgcagcaacgacggcttcttgaaaggatgcttggccgcgctctgctgctgctgcatgctcgacatgtgcttctgagactgagttgccgtcagggatggggtggcgctggcgccgcgtccagatccatcctgcagtcgcggcgaatgcatgaggatgttttcggagtcatcactagtcatgaactcacgatgatacatctgtttttttttctcccattccgtgtatgttctccagttctatgaatttcactagttaggccagaacagaaccagcagggattatttttctggcattcatgtgcgtgtgttcttaccatccattcttttaaacattacccacctacgaatgtttaataggatcgaaaagttttcttttatgttcggagacctctcatctgactcgtcactcgactcccatctcacagcacctcccaacgacggctcaggttgccaccgcctccttgtgcctgactctgacggtcagcaacgcggctcggtcgtcgctgaaccatcacaactcttctctatcgacccttcaatgctgctcaccatcccattcatgcagtccatccccgtctttttatcgttgcacctccctagctcccacttcgatgtgatagtgaggttccatccctatagacagatgataataaac

SEQ ID NO: 215699 - DNA, 3325 bp, Zea Mays
aaaattactactgccaaaaaggctggctggctggctggatggctggatggatctctgcctgccccctctcgccttttcgctctgcagtgtgcagtgcaggtggggaaaaaagctaaggtagcgtagcgtgcgttttgcttgtgcatggcatgtgctccgatcctcctcctccgacctcccggcccattctttctcccttcttcttgagggggcaccctccgtcctttcctcttcttcttccttcagaaatcgcaagaaaatggggaagagaagccagaagcgccttattcgacgccaccaggacggcagcataggctgcatggcaggcctcatccgcatgttctattcccgccatgacgccaataagctcctgttggacaggaagcagccagggagtagaaggcacagtttcagtgccttttctggacgaaggggccactcaagaaagaattccaaggacttggacgaaatagatgaatacggcgattataacatggaggaacccagttccagcaaaccaacagtcaaaagacttatggaggacgagctacgaaagctaaaacagctgaagcttccaaatgatgaggttgagagaatattagctgacctgggacatggtgcctgcctggacaaaagttcagcccaaaacagcaaagcgaagaagggagaccaaaatcacatcagaggtatcaccaccacggctgctccatctggatctttggatcccactgcttccaactgcataaaagaagcagaagaaaatgagcttgaatttgccttggcagatttcttaggacggatccatagaaattgcaacaataatggggagttatgtacggagatgaaagccctaatccaaacaaagattgcagagctagataatcctccgtgcacatttgcttatgagcagcaaacttcacggggtgacgaatatgatactgctggtggcaaacatcgatgtagcagtagtaaaactcagcccaaaaaattcagagatgcgctggagatgctaagctcagacaccgaacttttctttcagaagtcaaattcacgtattttggagagcgcccaaagaaaccaaaacagactgatagggaacaatctagagcccacaaaaatagcagataataccgactccaacaaagatccaaagagtctgaaccagcatgagttggccaccaggagatatggtaaagagagcaggaatatctttttctggaagaaggaaagatcctcaccaaggcagactgcacaaggaaccagtagttctcagccagttaacaaaatagttatactgaagccaaatccaaggagagagatcggccatgctgtggctgttagttcaacccaagctccaaaactaggtgcaaccgagagctcaaaattttcaattaaggaggtcagaaggagattcagaatcgtgactagtgaagctacaaaaggaataccctcagtgtctgaagataacctccaaaaaggtcagcattggctcaacagttcagctttcacaataataaaagataccagacagctcgctgaacagacctcagaagggaaattctcatcttcagttatgaaggattttagatcatcaaacagcggtaggcaaaagaaaagaaaaaatgatgggccaaccgaaaaaaacagtagcataattacgtcatccaaggatgaatctgtcttctatgacgaggccaggaaacatctaacagagattctcaaggacaaaagacaaacaaccaagcagcacccgacacttgagatctcaaggtccttggtgaggatgctttccttccctcagtccagcacatcatcacctaggagtagccctagggcaaaagactgcatttacctctcacctgaagaggcaagcattcgtgccatatacaagtcaaataaagatcttttagaagaagaaagccagtctggagaatttccagagaatgttgtgtgtgatcctagtgaagcactgcatgagcaggctgttcaggaaaggtggtgcgtcaaagaagaaagtcaagaaacaacacaagaaggtgcagaacttgacactctgcgcactaaagaaattgacaagctggattgcatgggaaaaaatagcaatgcatggggcaccccagcaaagcaatgcacatataaaccatcacaagatatggtgggagaagcagagccaggacaaaggcatgtcaggacgtttccaagctcccctgagaacgactttgaaaaactggaatgccaagagcccacgactccccgaccgagtgcacagatcgaacagatatcacaattttctcctgatggaaaccacgaaaagcaagaacagccgagccctcaatctgttcttgatgtgttcttcctcgacggtgagttgcacaaagatatcttgaggacacgctacaacaccacaggggatggttcagaccaagggattttctgggaggacaagcatccgaggttatgttacataaaggaattgctagagctgtcagaattgtgtgcaaaccagaacttagaggtatggtatctagaagatgaattaatcagcccttgcttgttcgaagaagtacatggaggcaatcaaattgatggtacgaagcttttatttgactgcatttgcgaagctgtgacagaaatccaggacatatactttagaaaccctccatgcctatcttctctcacacacagcataagggcacctcctccagcgggacaaaaccttatctcagaaatcaataagcgtgttgaacgccatcttcactatcgatttccaagcacattagaccagctggttaacatggatcttgaaggtggcagttggatggatcttggatcagaaagcggagaggtcgctgtagtaatatgggactgcacactagatgagcttttggaagaattagtttacgacctgtggatttcaggcttcaatctcgcagccggtaaccatctgtagatttggtagagtcataccgttaaatagaagtaacatgtttgtgtggcaaaatcctgtgatttggacatggagggctgcatgagtcgttcttaaaggcatgagcatggtacgggatgttcactcatgtgaatttcatcgtgaccctcaacatattattatgtgtctagtgtcagttaggcctagtttggatactctagtaatgagtaggatttgagtggattaagatgtattgagagagtatttaatctattggggatttacaccatctccaatccctctaaaacaccctaatcctaaagtatccaaactaggccttaggggtgacaatcaacacgttgacccactgggccgcgtcatgactctcgttgttcccgc

SEQ ID NO: 215700 - DNA, 3064 bp, Zea Mays
gatggatctctgcctgccccctctcgccttttcgctctgcagtgtgcagtgcaggtggggaaaaaagctaaggtagcgtagcgtgcgttttgcttgtgcatggcatgtgctccgatcctcctcctccgacctcccggcccattctttctcccttcttcttgagggggcaccctccgtcctttcctcttcttcttccttcagaaatcgcaagaaaatggggaagagaagccagaagcgccttattcgacgccaccaggacggcagcataggctgcatggcaggcctcatccgcatgttctattcccgccatgacgccaataagctcctgttggacaggaagcagccagggagtagaaggcacagtttcagtgccttttctggacgaaggggccactcaagaaagaattccaaggacttggacgaaatagatgaatacggcgattataacatggaggaacccagttccagcaaaccaacagtcaaaagacttatggaggacgagctacgaaagctaaaacagctgaagcttccaaatgatgaggttgagagaatattagctgacctgggacatggtgcctgcctggacaaaagttcagcccaaaacagcaaagcgaagaagggagaccaaaatcacatcagaggtatcaccaccacggctgctccatctggatctttggatcccactgcttccaactgcataaaagaagcagaagaaaatgagcttgaatttgccttggcagatttcttaggacggatccatagaaattgcaacaataatggggagttatgtacggagatgaaagccctaatccaaacaaagattgcagagctagataatcctccgtgcacatttgcttatgagcagcaaacttcacggggtgacgaatatgatactgctggtggcaaacatcgatgtagcagtagtaaaactcagcccaaaaaattcagagatgcgctggagatgctaagctcagacaccgaacttttctttcagaagtcaaattcacgtattttggagagcgcccaaagaaaccaaaacagactgatagggaacaatctagagcccacaaaaatagcagataataccgactccaacaaagatccaaagagtctgaaccagcatgagttggccaccaggagatatggtaaagagagcaggaatatctttttctggaagaaggaaagatcctcaccaaggcagactgcacaaggaaccagtagttctcagccagttaacaaaatagttatactgaagccaaatccaaggagagagatcggccatgctgtggctgttagttcaacccaagctccaaaactaggtgcaaccgagagctcaaaattttcaattaaggaggtcagaaggagattcagaatcgtgactagtgaagctacaaaaggaataccctcagtgtctgaagataacctccaaaaaggtcagcattggctcaacagttcagctttcacaataataaaagataccagacagctcgctgaacagacctcagaagggaaattctcatcttcagttatgaaggattttagatcatcaaacagcggtaggcaaaagaaaagaaaaaatgatgggccaaccgaaaaaaacagtagcataattacgtcatccaaggatgaatctgtcttctatgacgaggccaggaaacatctaacagagattctcaaggacaaaagacaaacaaccaagcagcacccgacacttgagatctcaaggtccttggtgaggatgctttccttccctcagtccagcacatcatcacctaggagtagccctagggcaaaagactgcatttacctctcacctgaagaggcaagcattcgtgccatatacaagtcaaataaagatcttttagaagaagaaagccagtctggagaatttccagagaatgttgtgtgtgatcctagtgaagcactgcatgagcaggctgttcaggaaaggtggtgcgtcaaagaagaaagtcaagaaacaacacaagaagaacttgacactctgcgcactaaagaaattgacaagctggattgcatgggaaaaaatagcaatgcatggggcaccccagcaaagcaatgcacatataaaccatcacaagtatgtttcagctagttgttccgtcttactttcatagcttctgttattttgatggttttgtgcacttttgcattaaaggatatggtgggagaagcagagccaggacaaaggcatgtcaggacgtttccaagctcccctgagaacgactttgaaaaactggaatgccaagagcccacgactccccgaccgagtgcacagatcgaacagatatcacaattttctcctgatggaaaccacgaaaagcaagaacagccgagccctcaatctgttcttgatgtgttcttcctcgacggtactgacactgaaaacatgatagaatgtaaactcatcaattcactccaagtcaaacttaaatgatttattttggtgctccaattgtctacaggtgagttgcacaaagatatcttgaggacacgctacaacaccacaggggatggttcagaccaagggattttctgggaggacaagcatccgaggttatgttacataaaggaattgctagagctgtcagaattgtgtgcaaaccagaacttagaggtatggtatctagaagatgaattaatcagcccttgcttgttcgaagaagtacatggaggcaatcaaattgatggtacgaagcttttatttgactgcatttgcgaagctgtgacagaaatccaggacatatactttagaaaccctccatgcctatcttctctcacacacagcataagggcacctcctccagcgggacaaaaccttatctcagaaatcaataagcgtgttgaacgccatcttcactatcgatttccaagcacattagaccagctggttaacatggatcttgaaggtggcagttggatggatcttggatcagaaagcggagaggtcgctgtagtaatatgggactgcacactagatgagcttttggaagaattagtttacgacctgtggatttcaggcttcaatctcgcagccggtaaccat

SEQ ID NO: 215701 - DNA, 3256 bp, Zea Mays
ccctctcgccttttcgctctgcagtgtgcagtgcaggtggggaaaaaagctaaggtagcgtagcgtgcgttttgcttgtgcatggcatgtgctccgatcctcctcctccgacctcccggcccattctttctcccttcttcttgagggggcaccctccgtcctttcctcttcttcttccttcagaaatcgcaagaaaatggggaagagaagccagaagcgccttattcgacgccaccaggacggcagcataggctgcatggcaggcctcatccgcatgttctattcccgccatgacgccaataagctcctgttggacaggaagcagccagggagtagaaggcacagtttcagtgccttttctggacgaaggggccactcaagaaagaattccaaggacttggacgaaatagatgaatacggcgattataacatggaggaacccagttccagcaaaccaacagtcaaaagacttatggaggacgagctacgaaagctaaaacagctgaagcttccaaatgatgaggttgagagaatattagctgacctgggacatggtgcctgcctggacaaaagttcagcccaaaacagcaaagcgaagaagggagaccaaaatcacatcagaggtatcaccaccacggctgctccatctggatctttggatcccactgcttccaactgcataaaagaagcagaagaaaatgagcttgaatttgccttggcagatttcttaggacggatccatagaaattgcaacaataatggggagttatgtacggagatgaaagccctaatccaaacaaagattgcagagctagataatcctccgtgcacatttgcttatgagcagcaaacttcacggggtgacgaatatgatactgctggtggcaaacatcgatgtagcagtagtaaaactcagcccaaaaaattcagagatgcgctggagatgctaagctcagacaccgaacttttctttcagaagtcaaattcacgtattttggagagcgcccaaagaaaccaaaacagactgatagggaacaatctagagcccacaaaaatagcagataataccgactccaacaaagatccaaagagtctgaaccagcatgagttggccaccaggagatatggtaaagagagcaggaatatctttttctggaagaaggaaagatcctcaccaaggcagactgcacaaggaaccagtagttctcagccagttaacaaaatagttatactgaagccaaatccaaggagagagatcggccatgctgtggctgttagttcaacccaagctccaaaactaggtgcaaccgagagctcaaaattttcaattaaggaggtcagaaggagattcagaatcgtgactagtgaagctacaaaaggaataccctcagtgtctgaagataacctccaaaaaggtcagcattggctcaacagttcagctttcacaataataaaagataccagacagctcgctgaacagacctcagaagggaaattctcatcttcagttatgaaggattttagatcatcaaacagcggtaggcaaaagaaaagaaaaaatgatgggccaaccgaaaaaaacagtagcataattacgtcatccaaggatgaatctgtcttctatgacgaggccaggaaacatctaacagagattctcaaggacaaaagacaaacaaccaagcagcacccgacacttgagatctcaaggtccttggtgaggatgctttccttccctcagtccagcacatcatcacctaggagtagccctagggcaaaagactgcatttacctctcacctgaagaggcaagcattcgtgccatatacaagtcaaataaagatcttttagaagaagaaagccagtctggagaatttccagagaatgttgtgtgtgatcctagtgaagcactgcatgagcaggctgttcaggaaaggtggtgcgtcaaagaagaaagtcaagaaacaacacaagaagaacttgacactctgcgcactaaagaaattgacaagctggattgcatgggaaaaaatagcaatgcatggggcaccccagcaaagcaatgcacatataaaccatcacaagatatggtgggagaagcagagccaggacaaaggcatgtcaggacgtttccaagctcccctgagaacgactttgaaaaactggaatgccaagagcccacgactccccgaccgagtgcacagatcgaacagatatcacaattttctcctgatggaaaccacgaaaagcaagaacagccgagccctcaatctgttcttgatgtgttcttcctcgacggtgagttgcacaaagatatcttgaggacacgctacaacaccacaggggatggttcagaccaagggattttctgggaggacaagcatccgaggttatgttacataaaggaattgctagagctgtcagaattgtgtgcaaaccagaacttagaggtatggtatctagaagatgaattaatcagcccttgcttgttcgaagaagtacatggaggcaatcaaattgatggtacgaagcttttatttgactgcatttgcgaagctgtgacagaaatccaggacatatactttagaaaccctccatgcctatcttctctcacacacagcataagggcacctcctccagcgggacaaaaccttatctcagaaatcaataagcgtgttgaacgccatcttcactatcgatttccaagcacattagaccagctggttaacatggatcttgaaggtggcagttggatggatcttggatcagaaagcggagaggtcgctgtagtaatatgggactgcacactagatgagcttttggaagaattagtttacgacctgtggatttcaggcttcaatctcgcagccggtaaccatctgtagatttggtagagtcataccgttaaatagaagtaacatgtttgtgtggcaaaatcctgtgatttggacatggagggctgcatgagtcgttcttaaaggcatgagcatggtacgggatgttcactcatgtgaatttcatcgtgaccctcaacatattattatgtgtctagtgtcagttaggcctagtttggatactctagtaatgagtaggatttgagtggattaagatgtattgagagagtatttaatctattggggatttacaccatctccaatccctctaaaacaccctaatcctaaagtatccaaactaggccttaggggtgacaatcaacacgttgacccactgggccgcgtcatgactctcgttgttcccgc

SEQ ID NO: 215702 - DNA, 3727 bp, Zea Mays
catcaactgtcccgctgacccgctcccgcaagagaacccaccgacggggcaaaaccggcattacggccacttctcctcatttccacggcgctgcccacgcccagtataaaatgttgcgtaataagtacctcccctgaacatcaccatgctcatgtcacctgcggtttagcgaaaaacactccgaggggaagggagcgcgggtgcttgattcatccatcattccatctacgatggagtacgagcgcggggaccgggccaagcggggccgtggaggtggcggcggcggcggcggcggcggaggacgcggaggtggcggcgagtacgggcggcagcacggaggcgcgtacggcggaggcggatggcacgggcacgacgaaggaggaggctacggcgggggccgtggaggcggtggctactatcaccaagggcctcgcggccgcggagggtggcgcggccccggcgcgggcggcagccaggcgtacgggtccggcggcggccgcgcgtgggcgccggggccgggtgaggggagaggccttggggttggccgcgagtacgcccccgtcaggcgggcagcgccggcgcctgcgcctgcgcctagggaggttgcgactgcgcccatggtcaaggaagcgccgagttcgtcgggatccgttgaacgcatcacatctagtgaattggccggagtagaaccactagcatccacactagctgcgacatcttctgttggcacacgagtgccaatgcagagacctgactgtggtggcgcattatctcaagcaaaggtcaaactcttggtgaatcactttattgtcaactaccaaaaggtgtcaactatttttcactatgacataaacatcaagcttgatgaagcttcctctaaggcttcaggcaaagaactctcgaaggcagaatttctttctgtcaaggatgagctcttcagggaaagcagtttacggcgtctttcctcatgtgttgcttatgatggtggaagaaatctcttcacttctgctgaactgccagcaggtttatttcgtgtgagagttcgatcaaaggcctacattgtatcagtagatttgaagaagcagctgccattaagtcaactctcagatttacctgtacctagagaggtcttgcagggtcttgatgttgttgtgcgtgaggcctccagatggcgcaaggttatccttggtagaggattttactcaccaagcagcagtatagacattgggcagggtgttgtagctatgaaaggaacccagcagacacttaaatacactcaacaagggttgaacctgtgtgttgattattcagttatgccattttacaaagctggaccggtgatggaccttgttcacaaaatagtggggtaccttgattatcgaacaactctgaacaagaggcaaatggaaaatctggttgatgagcttaaaggccgacgtgtaactgtgattcatcggaggactaatcagaagtacacagtgcaaggcttgacacccttacctgccagccagatgacctttgtggatgctgaatccggacaaacaaagtgtcttgtggagtattatgctcagaaacatggcattgtgattgagtatcagatgctgccatgcttggatttgagcaagagcaaggacaaaccgaatcatgtcccaattgagctctgcactcttcttgaaggacagaggtttccaaaagcaaacttggataagaattctggcaggatactaaaaggaaaggctctaattcctgcatccaatcggaggaaagagattctagacttggtgaatgcttcggatggaccttgcagaggagaaattgcacagcgatttgggatttccttggatttacgaatgacagaagtcacgggtaggatccttcccccaccaaacctcaaactcggggcatccaatggccagacctccaaattcagtatcgatcagaactgccagtggaaccttgtgaagaagagactcgtagagggccgggatcttcagtgttggggcattgtcgacttcagtgctgagccgtctgacccccagcaggagcccctcaatggaaggatgtttattgagaagattgtgaggaagtgctgtgagcttggtatccgtatgaactccaacccatgcttcgtacacaaatctaagatggcagtgctctccgatccgcatcgactacaggaggagctaaacaaggcaaaacaggctgcagtgagcaagaagcagaggttgcagctccttttctgcccgatgtccgagcagcatccagggtacaagacactgaagctgatttgcgatacacagcttgggatcatgacccagtgtttcctgggcgaccgcgcaaacaagccgaatgggcaggaccagtacatgaccaaccttgccctcaagataaacggcaagcttgggggcagcaacgtccagctgttcgactcgctcccacgggtcggtggggcacctttcatgttcatcggtgctgacgtcaaccacccgtcaccggggaacgtggagagcccatcgattgcagccgtggttgcgtctatcaactccggtgtcagcaagtacgtgacaagaatccgtgcccagccgcaccgctgtgaggtgatccagcagctcggcgagatctgcctggagctcatcggagtcttcgagaagcgaaaccgcgtgaagccgcagaagatcatctacttccgcgacggcgtgagcgacgggcagttcgacatggtcctgaacgaggagctggcggacctggagaaggcgatcaaggtgggcggctacgcgccgaccgtcaccgtgatcgtggccaagaagcggcaccacacgcgcctgttccccaaggaccccagccagccgcagacgaagaacgggaacgtgccgcccggcacggtggtggacacgggcgtggtggacccgtccgcgtacgacttctacctgtgcagccacgccgggatcctgggcacgagcaggccgacgcactactacagcctggtggacgagcacggcttccggtccgacgacctgcagaagctggtctacaacctctgcttcgtgttcgcgcggtgcaccaagcccgtgtcgctggcgacgcccgtctactacgccgacctcgcggcgtaccgtggcaggctctactacgaggcggccatgatgccgtcccaccagcgagggacggggtcggcgtcctcgggctcctccgctgggacttttggcgtcactaacttcccgaggctgcacaaggatgtggagaacaacatgttcttcatctgacaccagtattttcttttgtgtgtacgcgtcttgccttttcttttgtgtggttatgagtttttttaaaaaaaaaagcgtacgctgcagtgtgcaaagttcgtactgggtatacgctgcatgactgtagatgaaggaaaagaagcaggtttgagttgtgaagaactgaagatagcgctgtaattgttccagcacaaggtccggttggaatgcaggcgttctatttcgagcgcatgtctggcgggcactcccaggcgtggttcaggcctgtcacaagatttcggtccagttttcattcccgtccgattcaagcgttgctctatgcctggaaaaaaaaacatacactgataggcaggatgacaccaaaatccctcactttacaatgccatccatctaccgggcgagcaaagcagactaacctagtatttacatattgccaaatcaaagatctgcagtcagttttaaac

SEQ ID NO: 215703 - DNA, 575 bp, Zea Mays
cccgcttgtttcacttgctcgccttcacccctcgccgccgccgccgtcgccgtcgcaagcgatgatgctcgacatcaacttgttccgcaccgacaagggcggcaaccctgaccttattcgtgagtcccagcgcagtcagttcgcctccgtcgagctcgttgacgaggtcatcgccctcgacaaggcatggcgcgaaaggcagttcgagctagataagatccggcaggagctcaacgctaccagcaagaagatcggcaagctcaaagccatacgtaccagcaagcaagaagaggaagcgaagaagctcatggagagcacagacgaaattaagaaaaggttggcagccaaagaagttgaggtgcaggaggccaagagcaccctcgacgccaaggtcacgacgattggcaacatcgtgcatgagtctgtgccagtcagcgatgacgaggtaaacaataaaattgtatgagcatttggagagaagagagtagaggataatttgaagaaccacgtggacctttgcaggatgcttgatattgtcgcattggaaaaggacatcttatgatcaaggggacaaa

SEQ ID NO: 215704 - DNA, 1893 bp, Zea Mays
tgatcattgtggtttatggttcacattggaatttatgtgttgttcgtgcttgatgaattttctccaaaggaacaagggagacaatgagaggcgatgttgaagctatcgatcccgggaataaagctgctgcggaaccggtgggagatgtagctgcgctatcgtcaaggctggctaggaggctactacatggatcatggtgccctcctcggtgccaggggatatgcttggatcagagtaggggtaggtgagggtgaggattgtccatttatcgcctacaatttcttcaataccattgatatttaagtcatctcatcgagcttctttatatattattccgcaacttaatctattttcttgtcccaaaaatcatcaccacatctagttaccttatgttgttttgatttgttggtcgctgctccttggagaacattcatgctatggacacaaactcaggtggacgtggtgttcgacaattcaaaacatacctattacatatattggaaaaggaaaccccaggcgtttcaaagttagagtttcacagcttgcagcgaatttgggttctttttaatttgttgctttagtattgaattaacgtatgatcattgtggtttatggttcgcattggaatttatgtgttgttcgtgcttgatgaattttctccaaaagaacaagggagacaataagaggcgatgttgaagctgccgatcccgggaataaagctgctgcggaaccggtgggagatgtagctgctgcggaacacgaaagttttgcattatttaagttttaatcaaggaaatggtccaagggtgcatcactggaataagctcgagaccacaagtgtcatatctcctctaatctttactctctcagggttccagttgaatatgttcattgctacaatgaagccgttttgttgtttgctgtccgccgccgtattcggggtcttcgcctgcctctatgggctcagggcggacaggggcctacaagatctcctcgggccaaggaatcgttcccctccggcgacctccctcctccctttcgtctcaggccttccactgtatctccatcaaagcgaaggatcagaggctactccgttaggaggagaggaaaggaattgtgagccttgtgttggagaagtcgaagactgagagtatatggtggctccattggtgtccatgttaatggctggcgtgttctagagcaactcggggttgtcgtagagcttagggagacttgccaaccttagggagacttgccaaccttgtcatcgcgtaccatgccaacagaatgcttagcttttacgcaccagcgcgtgacgccatgtgggagcaaagttgggaaaatggatattggcggtggtcgagaggtcactcttattggaagtctagaaatgccaaaggatgacatatggcttgtcacagctatcctatctggtctgattgaataatgtgcgaagatataagtcattggctatcaatttttgtgaatcagatatttcttggcctcctatcttcgcctcaggcagctgggagtggttttatactcgctgatgacatcaagtcttaggtgcttccattgatcaataactcagggaaatatggagggatcatgatgtggttcaagtactatgatgatcaagatggctacaattcttgagtgaagagtgatgtttaggttgttgcctgtggtgtgtcacaatatctgtgtgttacttgtgtgtatgtgagaaattatgtgactctggagtctggatagtgcaataagtattactcaagtatatgattgaatcttctgtcatactattcaaattatgtcatattgtatcttttaaggtatgtaaacatccacttttagcgatgctaacaaaagaatagaacaacaattagtgttttc

SEQ ID NO: 215705 - DNA, 1955 bp, Zea Mays
tgatcattgtggtttatggttcacattggaatttatgtgttgttcgtgcttgatgaattttctccaaaggaacaagggagacaatgagaggcgatgttgaagctatcgatcccgggaataaagctgctgcggaaccggtgggagatgtagctgcgctatcgtcaaggctggctaggaggctactacatggatcatggtgccctcctcggtgccaggggatatgcttggatcagagtaggggtaggtgagggtgaggattgtccatttatcgcctacaatttcttcaataccattgatatttaagtcatctcatcgagcttctttatatattattccgcaacttaatctattttcttgtcccaaaaatcatcaccacatctagttaccttatgttgttttgatttgttggtcgctgctccttggagaacattcatgctatggacacaaactcaggtggacgtggtgttcgacaattcaaaacatacctattacatatattggaaaaggaaaccccaggcgtttcaaagttagagtttcacagcttgcagcgaatttgggttctttttaatttgttgctttagtattgaattaacgtatgatcattgtggtttatggttcgcattggaatttatgtgttgttcgtgcttgatgaattttctccaaaagaacaagggagacaataagaggcgatgttgaagctgccgatcccgggaataaagctgctgcggaaccggtgggagatgtagctgctgcggaacacgaaagttttgcattatttaagttttaatcaaggaaatggtccaagggtgcatcactggaataagctcgagaccacaagtgtcatatctcctctaatctttactctctcaggtatatgcatgcttggcattgtcttaatttatttatcacttctaaactaagaatacgttaagctcttcatattttgttgtttatcctaatttgtctccattcggcttcatagtctggtgtctatcagaagctactcctttctacttaaaaggtttcagccatggctgtgctgaatttgcaatgggcggacaggggcctacaagatctcctcgggccaaggaatcgttcccctccggcgacctccctcctccctttcgtctcaggccttccactgtatctccatcaaagcgaaggatcagaggctactccgttaggaggagaggaaaggaattgtgagccttgtgttggagaagtcgaagactgagagtatatggtggctccattggtgtccatgttaatggctggcgtgttctagagcaactcggggttgtcgtagagcttagggagacttgccaaccttagggagacttgccaaccttgtcatcgcgtaccatgccaacagaatgcttagcttttacgcaccagcgcgtgacgccatgtgggagcaaagttgggaaaatggatattggcggtggtcgagaggtcactcttattggaagtctagaaatgccaaaggatgacatatggcttgtcacagctatcctatctggtctgattgaataatgtgcgaagatataagtcatatatttcttggcctcctatcttcgcctcaggcagctgggagtggttttatactcgctgatgacatcaagtcttaggtgcttccattgatcaataactcagggaaatatggagggatcatgatgtggttcaagtactatgatgatcaagatggctacaattcttgagtgaagagtgatgtttaggttgttgcctgtggtgtgtcacaatatctgtgtgttacttgtgtgtatgtgagaaattatgtgactctggagtctggatagtgcaataagtattactcaagtatatgattgaatcttctgtcatactattcaaattatgtcatattgtatcttttaaggtatgtaaacatccacttttagcgatgctaacaaaagaatagaacaacaattagtgttttc

SEQ ID NO: 215706 - DNA, 1852 bp, Zea Mays
tgatcattgtggtttatggttcacattggaatttatgtgttgttcgtgcttgatgaattttctccaaaggaacaagggagacaatgagaggcgatgttgaagctatcgatcccgggaataaagctgctgcggaaccggtgggagatgtagctgcgctatcgtcaaggctggctaggaggctactacatggatcatggtgccctcctcggtgccaggggatatgcttggatcagagtaggggtaggtgagggtgaggattgtccatttatcgcctacaatttcttcaataccattgatatttaagtcatctcatcgagcttctttatatattattccgcaacttaatctattttcttgtcccaaaaatcatcaccacatctagttaccttatgttgttttgatttgttggtcgctgctccttggagaacattcatgctatggacacaaactcaggtggacgtggtgttcgacaattcaaaacatacctattacatatattggaaaaggaaaccccaggcgtttcaaagttagagtttcacagcttgcagcgaatttgggttctttttaatttgttgctttagtattgaattaacgtatgatcattgtggtttatggttcgcattggaatttatgtgttgttcgtgcttgatgaattttctccaaaagaacaagggagacaataagaggcgatgttgaagctgccgatcccgggaataaagctgctgcggaaccggtgggagatgtagctgctgcggaacacgaaagggtgcatcactggaataagctcgagaccacaagtgtcatatctcctctaatctttactctctcaggttccagttgaatatgttcattgctacaatgaagccgttttgttgtttgctgtccgccgccgtattcggggtcttcgcctgcctctatgggctcagggcggacaggggcctacaagatctcctcgggccaaggaatcgttcccctccggcgacctccctcctccctttcgtctcaggccttccactgtatctccatcaaagcgaaggatcagaggctactccgttaggaggagaggaaaggaattgtgagccttgtgttggagaagtcgaagactgagagtatatggtggctccattggtgtccatgttaatggctggcgtgttctagagcaactcggggttgtcgtagagcttagggagacttgccaaccttagggagacttgccaaccttgtcatcgcgtaccatgccaacagaatgcttagcttttacgcaccagcgcgtgacgccatgtgggagcaaagttgggaaaatggatattggcggtggtcgagaggtcactcttattggaagtctagaaatgccaaaggatgacatatggcttgtcacagctatcctatctggtctgattgaataatgtgcgaagatataagtcattggctatcaatttttgtgaatcagatatttcttggcctcctatcttcgcctcaggcagctgggagtggttttatactcgctgatgacatcaagtcttaggtgcttccattgatcaataactcagggaaatatggagggatcatgatgtggttcaagtactatgatgatcaagatggctacaattcttgagtgaagagtgatgtttaggttgttgcctgtggtgtgtcacaatatctgtgtgttacttgtgtgtatgtgagaaattatgtgactctggagtctggatagtgcaataagtattactcaagtatatgattgaatcttctgtcatactattcaaattatgtcatattgtatcttttaaggtatgtaaacatccacttttagcgatgctaacaaaagaatagaacaacaattagtgttttc

SEQ ID NO: 215707 - DNA, 1868 bp, Zea Mays
tgatcattgtggtttatggttcacattggaatttatgtgttgttcgtgcttgatgaattttctccaaaggaacaagggagacaatgagaggcgatgttgaagctatcgatcccgggaataaagctgctgcggaaccggtgggagatgtagctgcgctatcgtcaaggctggctaggaggctactacatggatcatggtgccctcctcggtgccaggggatatgcttggatcagagtaggggtaggtgagggtgaggattgtccatttatcgcctacaatttcttcaataccattgatatttaagtcatctcatcgagcttctttatatattattccgcaacttaatctattttcttgtcccaaaaatcatcaccacatctagttaccttatgttgttttgatttgttggtcgctgctccttggagaacattcatgctatggacacaaactcaggtggacgtggtgttcgacaattcaaaacatacctattacatatattggaaaaggaaaccccaggcgtttcaaagttagagtttcacagcttgcagcgaatttgggttctttttaatttgttgctttagtattgaattaacgtatgatcattgtggtttatggttcgcattggaatttatgtgttgttcgtgcttgatgaattttctccaaaagaacaagggagacaataagaggcgatgttgaagctgccgatcccgggaataaagctgctgcggaaccggtgggagatgtagctgctgcggaacacgaaagttttgcattatttaagttttaatcaaggaaatggtccaagggtgcatcactggaataagctcgagaccacaagtgtcatatctcctctaatctttactctctcaggttccagttgaatatgttcattgctacaatgaagccgttttgttgtttgctgtccgccgccgtattcggggtcttcgcctgcctctatgggctcagggcggacaggggcctacaagatctcctcgggccaaggaatcgttcccctccggcgacctccctcctccctttcgtctcaggccttccactgtatctccatcaaagcgaaggatcagaggctactccgttaggaggagaggaaaggaattgtgagccttgtgttggagaagtcgaagactgagagtatatggtggctccattggtgtccatgttaatggctggcgtgttctagagcaactcggggttgtcgtagagcttagggagacttgccaaccttagggagacttgccaaccttgtcatcgcgtaccatgccaacagaatgcttagcttttacgcaccagcgcgtgacgccatgtgggagcaaagttgggaaaatggatattggcggtggtcgagaggtcactcttattggaagtctagaaatgccaaaggatgacatatggcttgtcacagctatcctatctggtctgattgaataatgtgcgaagatataagtcatatatttcttggcctcctatcttcgcctcaggcagctgggagtggttttatactcgctgatgacatcaagtcttaggtgcttccattgatcaataactcagggaaatatggagggatcatgatgtggttcaagtactatgatgatcaagatggctacaattcttgagtgaagagtgatgtttaggttgttgcctgtggtgtgtcacaatatctgtgtgttacttgtgtgtatgtgagaaattatgtgactctggagtctggatagtgcaataagtattactcaagtatatgattgaatcttctgtcatactattcaaattatgtcatattgtatcttttaaggtatgtaaacatccacttttagcgatgctaacaaaagaatagaacaacaattagtgttttc

SEQ ID NO: 215708 - DNA, 1409 bp, Zea Mays
tgatcattgtggtttatggttcacattggaatttatgtgttgttcgtgcttgatgaattttctccaaaggaacaagggagacaatgagaggcgatgttgaagctgccgatcccgggaataaagctgctgcggaaccggtgggagatgtagctgctgcggaacacgaaaggtattatgccaatctgtttttgcttttcctaatatatatgaacatggatgaatcacaagcaacttcctaatatatatgaacgcaaatgaagttttgcattatttaagttttaatcaaggaaatggtccaagggtgcatcactggaataagctcgagaccacaagtgtcatatctcctctaatctttactctctcaggtatatgcatgcttggcattgtcttaatttatttatcacttctaaactaagaatacgttaagctcttcatattttgttgtttatcctaatttgtctccattcggcttcatagtctggtgtctatcagaagctactcctttctacttaaaaggtttcagccatggctgtgctgaatttgcaatggtaggttccagttgaatatgttcattgctacaatgaagccgttttgttgtttgctgtccgccgccgtattcggggtcttcgcctgcctctatgggctcagggcggacaggggcctacaagatctcctcgggccaaggaatcgttcccctccggcgacctccctcctccctttcgtctcaggccttccactgtatctccatcaaagcgaaggatcagaggctactccgttaggaggagaggtaccatgccaacagaatgcttagcttttacgcaccagcgcgtgacgccatgtgggagcaaagttgggaaaatggatattggcggtggtcgagaggtcactcttattggaagtctagaaatgccaaaggatgacatatggcttgtcacagctatcctatctggtctgattgaataatgtgcgaagatataagtcattggctatcaatttttgtgaatcagatatttcttggcctcctatcttcgcctcaggcagctgggagtggttttatactcgctgatgacatcaagtcttaggtgcttccattgatcaataactcagggaaatatggagggatcatgatgtggttcaagtactatgatgatcaagatggctacaattcttgagtgaagagtgatgtttaggttgttgcctgtggtgtgtcacaatatctgtgtgttacttgtgtgtatgtgagaaattatgtgactctggagtctggatagtgcaataagtattactcaagtatatgattgaatcttctgtcatactattcaaattatgtcatattgtatcttttaaggtatgtaaacatccacttttagcgatgctaacaaaagaatagaacaacaattagtgttttc

SEQ ID NO: 215709 - DNA, 2036 bp, Zea Mays
tgatcattgtggtttatggttcacattggaatttatgtgttgttcgtgcttgatgaattttctccaaaggaacaagggagacaatgagaggcgatgttgaagctatcgatcccgggaataaagctgctgcggaaccggtgggagatgtagctgcgctatcgtcaaggctggctaggaggctactacatggatcatggtgccctcctcggtgccaggggatatgcttggatcagagtaggggtaggtgagggtgaggattgtccatttatcgcctacaatttcttcaataccattgatatttaagtcatctcatcgagcttctttatatattattccgcaacttaatctattttcttgtcccaaaaatcatcaccacatctagttaccttatgttgttttgatttgttggtcgctgctccttggagaacattcatgctatggacacaaactcaggtggacgtggtgttcgacaattcaaaacatacctattacatatattggaaaaggcgtttcaaagttagagtttcacagcttgcagcgaatttgggttctttttaatttgttgctttagtattgaattaacgtatgatcattgtggtttatggttcgcattggaatttatgtgttgttcgtgcttgatgaattttctccaaaagaacaagggagacaataagaggcgatgttgaagctgccgatcccgggaataaagctgctgcggaaccggtgggagatgtagctgctgcggaacacgaaaggtattatgccaatctgtttttgcttttcctaatatatatgaacatggatgaatcacaagcaacttcctaatatatatgaacgcaaatgaagttttgcattatttaagttttaatcaaggaaatggtccaagggtgcatcactggaataagctcgagaccacaagtgtcatatctcctctaatctttactctctcaggtatatgcatgcttggcattgtcttaatttatttatcacttctaaactaagaatacgttaagctcttcatattttgttgtttatcctaatttgtctccattcggcttcatagtctggtgtctatcagaagctactcctttctacttaaaaggtttcagccatggctgtgctgaatttgcaatggtaggttccagttgaatatgttcattgctacaatgaagccgttttgttgtttgctgtccgccgccgtattcggggtcttcgcctgcctctatgggctcagggcggacaggggcctacaagatctcctcgggccaaggaatcgttcccctccggcgacctccctcctccctttcgtctcaggccttccactgtatctccatcaaagcgaaggatcagaggctactccgttaggaggagaggaaaggaattgtgagccttgtgttggagaagtcgaagactgagagtatatggtggctccattggtgtccatgttaatggctggcgtgttctagagcaactcggggttgtcgtagagcttagggagacttgccaaccttagggagacttgccaaccttgtcatcgcgtaccatgccaacagaatgcttagcttttacgcaccagcgcgtgacgccatgtgggagcaaagttgggaaaatggatattggcggtggtcgagaggtcactcttattggaagtctagaaatgccaaaggatgacatatggcttgtcacagctatcctatctggtctgattgaataatgtgcgaagatataagtcatggaaatatggagggatcatgatgtggttcaagtactatgatgatcaagatggctacaattcttgagtgaagagtgatgtttaggttgttgcctgtggtgtgtcacaatatctgtgtgttacttgtgtgtatgtgagaaattatgtgactctggagtctggatagtgcaataagtattactcaagtatatgattgaatcttctgtcatactattcaaattatgtcatattgtatcttttaaggtatgtaaacatccacttttagcgatgctaacaaaagaatagaacaacaattagtgttttc

SEQ ID NO: 215710 - DNA, 1952 bp, Zea Mays
cgtctgcggccattgcatcgaccgcgtcgttcccttactaggaaacccagacatttcaaagttagagtttcacagcttgcagtgaatttgggttctttttaatttgttgctttagtattgaattaacgtatgatcattgtggtttatggttcacattggaatttatgtgttgttcgtgcttgatgaattttctccaaaggaacaagggagacaatgagaggcgatgttgaagctatcgatcccgggaataaagctgctgcggaaccggtgggagatgtagctgcgctatcgtcaaggctggctaggaggctactacatggatcatggtgccctcctcggtgccaggggatatgcttggatcagagtaggggtaggtgagggtgaggattgtccatttatcgcctacaatttcttcaataccattgatatttaagtcatctcatcgagcttctttatatattattccgcaacttaatctattttcttgtcccaaaaatcatcaccacatctagttaccttatgttgttttgatttgttggtcgctgctccttggagaacattcatgctatggacacaaactcaggtggacgtggtgttcgacaattcaaaacatacctattacatatattggaaaaggaaaccccaggcgtttcaaagttagagtttcacagcttgcagcgaatttgggttctttttaatttgttgctttagtattgaattaacgtatgatcattgtggtttatggttcgcattggaatttatgtgttgttcgtgcttgatgaattttctccaaaagaacaagggagacaataagaggcgatgttgaagctgccgatcccgggaataaagctgctgcggaaccggtgggagatgtagctgctgcggaacacgaaagttttaatcaaggaaatggtccaagggtgcatcactggaataagctcgagaccacaagtgtcatatctcctctaatctttactctctcaggttccagttgaatatgttcattgctacaatgaagccgttttgttgtttgctgtccgccgccgtattcggggtcttcgcctgcctctatgggctcagggcggacaggggcctacaagatctcctcgggccaaggaatcgttcccctccggcgacctccctcctccctttcgtctcaggccttccactgtatctccatcaaagcgaaggatcagaggctactccgttaggaggagaggaaaggaattgtgagccttgtgttggagaagtcgaagactgagagtatatggtggctccattggtgtccatgttaatggctggcgtgttctagagcaactcggggttgtcgtagagcttagggagacttgccaaccttagggagacttgccaaccttgtcatcgcgtaccatgccaacagaatgcttagcttttacgcaccagcgcgtgacgccatgtgggagcaaagttgggaaaatggatattggcggtggtcgagaggtcactcttattggaagtctagaaatgccaaaggatgacatatggcttgtcacagctatcctatctggtctgattgaataatgtgcgaagatataagtcatgcagctgggagtggttttatactcgctgatgacatcaagtcttaggtgcttccattgatcaataactcagggaaatatggagggatcatgatgtggttcaagtactatgatgatcaagatggctacaattcttgagtgaagagtgatgtttaggttgttgcctgtggtgtgtcacaatatctgtgtgttacttgtgtgtatgtgagaaattatgtgactctggagtctggatagtgcaataagtattactcaagtatatgattgaatcttctgtcatactattcaaattatgtcatattgtatcttttaaggtatgtaaacatccacttttagcgatgctaacaaaagaatagaacaacaattagtgttttc

SEQ ID NO: 215711 - DNA, 2108 bp, Zea Mays
acgcgccacccgctcgcggtagtgctgcgtctgcggccattgcatcgaccgcgtcgttcccttactaggaaacccagacatttcaaagttagagtttcacagcttgcagtgaatttgggttctttttaatttgttgctttagtattgaattaacgtatgatcattgtggtttatggttcacattggaatttatgtgttgttcgtgcttgatgaattttctccaaaggaacaagggagacaatgagaggcgatgttgaagctatcgatcccgggaataaagctgctgcggaaccggtgggagatgtagctgcgctatcgtcaaggctggctaggaggctactacatggatcatggtgccctcctcggtgccaggggatatgcttggatcagagtaggggtaggtgagggtgaggattgtccatttatcgcctacaatttcttcaataccattgatatttaagtcatctcatcgagcttctttatatattattccgcaacttaatctattttcttgtcccaaaaatcatcaccacatctagttaccttatgttgttttgatttgttggtcgctgctccttggagaacattcatgctatggacacaaactcaggtggacgtggtgttcgacaattcaaaacatacctattacatatattggaaaaggaaaccccaggcgtttcaaagttagagtttcacagcttgcagcgaatttgggttctttttaatttgttgctttagtattgaattaacgtatgatcattgtggtttatggttcgcattggaatttatgtgttgttcgtgcttgatgaattttctccaaaagaacaagggagacaataagaggcgatgttgaagctgccgatcccgggaataaagctgctgcggaaccggtgggagatgtagctgctgcggaacacgaaagttttaatcaaggaaatggtccaagggtgcatcactggaataagctcgagaccacaagtgtcatatctcctctaatctttactctctcagtctggtgtctatcagaagctactcctttctacttaaaaggtttcagccatggctgtgctgaatttgcaatggtaggttccagttgaatatgttcattgctacaatgaagccgttttgttgtttgctgtccgccgccgtattcggggtcttcgcctgcctctatgggctcagggcggacaggggcctacaagatctcctcgggccaaggaatcgttcccctccggcgacctccctcctccctttcgtctcaggccttccactgtatctccatcaaagcgaaggatcagaggctactccgttaggaggagaggaaaggaattgtgagccttgtgttggagaagtcgaagactgagagtatatggtggctccattggtgtccatgttaatggctggcgtgttctagagcaactcggggttgtcgtagagcttagggagacttgccaaccttagggagacttgccaaccttgtcatcgcgtaccatgccaacagaatgcttagcttttacgcaccagcgcgtgacgccatgtgggagcaaagttgggaaaatggatattggcggtggtcgagaggtcactcttattggaagtctagaaatgccaaaggatgacatatggcttgtcacagctatcctatctggtctgattgaataatgtgcgaagatataagtcattggctatcaatttttgtgaatcagatatttcttggcctcctatcttcgcctcaggcagctgggagtggttttatactcgctgatgacatcaagtcttaggtgcttccattgatcaataactcagggaaatatggagggatcatgatgtggttcaagtactatgatgatcaagatggctacaattcttgagtgaagagtgatgtttaggttgttgcctgtggtgtgtcacaatatctgtgtgttacttgtgtgtatgtgagaaattatgtgactctggagtctggatagtgcaataagtattactcaagtatatgattgaatcttctgtcatactattcaaattatgtcatattgtatcttttaaggtatgtaaacatccacttttagcgatgctaacaaaagaatagaacaacaattagtgttttc

SEQ ID NO: 215712 - DNA, 1906 bp, Zea Mays
tcgtggtacgcgccacccgctcgcggtagtgctgcgtctgcggccattgcatcgaccgcgtcgttcccttactaggaaacccagacatttcaaagttagagtttcacagcttgcagtgaatttgggttctttttaatttgttgctttagtattgaattaacgtatgatcattgtggtttatggttcacattggaatttatgtgttgttcgtgcttgatgaattttctccaaaggaacaagggagacaatgagaggcgatgttgaagctatcgatcccgggaataaagctgctgcggaaccggtgggagatgtagctgcgctatcgtcaaggctggctaggaggctactacatggatcatggtgccctcctcggtgccaggggatatgcttggatcagagtagggaacattcatgctatggacacaaactcaggtggacgtggtgttcgacaattcaaaacatacctattacatatattggaaaaggaaaccccaggcgtttcaaagttagagtttcacagcttgcagcgaatttgggttctttttaatttgttgctttagtattgaattaacgtatgatcattgtggtttatggttcgcattggaatttatgtgttgttcgtgcttgatgaattttctccaaaagaacaagggagacaataagaggcgatgttgaagctgccgatcccgggaataaagctgctgcggaaccggtgggagatgtagctgctgcggaacacgaaagttttaatcaaggaaatggtccaagggtgcatcactggaataagctcgagaccacaagtgtcatatctcctctaatctttactctctcagtctggtgtctatcagaagctactcctttctacttaaaaggtttcagccatggctgtgctgaatttgcaatggtaggttccagttgaatatgttcattgctacaatgaagccgttttgttgtttgctgtccgccgccgtattcggggtcttcgcctgcctctatgggctcagggcggacaggggcctacaagatctcctcgggccaaggaatcgttcccctccggcgacctccctcctccctttcgtctcaggccttccactgtatctccatcaaagcgaaggatcagaggctactccgttaggaggagaggaaaggaattgtgagccttgtgttggagaagtcgaagactgagagtatatggtggctccattggtgtccatgttaatggctggcgtgttctagagcaactcggggttgtcgtagagcttagggagacttgccaaccttagggagacttgccaaccttgtcatcgcgtaccatgccaacagaatgcttagcttttacgcaccagcgcgtgacgccatgtgggagcaaagttgggaaaatggatattggcggtggtcgagaggtcactcttattggaagtctagaaatgccaaaggatgacatatggcttgtcacagctatcctatctggtctgattgaataatgtgcgaagatataagtcatatatttcttggcctcctatcttcgcctcaggcagctgggagtggttttatactcgctgatgacatcaagtcttaggtgcttccattgatcaataactcagggaaatatggagggatcatgatgtggttcaagtactatgatgatcaagatggctacaattcttgagtgaagagtgatgtttaggttgttgcctgtggtgtgtcacaatatctgtgtgttacttgtgtgtatgtgagaaattatgtgactctggagtctggatagtgcaataagtattactcaagtatatgattgaatcttctgtcatactattcaaattatgtcatattgtatcttttaaggtatgtaaacatccacttttagcgatgctaacaaaagaatagaacaacaattagtgttttc

SEQ ID NO: 215713 - DNA, 1735 bp, Zea Mays
tcgtggtacgcgccacccgctcgcggtagtgctgcgtctgcggccattgcatcgaccgcgtcgttcccttactaggaaacccagacatttcaaagttagagtttcacagcttgcagtgaatttgggttctttttaatttgttgctttagtattgaattaacgtatgatcattgtggtttatggttcacattggaatttatgtgttgttcgtgcttgatgaattttctccaaaggaacaagggagacaatgagaggcgatgttgaagctatcgatcccgggaataaagctgctgcggaaccggtgggagatgtagctgcgctatcgtcaaggctggctaggaggctactacatggatcatggtgccctcctcggtgccaggggatatgcttggatcagagtagggaacattcatgctatggacacaaactcaggtggacgtggtgttcgacaattcaaaacatacctattacatatattggaaaaggaaaccccaggcgtttcaaagttagagtttcacagcttgcagcgaatttgggttctttttaatttgttgctttagtattgaattaacgtatgatcattgtggtttatggttcgcattggaatttatgtgttgttcgtgcttgatgaattttctccaaaagaacaagggagacaataagaggcgatgttgaagctgccgatcccgggaataaagctgctgcggaaccggtgggagatgtagctgctgcggaacacgaaagttttaatcaaggaaatggtccaagggtgcatcactggaataagctcgagaccacaagtgtcatatctcctctaatctttactctctcagggcggacaggggcctacaagatctcctcgggccaaggaatcgttcccctccggcgacctccctcctccctttcgtctcaggccttccactgtatctccatcaaagcgaaggatcagaggctactccgttaggaggagaggaaaggaattgtgagccttgtgttggagaagtcgaagactgagagtatatggtggctccattggtgtccatgttaatggctggcgtgttctagagcaactcggggttgtcgtagagcttagggagacttgccaaccttagggagacttgccaaccttgtcatcgcgtaccatgccaacagaatgcttagcttttacgcaccagcgcgtgacgccatgtgggagcaaagttgggaaaatggatattggcggtggtcgagaggtcactcttattggaagtctagaaatgccaaaggatgacatatggcttgtcacagctatcctatctggtctgattgaataatgtgcgaagatataagtcatatatttcttggcctcctatcttcgcctcaggcagctgggagtggttttatactcgctgatgacatcaagtcttaggtgcttccattgatcaataactcagggaaatatggagggatcatgatgtggttcaagtactatgatgatcaagatggctacaattcttgagtgaagagtgatgtttaggttgttgcctgtggtgtgtcacaatatctgtgtgttacttgtgtgtatgtgagaaattatgtgactctggagtctggatagtgcaataagtattactcaagtatatgattgaatcttctgtcatactattcaaattatgtcatattgtatcttttaaggtatgtaaacatccacttttagcgatgctaacaaaagaatagaacaacaattagtgttttc

SEQ ID NO: 215714 - DNA, 3077 bp, Zea Mays
ataaaagcgggtaaagtggaacgtatccgcccctgacgtctccatctacacccggattcgccttttttttctgaacgtcttcacggctctccttccttcgccgccgcccgcccggccatggattccccgaggggtcccgcgagcttcgcaacgcaggccaacgccctcctccgcaagaacctctgcgttcagaaacggaacctcaagacaaacatcggcatcactttcttcccaatcctgatttgcgtgcttctcatcgtgctccagaacgtcatcaacagcgagcttgacaagcccaagtacaaatgcggttgcgtctgcctcgagaccagtgccaacggaaggtgcgtaaggaaagagtgtggcattcagtactcgacgctggatcaggtggggagctgtccgattcccagcccgccacagtggccagccctgattcagatcccccgtgctgatttccgggctgcaaggacgttctcccaaccgtttaatgatttgcctgatccattttgccgtgactcctggtcttgccctgcaactgtccttgtcactgggaaggacagagcggttgcagaagctatatcaagagggctgtttcctgtcctttctccgtctttgaatgcaacagatttactggatctcttctccaagatagtcgctggctcagatacacagccatggtacacacagttgctagagcctgcatttttctctggtcgtacattgtatgtgatccagcctgagtgcacacctgtcatgtcacagaccattacatataatactgggggcataccctttcagctcaatatacagtgtgttgaaggtgctccgttatggcgtgaaactgcatcaattatcaaccatgaatttttaaagggttatagacaacgaggaggacaaataaacgaatttattgcaggttatgacttcttgggcacaacacagtatggcctcggtgtaaatgtttggtacaactctacttacaatgataacaatgcatattcatttatctcaacattgcgggttccacgcttggtgaatgcagtatccaacgcttatctgaaattaatcaaagggactggggtagacatgctacttgagtttgtaaaagatatgcccaaagttgggacaagttttcagttggatctgtcttctcttctgagtgtcttattcttcacatggatcatcgaacttcttttcccagttatgttgacatatctggtgtatgagaagcagcagaagctaaggattatgatgaaaatgcacggtctgaaggatgggccttactggctgatatcttattcttatttccttgctctatcaatcgtctatatgttattctttatgatttttggctccttgattggtctcaattttttcagagtaaatgaatatagcatacaagctgtttttttcttcgtctgtataaatttgcagattgcacttgcattttttgtggcatctttctttttgtctgtcaagatggccacagtgattggctacatgtatgtatttggctctggcttacttggtgcatttcttttccgtttctttgttgaggacaaaacttttccctatggttggacattagtcatggagattgtcccaggattttccctctatcggggcctatatgaacttggtcagtatgcattctcgggaagcagtataggaactactgatgtttacagaagaaatgtgcaacatcattgcatgaacctagctttgtccaacaggattccaaagtcattctcgatatggagaaatctgatgttgctctagaaagaaaagtagttgagcaatttttgatagatcccaatgcaaaccaagctatcatctgtgataacctcaggaaggtttatcatggaagggatggaaaccctgacaagctggctgttagaggtttatctcttgtccttcaaaagggccagtgctttggaatgcttggtccaaatggagccgggaaaacatctttcattaatatgatgattggactcattaaacctacatctggtactgcttatgtccacggaatggatataaatatggacatgggtgacatatatacaaatatgggagtgtgcccacaacagaacttgctttgggaaacactgactggaaaagaacatcttttcttttatggctgttgaccactctctgaagagtgtaaatctatctcatggtaatgttggtgataagcaagtgaagaaatacagcggaggcatgaaaagaaggctcagcgtggcaatctcattgattggggaccctaaagttgtcttcatggatgagccaagcacaggaatggacccagcatcaagaaataacctatggaatgttgtgaaggaggccaagaaaaaccgtgcaattattcttactactcactcaatggaagaggcagaggtattgtgtgaccggcttggcatctttgttgatggcgatttccaatgccttggaaaccctaaagagctaaaggctagatatggggggacatacatattcacagtgacaacacccccagaccaagagatggaggttgaacatctagtgcgtcagttctcgcccagcgcaaacaagatctaccatctatctggaactcagaaattcgagctgccgaagcaagaggtgaaaatagcccatgtttttgacatggtcgagaaggcgaagcgccggctctcaatacatgcctggggactggtcgacacgaccttagaggacgtcttcatcaaggtcgccagaggagcacaagtgttcaacgagtttgcgtagataacacctttaggactgccttcgtagcaagcacgggaccccaattattggatgggcggactgcatagagaatcttgtggttttgtaggtatttttcattagtgagtcattcttgtgtggaaaataggctccatatgcttggtttacgtggttgtacataaataaatacatttttgagactgcagttgcagaatagaataattgtccagttgtgtccatatatattttttctttttcatgtgtggtgctcatgttttacttactccgtatctttaatcagcttattcgattggccttaatttataccgact

SEQ ID NO: 215715 - DNA, 3236 bp, Zea Mays
ctgacgtctccatctacacccggattcgccttttttttctgaacgtcttcacggctctccttccttcgccgccgcccgcccggccatggattccccgaggggtcccgcgagcttcgcaacgcaggccaacgccctcctccgcaagaacctctgcgttcagaaacggaacctcaagacaaacatcggcatcactttcttcccaatcctgatttgcgtgcttctcatcgtgctccagaacgtcatcaacagcgagcttgacaagcccaagtacaaatgcggttgcgtctgcctcgagaccagtgccaacggaaggtgcgtaaggaaagagtgtggcattcagtactcgacgctggatcaggtggggagctgtccgattcccagcccgccacagtggccagccctgattcagatcccccgtgctgatttccgggctgcaaggacgttctcccaaccgtttaatgatttgcctgatccattttgccgtgactcctggtcttgccctgcaactgtccttgtcactgggaaggacagagcggttgcagaagctatatcaagagggctgtttcctgtcctttctccgtctttgaatgcaacagatttactggatctcttctccaagatagtcgctatacacagccatggtacacacagttgctagagcctgcatttttctctggtcgtacattgtatgtgatccagcctgagtgcacacctgtcatgtcacagaccattacatataatactgggggcataccctttcagctcaatatacagtgtgttgaaggtgctccgttatggcgtgaaactgcatcaattatcaaccatgaatttttaaagggttatagacaacgaggaggacaaataaacgaatttattgcaggttatgacttcttgggcacaacacagtatggcctcggtgtaaatgtttggtacaactctacttacaatgataacaatgcatattcatttatctcaacattgcgggttccacgcttggtgaatgcagtatccaacgcttatctgaaattaatcaaagggactggggtagacatgctacttgagtttgtaaaagatatgcccaaagttgggacaagttttcagttggatctgtcttctcttctgagtgtcttattcttcacatggatcatcgaacttcttttcccagttatgttgacatatctggtgtatgagaagcagcagaagctaaggattatgatgaaaatgcacggtctgaaggatgggccttactggctgatatcttattcttatttccttgctctatcaatcgtctatatgttattctttatgatttttggctccttgattggtctcaattttttcagagtaaatgaatatagcatacaagctgtttttttcttcgtctgtataaatttgcagattgcacttgcattttttgtggcatctttctttttgtctgtcaagatggccacagtgattggctacatgtatgtatttggctctggcttacttggtgcatttcttttccgtttctttgttgaggacaaaacttttccctatggttggacattagtcatggagattgtcccaggattttccctctatcggggcctatatgaacttggtcagtatgcattctcgggaagcagtataggaactactggtatgacctggagaagtctgaaagatcccctcaatggaatgcgtgatgttatgatcgtaatgagtgtagaatgggcagtgctgctcatattagcattctatttagatcaaacctctttgctaggcggtggtgtcaggaaaaatccttttttctgcttcagatgtttacagaagaaatgtgcaacatcattgcatgaacctagctttgtccaacaggattccaaagtcattctcgatatggagaaatctgatgttgctctagaaagaaaagtagttgagcaatttttgatagatcccaatgcaaaccaagctatcatctgtgataacctcaggaaggtttatcatggaagggatggaaaccctgacaagctggctgttagaggtttatctcttgtccttcaaaagggccagtgctttggaatgcttggtccaaatggagccgggaaaacatctttcattaatatgatgattggactcattaaacctacatctggtactgcttatgtccacggaatggatataaatatggacatgggtgacatatatacaaatatgggagtgtgcccacaacagaacttgctttgggaaacactgactggaaaagaacatcttttcttttatggtaagttgaagaatcttaaaggttctgcattaatgaaggctgttgaccactctctgaagagtgtaaatctatctcatggtaatgttggtgataagcaagtgaagaaatacagcggaggcatgaaaagaaggctcagcgtggcaatctcattgattggggaccctaaagttgtcttcatggatgagccaagcacaggaatggacccagcatcaagaaataacctatggaatgttgtgaaggaggccaagaaaaaccgtgcaattattcttactactcactcaatggaagaggcagaggtattgtgtgaccggcttggcatctttgttgatggcgatttccaatgccttggaaaccctaaagagctaaaggctagatatggggggacatacatattcacagtgacaacacccccagaccaagagatggaggttgaacatctagtgcgtcagttctcgcccagcgcaaacaagatctaccatctatctggaactcagaaattcgagctgccgaagcaagaggtgaaaatagcccatgtttttgacatggtcgagaaggcgaagcgccggctctcaatacatgcctggggactggtcgacacgaccttagaggacgtcttcatcaaggtcgccagaggagcacaagtgttcaacgagtttgcgtagataacacctttaggactgccttcgtagcaagcacgggaccccaattattggatgggcggactgcatagagaatcttgtggttttgtaggtatttttcattagtgagtcattcttgtgtggaaaataggctccatatgcttggtttacgtggttgtacataaataaatacatttttgagactgcagttgcagaatagaataattgtccagttgtgtccatatatattttttctttttcatgtgtggtgctcatgttttacttactccgtatctttaatcagcttattcgattggccttaatttataccgact

SEQ ID NO: 215716 - DNA, 3172 bp, Zea Mays
ctgacgtctccatctacacccggattcgccttttttttctgaacgtcttcacggctctccttccttcgccgccgcccgcccggccatggattccccgaggggtcccgcgagcttcgcaacgcaggccaacgccctcctccgcaagaacctctgcgttcagaaacggaacctcaagacaaacatcggcatcactttcttcccaatcctgatttgcgtgcttctcatcgtgctccagaacgtcatcaacagcgagcttgacaagcccaagtacaaatgcggttgcgtctgcctcgagaccagtgccaacggaaggtgcgtaaggaaagagtgtggcattcagtactcgacgctggatcaggtggggagctgtccgattcccagcccgccacagtggccagccctgattcagatcccccgtgctgatttccgggctgcaaggacgttctcccaaccgtttaatgatttgcctgatccattttgccgtgactcctggtcttgccctgcaactgtccttgtcactgggaaggacagagcggttgcagaagctatatcaagagggctgtttcctgtcctttctccgtctttgaatgcaacagatttactggatctcttctccaagatagtcgctggctcagatacacagccatggtacacacagttgctagagcctgcatttttctctggtcgtacattgtatgtgatccagcctgagtgcacacctgtcatgtcacagaccattacatataatactgggggcataccctttcagctcaatatacagtgtgttgaaggtgctccgttatggcgtgaaactgcatcaattatcaaccatgaatttttaaagggttatagacaacgaggaggacaaataaacgaatttattgcaggttatgacttcttgggcacaacacagtatggcctcggtgtaaatgtttggtacaactctacttacaatgataacaatgcatattcatttatctcaacattgcgggttccacgcttggtgaatgcagtatccaacgcttatctgaaattaatcaaagggactggggtagacatgctacttgagtttgtaaaagatatgcccaaagttgggacaagttttcagttggatctgtcttctcttctgagtgtcttattcttcacatggatcatcgaacttcttttcccagttatgttgacatatctggtgtatgagaagcagcagaagctaaggattatgatgaaaatgcacggtctgaaggatgggccttactggctgatatcttattcttatttccttgctctatcaatcgtctatatgttattctttatgatttttggctccttgattgattgcacttgcattttttgtggcatctttctttttgtctgtcaagatggccacagtgattggctacatgtatgtatttggctctggcttacttggtgcatttcttttccgtttctttgttgaggacaaaacttttccctatggttggacattagtcatggagattgtcccaggattttccctctatcggggcctatatgaacttggtcagtatgcattctcgggaagcagtataggaactactggtatgacctggagaagtctgaaagatcccctcaatggaatgcgtgatgttatgatcgtaatgagtgtagaatgggcagtgctgctcatattagcattctatttagatcaaacctctttgctaggcggtggtgtcaggaaaaatccttttttctgcttcagatgtttacagaagaaatgtgcaacatcattgcatgaacctagctttgtccaacaggattccaaagtcattctcgatatggagaaatctgatgttgctctagaaagaaaagtagttgagcaatttttgatagatcccaatgcaaaccaagctatcatctgtgataacctcaggaaggtttatcatggaagggatggaaaccctgacaagctggctgttagaggtttatctcttgtccttcaaaagggccagtgctttggaatgcttggtccaaatggagccgggaaaacatctttcattaatatgatgattggactcattaaacctacatctggtactgcttatgtccacggaatggatataaatatggacatgggtgacatatatacaaatatgggagtgtgcccacaacagaacttgctttgggaaacactgactggaaaagaacatcttttcttttatggtaagttgaagaatcttaaaggttctgcattaatgaaggctgttgaccactctctgaagagtgtaaatctatctcatggtaatgttggtgataagcaagtgaagaaatacagcggaggcatgaaaagaaggctcagcgtggcaatctcattgattggggaccctaaagttgtcttcatggatgagccaagcacaggaatggacccagcatcaagaaataacctatggaatgttgtgaaggaggccaagaaaaaccgtgcaattattcttactactcactcaatggaagaggcagaggtattgtgtgaccggcttggcatctttgttgatggcgatttccaatgccttggaaaccctaaagagctaaaggctagatatggggggacatacatattcacagtgacaacacccccagaccaagagatggaggttgaacatctagtgcgtcagttctcgcccagcgcaaacaagatctaccatctatctggaactcagaaattcgagctgccgaagcaagaggtgaaaatagcccatgtttttgacatggtcgagaaggcgaagcgccggctctcaatacatgcctggggactggtcgacacgaccttagaggacgtcttcatcaaggtcgccagaggagcacaagtgttcaacgagtttgcgtagataacacctttaggactgccttcgtagcaagcacgggaccccaattattggatgggcggactgcatagagaatcttgtggttttgtaggtatttttcattagtgagtcattcttgtgtggaaaataggctccatatgcttggtttacgtggttgtacataaataaatacatttttgagactgcagttgcagaatagaataattgtccagttgtgtccatatatattttttctttttcatgtgtggtgctcatgttttacttactccgtatctttaatcagcttattcgattggccttaatttataccgact

SEQ ID NO: 215717 - DNA, 3210 bp, Zea Mays
ctgacgtctccatctacacccggattcgccttttttttctgaacgtcttcacggctctccttccttcgccgccgcccgcccggccatggattccccgaggggtcccgcgagcttcgcaacgcaggccaacgccctcctccgcaagaacctctgcgttcagaaacggaacctcaagacaaacatcggcatcactttcttcccaatcctgatttgcgtgcttctcatcgtgctccagaacgtcatcaacagcgagcttgacaagcccaagtacaaatgcggttgcgtctgcctcgagaccagtgccaacggaaggtgcgtaaggaaagagtgtggcattcagtactcgacgctggatcaggtggggagctgtccgattcccagcccgccacagtggccagccctgattcagatcccccgtgctgatttccgggctgcaaggacgttctcccaaccgtttaatgatttgcctgatccattttgccgtgactcctggtcttgccctgcaactgtccttgtcactgggaaggacagagcggttgcagaagctatatcaagagggctgtttcctgtcctttctccgtctttgaatgcaacagatttactggatctcttctccaagatagtcgctggctcagatacacagccatggtacacacagttgctagagcctgcatttttctctggtcgtacattgtatgtgatccagcctgagtgcacacctgtcatgtcacagaccattacatataatactgggggcataccctttcagctcaatatacagtgtgttgaaggtgctccgttatggcgtgaaactgcatcaattatcaaccatgaatttttaaagggttatagacaacgaggaggacaaataaacgaatttattgcaggttatgacttcttgggcacaacacagtatggcctcggtgtaaatgtttggtacaactctacttacaatgataacaatgcatattcatttatctcaacattgcgggttccacgcttggtgaatgcagtatccaacgcttatctgaaattaatcaaagggactggggtagacatgctacttgagtttgtaaaagatatgcccaaagttgggacaagttttcagttggatctgtcttctcttctgagtgtcttattcttcacatggatcatcgaacttcttttcccagttatgttgacatatctggtgtatgagaagcagcagaagctaaggattatgatgaaaatgcacggtctgaaggatgggccttactggctgatatcttattcttatttccttgctctatcaatcgtctatatgttattctttatgatttttggctccttgattggtctcaattttttcagagtaaatgaatatagcatacaagctgtttttttcttcgtctgtataaatttgcagattgcacttgcattttttgtggcatctttctttttgtctgtcaagatggccacagtgattggctacatgtatgtatttggctctggcttacttggtgcatttcttttccgtttctttgttgaggacaaaacttttccctatggttggacattagtcatggagattgtcccaggattttccctctatcggggcctatatgaacttggtcagtatgcattctcgggaagcagtataggaactactggtatgacctggagaagtctgaaagatcccctcaatggaatgcgtgatgttatgatcgtaatgagtgtagaatgggcagtgctgctcatattagcattctatttagatcaaacctctttgctaggcggtggtgtcaggaaaaatccttttttctgcttcagatgtttacagaagaaatgtgcaacatcattgcatgaacctagctttgtccaacaggattccaaagtcattctcgatatggagaaatctgatgttgctctagaaagaaaagtagttgagcaatttttgatagatcccaatgcaaaccaagctatcatctgtgataacctcaggaaggtttatcatggaagggatggaaaccctgacaagctggctgttagaggtttatctcttgtccttcaaaagggccagtgctttggaatgcttggtccaaatggagccgggaaaacatctttcattaatatggtatgatgattggactcattaaacctacatctggtactgcttatgtccacggaatggatataaatatggacatgggtgacatatatacaaatatgggagtgtgcccacaacagaacttgctttgggaaacactgactggaaaagaacatcttttcttttatggctgttgaccactctctgaagagtgtaaatctatctcatggtaatgttggtgataagcaagtgaagaaatacagcggaggcatgaaaagaaggctcagcgtggcaatctcattgattggggaccctaaagttgtcttcatggatgagccaagcacaggaatggacccagcatcaagaaataacctatggaatgttgtgaaggaggccaagaaaaaccgtgcaattattcttactactcactcaatggaagaggcagaggtattgtgtgaccggcttggcatctttgttgatggcgatttccaatgccttggaaaccctaaagagctaaaggctagatatggggggacatacatattcacagtgacaacacccccagaccaagagatggaggttgaacatctagtgcgtcagttctcgcccagcgcaaacaagatctaccatctatctggaactcagaaattcgagctgccgaagcaagaggtgaaaatagcccatgtttttgacatggtcgagaaggcgaagcgccggctctcaatacatgcctggggactggtcgacacgaccttagaggacgtcttcatcaaggtcgccagaggagcacaagtgttcaacgagtttgcgtagataacacctttaggactgccttcgtagcaagcacgggaccccaattattggatgggcggactgcatagagaatcttgtggttttgtaggtatttttcattagtgagtcattcttgtgtggaaaataggctccatatgcttggtttacgtggttgtacataaataaatacatttttgagactgcagttgcagaatagaataattgtccagttgtgtccatatatattttttctttttcatgtgtggtgctcatgttttacttactccgtatctttaatcagcttattcgattggccttaatttataccgact

SEQ ID NO: 215718 - DNA, 3255 bp, Zea Mays
ctccatctacacccggattcgccttttttttctgaacgtcttcacggctctccttccttcgccgccgcccgcccggccatggattccccgaggggtcccgcgagcttcgcaacgcaggccaacgccctcctccgcaagaacctctgcgttcagaaacggaacctcaagacaaacatcggcatcactttcttcccaatcctgatttgcgtgcttctcatcgtgctccagaacgtcatcaacagcgagcttgacaagcccaagtacaaatgcggttgcgtctgcctcgagaccagtgccaacggaaggtgcgtaaggaaagagtgtggcattcagtactcgacgctggatcaggtggggagctgtccgattcccagcccgccacagtggccagccctgattcagatcccccgtgctgatttccgggctgcaaggacgttctcccaaccgtttaatgatttgcctgatccattttgccgtgactcctggtcttgccctgcaactgtccttgtcactgggaaggacagagcggttgcagaagctatatcaagagggctgtttcctgtcctttctccgtctttgaatgcaacagatttactggatctcttctccaagatagtcgctggctcagatacacagccatggtacacacagttgctagagcctgcatttttctctggtcgtacattgtatgtgatccagcctgagtgcacacctgtcatgtcacagaccattacatataatactgggggcataccctttcagctcaatatacagtgtgttgaaggtgctccgttatggcgtgaaactgcatcaattatcaaccatgaatttttaaagggttatagacaacgaggaggacaaataaacgaatttattgcagtatggcctcggtgtaaatgtttggtacaactctacttacaatgataacaatgcatattcatttatctcaacattgcgggttccacgcttggtgaatgcagtatccaacgcttatctgaaattaatcaaagggactggggtagacatgctacttgagtttgtaaaagatatgcccaaagttgggacaagttttcagttggatctgtcttctcttctgagtgtcttattcttcacatggatcatcgaacttcttttcccagttatgttgacatatctggtgtatgagaagcagcagaagctaaggattatgatgaaaatgcacggtctgaaggatgggccttactggctgatatcttattcttatttccttgctctatcaatcgtctatatgttattctttatgatttttggctccttgattggtaattgtattacaacgttactcatgaatattctgttgtggcaaataaatcttcattgtcttgactagccttcttctgttcaggtctcaattttttcagagtaaatgaatatagcatacaagctgtttttttcttcgtctgtataaatttgcagattgcacttgcattttttgtggcatctttctttttgtctgtcaagatggccacagtgattggctacatgtatgtatttggctctggcttacttggtgcatttcttttccgtttctttgttgaggacaaaacttttccctatggttggacattagtcatggagattgtcccaggattttccctctatcggggcctatatgaacttggtcagtatgcattctcgggaagcagtataggaactactggtatgacctggagaagtctgaaagatcccctcaatggaatgcgtgatgttatgatcgtaatgagtgtagaatgggcagtgctgctcatattagcattctatttagatcaaacctctttgctaggcggtggtgtcaggaaaaatccttttttctgcttcagatgtttacagaagaaatgtgcaacatcattgcatgaacctagctttgtccaacaggattccaaagtcattctcgatatggagaaatctgatgttgctctagaaagaaaagtagttgagcaatttttgatagatcccaatgcaaaccaagctatcatctgtgataacctcaggaaggtttatcatggaagggatggaaaccctgacaagctggctgttagaggtttatctcttgtccttcaaaagggccagtgctttggaatgcttggtccaaatggagccgggaaaacatctttcattaatatgatgattggactcattaaacctacatctggtactgcttatgtccacggaatggatataaatatggacatgggtgacatatatacaaatatgggagtgtgcccacaacagaacttgctttgggaaacactgactggaaaagaacatcttttcttttatggctgttgaccactctctgaagagtgtaaatctatctcatggtaatgttggtgataagcaagtgaagaaatacagcggaggcatgaaaagaaggctcagcgtggcaatctcattgattggggaccctaaagttgtcttcatggatgagccaagcacaggaatggacccagcatcaagaaataacctatggaatgttgtgaaggaggccaagaaaaaccgtgcaattattcttactactcactcaatggaagaggcagaggtattgtgtgaccggcttggcatctttgttgatggcgatttccaatgccttggaaaccctaaagagctaaaggctagatatggggggacatacatattcacagtgacaacacccccagaccaagagatggaggttgaacatctagtgcgtcagttctcgcccagcgcaaacaagatctaccatctatctggaactcagaaattcgagctgccgaagcaagaggtgaaaatagcccatgtttttgacatggtcgagaaggcgaagcgccggctctcaatacatgcctggggactggtcgacacgaccttagaggacgtcttcatcaaggtcgccagaggagcacaagtgttcaacgagtttgcgtagataacacctttaggactgccttcgtagcaagcacgggaccccaattattggatgggcggactgcatagagaatcttgtggttttgtaggtatttttcattagtgagtcattcttgtgtggaaaataggctccatatgcttggtttacgtggttgtacataaataaatacatttttgagactgcagttgcagaatagaataattgtccagttgtgtccatatatattttttctttttcatgtgtggtgctcatgttttacttactccgtatctttaatcagcttattcgattggccttaatttataccgact

SEQ ID NO: 215719 - DNA, 3130 bp, Zea Mays
ctacacccggattcgccttttttttctgaacgtcttcacggctctccttccttcgccgccgcccgcccggccatggattccccgaggggtcccgcgagcttcgcaacgcaggccaacgccctcctccgcaagaacctctgcgttcagaaacggaacctcaagacaaacatcggcatcactttcttcccaatcctgatttgcgtgcttctcatcgtgctccagaacgtcatcaacagcgagcttgacaagcccaagtacaaatgcggttgcgtctgcctcgagaccagtgccaacggaaggtgcgtaaggaaagagtgtggcattcagtactcgacgctggatcaggtggggagctgtccgattcccagcccgccacagtggccagccctgattcagatcccccgtgctgatttccgggctgcaaggacgttctcccaaccgtttaatgatttgcctgatccattttgccgtgactcctggtcttgccctgcaactgtccttgtcactgggaaggacagagcggttgcagaagctatatcaagagggctgtttcctgtcctttctccgtctttgaatgcaacagatttactggatctcttctccaagatagtcgctatatacagtgtgttgaaggtgctccgttatggcgtgaaactgcatcaattatcaaccatgaatttttaaagggttatagacaacgaggaggacaaataaacgaatttattgcaggttatgacttcttgggcacaacacagtatggcctcggtgtaaatgtttggtacaactctacttacaatgataacaatgcatattcatttatctcaacattgcgggttccacgcttggtgaatgcagtatccaacgcttatctgaaattaatcaaagggactggggtagacatgctacttgagtttgtaaaagatatgcccaaagttgggacaagttttcagttggatctgtcttctcttctgagtgtcttattcttcacatggatcatcgaacttcttttcccagttatgttgacatatctggtgtatgagaagcagcagaagctaaggattatgatgaaaatgcacggtctgaaggatgggccttactggctgatatcttattcttatttccttgctctatcaatcgtctatatgttattctttatgatttttggctccttgattggtaattgtattacaacgttactcatgaatattctgttgtggcaaataaatcttcattgtcttgactagccttcttctgttcaggtctcaattttttcagagtaaatgaatatagcatacaagctgtttttttcttcgtctgtataaatttgcagattgcacttgcattttttgtggcatctttctttttgtctgtcaagatggccacagtgattggctacatgtatgtatttggctctggcttacttggtgcatttcttttccgtttctttgttgaggacaaaacttttccctatggttggacattagtcatggagattgtcccaggattttccctctatcggggcctatatgaacttggtcagtatgcattctcgggaagcagtataggaactactggtatgacctggagaagtctgaaagatcccctcaatggaatgcgtgatgttatgatcgtaatgagtgtagaatgggcagtgctgctcatattagcattctatttagatcaaacctctttgctaggcggtggtgtcaggaaaaatccttttttctgcttcagatgtttacagaagaaatgtgcaacatcattgcatgaacctagctttgtccaacaggattccaaagtcattctcgatatggagaaatctgatgttgctctagaaagaaaagtagttgagcaatttttgatagatcccaatgcaaaccaagctatcatctgtgataacctcaggaaggtttatcatggaagggatggaaaccctgacaagctggctgttagaggtttatctcttgtccttcaaaagggccagtgctttggaatgcttggtccaaatggagccgggaaaacatctttcattaatatgatgattggactcattaaacctacatctggtactgcttatgtccacggaatggatataaatatggacatgggtgacatatatacaaatatgggagtgtgcccacaacagaacttgctttgggaaacactgactggaaaagaacatcttttcttttatggctgttgaccactctctgaagagtgtaaatctatctcatggtaatgttggtgataagcaagtgaagaaatacagcggaggcatgaaaagaaggctcagcgtggcaatctcattgattggggaccctaaagttgtcttcatggatgagccaagcacaggaatggacccagcatcaagaaataacctatggaatgttgtgaaggaggccaagaaaaaccgtgcaattattcttactactcactcaatggaagaggcagaggtattgtgtgaccggcttggcatctttgttgatggcgatttccaatgccttggaaaccctaaagagctaaaggctagatatggggggacatacatattcacagtgacaacacccccagaccaagagatggaggttgaacatctagtgcgtcagttctcgcccagcgcaaacaagatctaccatctatctggaactcagaaattcgagctgccgaagcaagaggtgaaaatagcccatgtttttgacatggtcgagaaggcgaagcgccggctctcaatacatgcctggggactggtcgacacgaccttagaggacgtcttcatcaaggtcgccagaggagcacaagtgttcaacgagtttgcgtagataacacctttaggactgccttcgtagcaagcacgggaccccaattattggatgggcggactgcatagagaatcttgtggttttgtaggtatttttcattagtgagtcattcttgtgtggaaaataggctccatatgcttggtttacgtggttgtacataaataaatacatttttgagactgcagttgcagaatagaataattgtccagttgtgtccatatatattttttctttttcatgtgtggtgctcatgttttacttactccgtatctttaatcagcttattcgattggccttaatttataccgact

SEQ ID NO: 215720 - DNA, 1046 bp, Zea Mays
atgttgtttcgttcttttaacgaaagcttgctttgggaaacactgactggaaaagaacatcttttcttttatggtaagttgaagaatcttaaaggttctgcattaatgaaggctgttgaccactctctgaagagtgtaaatctatctcatggtaatgttggtgataagcaagtgaagaaatacagcggaggcatgaaaagaaggctcagcgtggcaatctcattgattggggaccctaaagttgtcttcatggatgagccaagcacaggaatggacccagcatcaagaaataacctatggaatgttgtgaaggaggccaagaaaaaccgtgcaattattcttactactcactcaatggaagaggcagaggtattgtgtgaccggcttggcatctttgttgatggcgatttccaatgccttggaaaccctaaagagctaaaggctagatatggggggacatacatattcacagtgacaacacccccagaccaagagatggaggttgaacatctagtgcgtcagttctcgcccagcgcaaacaagatctaccatctatctggaactcagaaattcgagctgccgaagcaagaggtgaaaatagcccatgtttttgacatggtcgagaaggcgaagcgccggctctcaatacatgcctggggactggtcgacacgaccttagaggacgtcttcatcaaggtcgccagaggagcacaagtgttcaacgagtttgcgtagataacacctttaggactgccttcgtagcaagcacgggaccccaattattggatgggcggactgcatagagaatcttgtggttttgtaggtatttttcattagtgagtcattcttgtgtggaaaataggctccatatgcttggtttacgtggttgtacataaataaatacatttttgagactgcagttgcagaatagaataattgtccagttgtgtccatatatattttttctttttcatgtgtggtgctcatgttttacttactccgtatctttaatcagcttattcgattggccttaatttataccgact

SEQ ID NO: 215721 - DNA, 583 bp, Zea Mays
cattgaaaagcagagcggcagactggcagaggcaggcgctctcggctctcctcgtggacaaaaccaccggctcccgatatccaaattggaacaggggattctgaacttggggtttgttccggggaccgattctggcatcggcagacgggatgtcagcccccctcgaccgacttgctaggccatgttttgaagggtttgtacataacgatgaaaggaaagagagcagatctgatgcagacaactcagaaggagataagaagactaagatcggatctttcaagaaaaaagcaattaacgcggggaacaaattcaggcattccctgagaaggagaagcaaaaagaagaccgaaaggggggattccatcaaggatataagggacattaaagaacttcaagatgttgagacatttcgacaatgcttaattgacgaggatttgctgccgccacagcatgacgattatcacatgatgttaagattcctaaaagcacggaaatttgatgttgagaaagctaagaatatgtggtcagacatgcttaaatggaggaaggaattcggggttgacaaaatagagggtttcaaaaa

SEQ ID NO: 215722 - DNA, 2211 bp, Zea Mays
gaaaagcagagcggcagactggcagaggcaggcgctctcggctctcctcgtggacaaaaccaccggctcccgatatccaaattggaacaggggattctgaacttggggtttgttccggggaccgattctggcatcggcagacgggatgtcagcccccctcgaccgacttgctaggccatggtttgtacataacgatgaaaggaaagagagcagatctgatgcagacaactcagaaggagataagaagactaagatcggatctttcaagaaaaaagcaattaacgcggggaacaaattcaggcattccctgagaaggagaagcaaaaagaagaccgaaaggggggattccatcaaggatataagggacattaaagaacttcaagatgttgagacatttcgacaatgcttaattgacgaggatttgctgccgccacagcatgacgattatcacatgatgttaagattcctaaaagcacggaaatttgatgttgagaaagctaagaatatgtggtcagacatgcttaaatggaggaaggaattcggggttgacaaaatagaggaatttgagtacgccgagttagatgaagttaaaaagtattacccacaattttatcatggggtagataaagagggaagacctgtctacatagaattaatagggaaagttgatgcgaacaagctagtacaagtgacaactctagatcggtatgtgaaataccatgtcaaggaatttgagaggtgcttccagatgagatttcctgcttgctccattgctgcaaaaaagcacatagattcgtcgacttctatttttgatgtgcaaggcgtgggtttcaagaacttctcaaaatctgccagggaattaatcacacgattacagaagatcgacaacgataactacccagagacattgtgccagatgtatataattaatgcgggccaaggcttcaagatgttatggagcacaataaaatcattccttgatccaaaaactgcttccaagattcatgttcttgggaataagtatcaacataagttgctcgaaataattgacgagtgtgaattgccagaatttcttggtggcaaatgcaagtgtattgaaggttgcgaaagatctgacaaaggtccttggaaggatcccaacataataaagagagtcctcaatggcgaggcgaactatggcaggcaaattgtgaccatatccagcactgatggaaggatagtcagttatgcttggccagtgcacccaaatagaaaaggcagtgatgcatctgccgagtctgggtctgaagtggaagacgtaacatctcctactgcatcaaggaacctgattacacatcctattttgacccctgttcacgaggagtcaaaattgtcggcacatggttcttcatctgttgttcatgcttctattggagaaaacattcctgttgtggacaagattgttgatgatggatggggtagtcccagatctagtccacaagctgcttcttcaggttctttgtccctgaggaatttgcatggcacatttgaaggactcagagctcaaactatcacatggctgacattcttgatgatgaccctttttgccatgctttgttctgtcccaagcaagatggctagaaggatctccaaccaatctgacggctgggtgagttggaggacaaggtgcaggtgcttgaaacgaagccgtctgagatgccgtttgaaaaggaagaattgctcaatgcagccgtccgccgtgtggatgcattggaagctgagctgatttccacaaagaaagccctttatgatgctttgatgcgacaggatgagctactcgcgtacattgataggcaggagctgatcaaatttcgtaaaaagaagttctgcttctaagatttgaccgtggagcagctgttcatgtccggagccgtttatgtgtatattggattgcggctaatatgtagtagaatgtaatgtgtccatctttagaagtgtgtaaagtatagtaggaaagaaaataggtgcgttgtggtgtgcgcctctcctccccgaggtgaatgtgtggtctagcacttgtgtgctaccctaaattgtaatcttggaagttggtgtatagctgattgcgtgctaatacgtagttgtaaatgaaatcgcatgtgctcgtgtttacatgaaaaactaaatatagcagcaccaaaaataaaaccggttatttggttagaatcatat

SEQ ID NO: 215723 - DNA, 2254 bp, Zea Mays
cgggacctcgcagcatctccctcgccccaccccaacctccacctccaccgccacccattgaaaagcagagcggcagactggcagaggcaggcgctctcggctctcctcgtggacaaaaccaccggctcccgatatccaaattggaacaggggattctgaacttggggtttgttccggggaccgattctggcatcggcagacgggatgtcagcccccctcgaccgacttgctaggccatgttttgaagggtttgtacataacgatgaaaggaaagagagcagatctgatgcagacaactcagaaggagataagaagactaagatcggatctttcaagaaaaaagcaattaacgcggggaacaaattcaggcattccctgagaaggagaagcaaaaagaagaccgaaaggggggattccatcaaggatataagggacattaaagaacttcaagatgttgagacatttcgacaatgcttaattgacgaggatttgctgccgccacagcatgacgattatcacatgatgttaagattcctaaaagcacggaaatttgatgttgagaaagctaagaatatgtggtcagacatgcttaaatggaggaaggaattcggggttgacaaaatagaggaatttgagtacgccgagttagatgaagttaaaaagtattacccacaattttatcatggggtagataaagagggaagacctgtctacatagaattaatagggaaagttgatgcgaacaagctagtacaagtgacaactctagatcggtatgtgaaataccatgtcaaggaatttgagaggtgcttccagatgagatttcctgcttgctccattgctgcaaaaaagcacatagattcgtcgacttctatttttgatgtgcaaggcgtgggtttcaagaacttctcaaaatctgccagggaattaatcacacgattacagaagatcgacaacgataactacccagagacattgtgccagatgtatataattaatgcgggccaaggcttcaagatgttatggagcacaataaaatcattccttgatccaaaaactgcttccaagattcatgttcttgggaataagtatcaacataagttgctcgaaataattgacgagtgtgaattgccagaatttcttggtggcaaatgcaagtgtattgaaggttgcgaaagatctgacaaaggtccttggaaggatcccaacataataaagagagtcctcaatggcgaggcgaactatggcaggcaaattgtgaccatatccagcactgatggaaggatagtcagttatgcttggccagtgcacccaaatagaaaaggcagtgatgcatctgccgagtctgggtctgaagtggaagacgtaacatctcctactgcatcaaggaacctgattacacatcctattttgacccctgttcacgaggagtcaaaattgtcggcacatggttcttcatctgttgttcatgcttctattggagaaaacattcctgttgtggacaagattgttgatgatggatggggtagtcccagatctagtccacaagctgcttcttcaggttctttgtccctgaggaatttgcatggcacatttgaaggactcagagctcaaactatcacatggctgacattcttgatgatgaccctttttgccatgctttgttctgtcccaagcaagatggctagaaggatctccaaccaatctggtgcaggtgcttgaaacgaagccgtctgagatgccgtttgaaaaggaagaattgctcaatgcagccgtccgccgtgtggatgcattggaagctgagctgatttccacaaagaaagccctttatgatgctttgatgcgacaggatgagctactcgcgtacattgataggcaggagctgatcaaatttcgtaaaaagaagttctgcttctaagatttgaccgtggagcagctgttcatgtccggagccgtttatgtgtatattggattgcggctaatatgtagtagaatgtaatgtgtccatctttagaagtgtgtaaagtatagtaggaaagaaaataggtgcgttgtggtgtgcgcctctcctccccgaggtgaatgtgtggtctagcacttgtgtgctaccctaaattgtaatcttggaagttggtgtatagctgattgcgtgctaatacgtagttgtaaatgaaatcgcatgtgctcgtgtttacatgaaaaactaaatatagcagcaccaaaaataaaaccggttatttggttagaatcatat

SEQ ID NO: 215724 - DNA, 2283 bp, Zea Mays
gccgggtccactcgggaagtgaccgggacctcgcagcatctccctcgccccaccccaacctccacctccaccgccacccattgaaaagcagagcggcagactggcagaggcaggcgctctcggctctcctcgtggacaaaaccaccggctcccgatatccaaattggaacaggggattctgaacttggggtttgttccggggaccgattctggcatcggcagacgggatgtcagcccccctcgaccgacttgctaggccatgttttgaagggtttgtacataacgatgaaaggaaagagagcagatctgatgcagacaactcagaaggagataagaagactaagatcggatctttcaagaaaaaagcaattaacgcggggaacaaattcaggcattccctgagaaggagaagcaaaaagaagaccgaaaggggggattccatcaaggatataagggacattaaagaacttcaagatgttgagacatttcgacaatgcttaattgacgaggatttgctgccgccacagcatgacgattatcacatgatgttaagattcctaaaagcacggaaatttgatgttgagaaagctaagaatatgtggtcagacatgcttaaatggaggaaggaattcggggttgacaaaatagaggaatttgagtacgccgagttagatgaagttaaaaagtattacccacaattttatcatggggtagataaagagggaagacctgtctacatagaattaatagggaaagttgatgcgaacaagctagtacaagtgacaactctagatcggtatgtgaaataccatgtcaaggaatttgagaggtgcttccagatgagatttcctgcttgctccattgctgcaaaaaagcacatagattcgtcgacttctatttttgatgtgcaaggcgtgggtttcaagaacttctcaaaatctgccagggaattaatcacacgattacagaagatcgacaacgataactacccagagacattgtgccagatgtatataattaatgcgggccaaggcttcaagatgttatggagcacaataaaatcattccttgatccaaaaactgcttccaagattcatgttcttgggaataagtatcaacataagttgctcgaaataattgacgagtgtgaattgccagaatttcttggtggcaaatgcaagtgtattgaaggttgcgaaagatctgacaaaggtccttggaaggatcccaacataataaagagagtcctcaatggcgaggcgaactatggcaggcaaattgtgaccatatccagcactgatggaaggatagtcagttatgcttggccagtgcacccaaatagaaaaggcagtgatgcatctgccgagtctgggtctgaagtggaagacgtaacatctcctactgcatcaaggaacctgattacacatcctattttgacccctgttcacgaggagtcaaaattgtcggcacatggttcttcatctgttgttcatgcttctattggagaaaacattcctgttgtggacaagattgttgatgatggatggggtagtcccagatctagtccacaagctgcttcttcaggttctttgtccctgaggaatttgcatggcacatttgaaggactcagagctcaaactatcacatggctgacattcttgatgatgaccctttttgccatgctttgttctgtcccaagcaagatggctagaaggatctccaaccaatctggacaaggtgcaggtgcttgaaacgaagccgtctgagatgccgtttgaaaaggaagaattgctcaatgcagccgtccgccgtgtggatgcattggaagctgagctgatttccacaaagaaagccctttatgatgctttgatgcgacaggatgagctactcgcgtacattgataggcaggagctgatcaaatttcgtaaaaagaagttctgcttctaagatttgaccgtggagcagctgttcatgtccggagccgtttatgtgtatattggattgcggctaatatgtagtagaatgtaatgtgtccatctttagaagtgtgtaaagtatagtaggaaagaaaataggtgcgttgtggtgtgcgcctctcctccccgaggtgaatgtgtggtctagcacttgtgtgctaccctaaattgtaatcttggaagttggtgtatagctgattgcgtgctaatacgtagttgtaaatgaaatcgcatgtgctcgtgtttacatgaaaaactaaatatagcagcaccaaaaataaaaccggttatttggttagaatcatat

SEQ ID NO: 215725 - DNA, 2330 bp, Zea Mays
gccgggtccactcgggaagtgaccgggacctcgcagcatctccctcgccccaccccaacctccacctccaccgccacccattgaaaagcagagcggcagactggcagaggcaggcgctctcggctctcctcgtggacaaaaccaccggctcccgatatccaaattggaacaggggattctgaacttggggtttgttccggggaccgattctggcatcggcagacgggatgtcagcccccctcgaccgacttgctaggccatgttttgaagggtttgtacataacgatgaaaggaaagagagcagatctgatgcagacaactcagaaggagataagaagactaagatcggatctttcaagaaaaaagcaattaacgcggggaacaaattcaggcattccctgagaaggagaagcaaaaagaagaccgaaaggggggattccatcaaggatataagggacattaaagaacttcaagatgttgagacatttcgacaatgcttaattgacgaggatttgctgccgccacagcatgacgattatcacatgatgttaagattcctaaaagcacggaaatttgatgttgagaaagctaagaatatgtggtcagacatgcttaaatggaggaaggaattcggggttgacaaaatagaggaatttgagtacgccgagttagatgaagttaaaaagtattacccacaattttatcatggggtagataaagagggaagacctgtctacatagaattaatagggaaagttgatgcgaacaagctagtacaagtgacaactctagatcggtatgtgaaataccatgtcaaggaatttgagaggtgcttccagatgagatttcctgcttgctccattgctgcaaaaaagcacatagattcgtcgacttctatttttgatgtgcaaggcgtgggtttcaagaacttctcaaaatctgccagggaattaatcacacgattacagaagatcgacaacgataactacccagagacattgtgccagatgtatataattaatgcgggccaaggcttcaagatgttatggagcacaataaaatcattccttgatccaaaaactgcttccaagattcatgttcttgggaataagtatcaacataagttgctcgaaataattgacgagtgtgaattgccagaatttcttggtggcaaatgcaagtgtattgaaggttgcgaaagatctgacaaaggtccttggaaggatcccaacataataaagagagtcctcaatggcgaggcgaactatggcaggcaaattgtgaccatatccagcactgatggaaggatagtcagttatgcttggccagtgcacccaaatagaaaaggcagtgatgcatctgccgagtctgggtctgaagtggaagacgtaacatctcctactgcatcaaggaacctgattacacatcctattttgacccctgttcacgaggagtcaaaattgtcggcacatggttcttcatctgttgttcatgcttctattggagaaaacattcctgttgtggacaagattgttgatgatggatggggtagtcccagatctagtccacaagctgcttcttcaggttctttgtccctgaggaatttgcatggcacatttgaaggactcagagctcaaactatcacatggctgacattcttgatgatgaccctttttgccatgctttgttctgtcccaagcaagatggctagaaggatctccaaccaatctgaaaatgatgtgatttcatcgatgctgagacggctgggtgagttggaggacaaggtgcaggtgcttgaaacgaagccgtctgagatgccgtttgaaaaggaagaattgctcaatgcagccgtccgccgtgtggatgcattggaagctgagctgatttccacaaagaaagccctttatgatgctttgatgcgacaggatgagctactcgcgtacattgataggcaggagctgatcaaatttcgtaaaaagaagttctgcttctaagatttgaccgtggagcagctgttcatgtccggagccgtttatgtgtatattggattgcggctaatatgtagtagaatgtaatgtgtccatctttagaagtgtgtaaagtatagtaggaaagaaaataggtgcgttgtggtgtgcgcctctcctccccgaggtgaatgtgtggtctagcacttgtgtgctaccctaaattgtaatcttggaagttggtgtatagctgattgcgtgctaatacgtagttgtaaatgaaatcgcatgtgctcgtgtttacatgaaaaactaaatatagcagcaccaaaaataaaaccggttatttggttagaatcatat

SEQ ID NO: 215726 - DNA, 2271 bp, Zea Mays
gccgggtccactcgggaagtgaccgggacctcgcagcatctccctcgccccaccccaacctccacctccaccgccacccattgaaaagcagagcggcagactggcagaggcaggcgctctcggctctcctcgtggacaaaaccaccggctcccgatatccaaattggaacaggggattctgaacttggggtttgttccggggaccgattctggcatcggcagacgggatgtcagcccccctcgaccgacttgctaggccatgttttgaagggtttgtacataacgatgaaaggaaagagagcagatctgatgcagacaactcagaaggagataagaagactaagatcggatctttcaagaaaaaagcaattaacgcggggaacaaattcaggcattccctgagaaggagaagcaaaaagaagaccgaaaggggggattccatcaaggatataagggacattaaagaacttcaagatgttgagacatttcgacaatgcttaattgacgaggatttgctgccgccacagcatgacgattatcacatgatgttaagattcctaaaagcacggaaatttgatgttgagaaagctaagaatatgtggtcagacatgcttaaatggaggaaggaattcggggttgacaaaatagaggaatttgagtacgccgagttagatgaagttaaaaagtattacccacaattttatcatggggtagataaagagggaagacctgtctacatagaattaatagggaaagttgatgcgaacaagctagtacaagtgacaactctagatcggtatgtgaaataccatgtcaaggaatttgagaggtgcttccagatgagatttcctgcttgctccattgctgcaaaaaagcacatagattcgtcgacttctatttttgatgtgcaaggcgtgggtttcaagaacttctcaaaatctgccagggaattaatcacacgattacagaagatcgacaacgataactacccagagacattgtgccagatgtatataattaatgcgggccaaggcttcaagatgttatggagcacaataaaatcattccttgatccaaaaactgcttccaagattcatgttcttgggaataagtatcaacataagttgctcgaaataattgacgagtgtgaattgccagaatttcttggtggcaaatgcaagtgtattgaaggttgcgaaagatctgacaaaggtccttggaaggatcccaacataataaagagagtcctcaatggcgaggcgaactatggcaggcaaattgtgaccatatccagcactgatggaaggatagtcagttatgcttggccagtgcacccaaatagaaaaggcagtgatgcatctgccgagtctgggtctgaagtggaagacgtaacatctcctactgcatcaaggaacctgattacacatcctattttgacccctgttcacgaggagtcaaaattgtcggcacatggttcttcatctgttgttcatgcttctattggagaaaacattcctgttgtggacaagattgttgatgatggatggggtagtcccagatctagtccacaagctgcttcttcaggttctttgtccctgaggaatttgcatggcacatttgaaggactcagagctcaaactatcacatggctgacattcttgatgatgaccctttttgccatgctttgttctgtcccaagcaagatggctagaaggatctccaaccaatctggtgcttgaaacgaagccgtctgagatgccgtttgaaaaggaagaattgctcaatgcagccgtccgccgtgtggatgcattggaagctgagctgatttccacaaagaaagccctttatgatgctttgatgcgacaggatgagctactcgcgtacattgataggcaggagctgatcaaatttcgtaaaaagaagttctgcttctaagatttgaccgtggagcagctgttcatgtccggagccgtttatgtgtatattggattgcggctaatatgtagtagaatgtaatgtgtccatctttagaagtgtgtaaagtatagtaggaaagaaaataggtgcgttgtggtgtgcgcctctcctccccgaggtgaatgtgtggtctagcacttgtgtgctaccctaaattgtaatcttggaagttggtgtatagctgattgcgtgctaatacgtagttgtaaatgaaatcgcatgtgctcgtgtttacatgaaaaactaaatatagcagcaccaaaaataaaaccggttatttggttagaatcatat

SEQ ID NO: 215727 - DNA, 4745 bp, Zea Mays
  misc_feature (4744)..(4745): n is a, c, g, or t
caagagagagagagagagagaagcgaggaagaaatcatcgcgcgcccgcgcccgtcgccgtcggccggcccccaacccccacgcacagacaagacgagctgctggggcgcacacacacatcaccgccgcggcgcgccagccatatccagcccagaaaactcgccagaaacaaatccgtttccctttttctgtgttcctaccccgcccaccaagaaccctgcgcgtgcgaacaagccgacgattcatcaatcgccgtcgccacctcccgctgcccctcggcctccgatcccgagacccgttgccgccgctgagctgccgcatttgctttgggggtggagggtctgagatggcgccgtagcggtgggacggggagcagcagcagctggatctcttctgggttgcagctgccgccgccgccgccgccgccgccctccctgcaagcaacccttcgcgctctcgccttgctcgtgctcgtgaagttaggaacattgcttctctttggcttctggtaatatggcagcgacgtcgccaaacaacataaggcgcaagtactcgtggtggtgggacagtcatatctgcccaaaaaactcgaaatggttgcaagaaaatctttcagatatggatagtaaaattaagctgatgatcaagatcattgaagaagatgctgaatcatttgcaaaaagagctgaaatgtactaccgacggcggcctgagctgatgaccttacttgaggagctgtaccgtgcataccgagctttagcagaaagatatgaccatgcggcaggagaactccgtcaagcacatcgaaaaatagcagaagcatttcctgatcaggttctaatggacttggatgatgaccttccagcagaaactgcttccattgaaactgacatggacaatccagacatggctccatatttcctctctttcatcaacgctagtgatttgaaaaggaatgctaaagatgaccaagattttgagagactgcagaaagaactagcaagcttgtcacaggaaaaccaagacctcaaggacaggatctcgtccatgttagagcaaggcaacaaggctgagtgcgagatccttcgcctcaaggagtcccttgctcaacaagaagcagaaaaggagtctgcagtttcactatgccagcaatcaactgctagactacaaaacctgaagtctgaaattatgcatacccaggagaaattcaacaggctgaaagaagagatgcaaactgaactacaacctttgaggaaaggagatgaacatttatttttacttgaaagagctaatcaggacttgcacttggagctagataacctgaaacttctgttgaaacagaagcatggcgaagtaaatgaaaagcaagatgagttggaaaagcttcatatctctacagaagaagagcatctcaagcgtatgcaagcagaaatggcacagctttctttggaaaaacagttatcactggcacaagacaaactgaggcatttgactcttgagaagcaggttgaagcacacaagataaaggaggtcgaaacgagcaaagttgtgattcagaaagaactggagaagattcttgaagagaaccaaaggttgaatgaccaaagtcactcttcttcagcagtgataattcgtctgcaggatgagataatttccatgaaaaatgtgcaacgaagattagaggaagagatttttcagcatgtggaggaaaagaagacacttcaacatgagctttcttatcttaaagaggataggagtgacttggagaggaaacactctacaatcaaggaacagataggatctatgaacttgaatttggaatctctacaagcactagcacaagagctgagggatggcaatgttgagctgaaagagattgtcaagaaccatgagagcattgaacttgtgcatatcgataacctaagaaagttggagaggatgtcagagacaaatgcacatttagagaagtctttgtcagctgcaacaactgagcttgagggactgagggagagcaaggtggcattagaagaatcatgcatgcacttcagatccacgattaacactcatcagtctgagcgagctgtgcttgtagcgcagattgaggtaatttctcagaccatggaggagctactggagaagaatgttttcttggagaattccttatctgacgctaatgctgaacttgagagtttaagaatgaagttcaaagaactaaaagaatcttcagaagcactccaaaatcagaattctgtacttcaatctgataagagaactcttgtccaccaggttgagggcatcactgtaactctgctgaatttggaaaggcaatacaaagaactcggaaggcggcactcagatctgcagaaggagaaggacttggtgcttgatgaagtgatcaagatacaggaacagataaggcttgagaggaaggagcatgaagattgtacacagtcaagcaacattagatttgatgctctacagaagaagattagtctattgctagaagagggcaggagtagagaggtgcagcttggtgaggaggagctcaagattgtcaaagctgagatagagatatttgtcttgcagcagtgtttgaatgacatgacagaagtaaattctgaaatcgcagaacaactgcgaaagaataaagaaatatgcaaggtccaggagggaaaaatctacagcttatcacagcataatcagaaactaactgaagggattgattcagtagtgagagtattgcatctggatcataagtatgaatccttaggccaaatgaagcttgaaatcattgtgcagctcatcttaaatgagatcagctgcctgctgaataacatatctgatgcccaggatgtgaagcagaaggagcttgttgagaaatcacttgtagttacacttctggagcatttcgggcaagaggtggctgacttgaggtcagagcggaatgtcttgaggcaagatcagcagataaagattgaggaactgctccagctgcagagagaaaaggaggaacttatgaagataagtgatgaattcttggaagaggtggaggctcgtaatcacaaagtggatgagctaaaggctgaggcgaagttcttggttgtaaggttctccgaactgcaagagtctaggaggtcattgcaaagcgagatcaccaagctattacaatcgaactcttttctatcaaatgaactaaatgattccattgaaaaacagaagaggtttgaacatgatttcagcaatcttgttagtgaagcagttagtaaagatatcctcagtgtgatctttagaagccttcatgaagagaggacattgcagctgaagtctttgcataataactttggctgtcttcaaacagcaggcggtgagctttatcaggagatcaagatgatgaacaagaggcttggagacatagaaatggagaacaagtaccttggcaaagaactaagtagaactatgagtgtttatggtggatctattgtgcaaacagcaacaggaaaaggaaatccagggcgaagagatgccaaccttctgaattcaaacaggaaaatccaacaagattgtcatgtaaatctggaggtggaacaagaggaagtttgcaatgctgattttcaggagtcaaatgaaacactacaggatgaggtccgtaagttaaggagcgaagtggaaatgcttaggagcaaggagaaggctgtgttcaacatcaaatcctgtgatgaagagatcatgaaattgctggctaacatgcaaatggctatcatgaatgcagctctgttcaaagagaaggttcttgagctcatcataacatgcgagagttttgagataagtgccatggtacagaaggaggttctgaaggaagaaatcatacaaagaaattcatatgtagatgagctgaaggacaaactaaatgctgttgagattgaaaacagaagactgaaggtcgacctaaatggtgatttcacaatgttagggtcattgcagactgaagtcagtgccctggaggagcaaaccttatctctcgctaacgaccacttgcatacaaataagctcaggatggaggaaaatgcattatctccacaccttgtgaagaccacaacaagatccagtggcgaagaaaatgcattgaggatggtgaaggggatggagctgcaaaaattgcatggaacaatcaaagcccttcagaaggtggtcacagatactggtgtcctccttgaacaagagaggcttgatttcaatgccaatttaaaagaagcaaagaagcagatcgaggtgctaaagctcaaggagatcttggatgatgatataattgaaatgaactacgagcaaatgttaaaagacatacagcttgacctcattcaaacttcttcaggccagaaaaccagtccgtttggtcaggaaaagaaaaatgtagcacaagtagatgacaagatggtaaactcacgcggttctattgggccgagccatggacatgtggctgacgacctaagaccgccgcaaagtgagtcatttgggagagagaacaatttaatggtcgtgaaagagctcagcattgacaagcaagagttaccgaggtcgcttgctatggagccacacgaggagtggagaaacaaggtcgtagaaaggttggcttctgatgcccagcgactcagtgccctccagtccagcatccaagaacttaaaacgaacgccgaaacatccgaagaggtagagctcgggagtgtcaggtaccaaataacagaagctnn

SEQ ID NO: 215728 - DNA, 4885 bp, Zea Mays
  misc_feature (4884)..(4885): n is a, c, g, or t
caagagagagagagagagagaagcgaggaagaaatcatcgcgcgcccgcgcccgtcgccgtcggccggcccccaacccccacgcacagacaagacgagctgctggggcgcacacacacatcaccgccgcggcgcgccagccatatccagcccagaaaactcgccagaaacaaatccgtttccctttttctgtgttcctaccccgcccaccaagaaccctgcgcgtgcgaacaagccgacgattcatcaatcgccgtcgccacctcccgctgcccctcggcctccgatcccgagacccgttgccgccgctgagctgccgcatttgctttgggggtggagggtctgagatggcgccgtagcggtgggacggggagcagcagcagctggatctcttctgggttgcagctgccgccgccgccgccgccgccgccctccctgcaagcaacccttcgcgctctcgccttgctcgtgctcgtggtaatttgactgctgttagattgtgatttcttcttgctgctttcgcccttcactgttgctggaattacagaagatcaggctctttctttgtcagaagttaggaacattgcttctctttggcttctggtaatatggcagcgacgtcgccaaacaacataaggcgcaagtactcgtggtggtgggacagtcatatctgcccaaaaaactcgaaatggttgcaagaaaatctttcagatatggatagtaaaattaagctgatgatcaagatcattgaagaagatgctgaatcatttgcaaaaagagctgaaatgtactaccgacggcggcctgagctgatgaccttacttgaggagctgtaccgtgcataccgagctttagcagaaagatatgaccatgcggcaggagaactccgtcaagcacatcgaaaaatagcagaagcatttcctgatcaggttctaatggacttggatgatgaccttccagcagaaactgcttccattgaaactgacatggacaatccagacatggctccatatttcctctctttcatcaacgctagtgatttgaaaaggaatgctaaagatgaccaagattttgagagactgcagaaagaactagcaagcttgtcacaggaaaaccaagacctcaaggacaggatctcgtccatgttagagcaaggcaacaaggctgagtgcgagatccttcgcctcaaggagtcccttgctcaacaagaagcagaaaaggagtctgcagtttcactatgccagcaatcaactgctagactacaaaacctgaagtctgaaattatgcatacccaggagaaattcaacaggctgaaagaagagatgcaaactgaactacaacctttgaggaaaggagatgaacatttatttttacttgaaagagctaatcaggacttgcacttggagctagataacctgaaacttctgttgaaacagaagcatggcgaagtaaatgaaaagcaagatgagttggaaaagcttcatatctctacagaagaagagcatctcaagcgtatgcaagcagaaatggcacagctttctttggaaaaacagttatcactggcacaagacaaactgaggcatttgactcttgagaagcaggttgaagcacacaagataaaggaggtcgaaacgagcaaagttgtgattcagaaagaactggagaagattcttgaagagaaccaaaggttgaatgaccaaagtcactcttcttcagcagtgataattcgtctgcaggatgagataatttccatgaaaaatgtgcaacgaagattagaggaagagatttttcagcatgtggaggaaaagaagacacttcaacatgagctttcttatcttaaagaggataggagtgacttggagaggaaacactctacaatcaaggaacagataggatctatgaacttgaatttggaatctctacaagcactagcacaagagctgagggatggcaatgttgagctgaaagagattgtcaagaaccatgagagcattgaacttgtgcatatcgataacctaagaaagttggagaggatgtcagagacaaatgcacatttagagaagtctttgtcagctgcaacaactgagcttgagggactgagggagagcaaggtggcattagaagaatcatgcatgcacttcagatccacgattaacactcatcagtctgagcgagctgtgcttgtagcgcagattgaggtaatttctcagaccatggaggagctactggagaagaatgttttcttggagaattccttatctgacgctaatgctgaacttgagagtttaagaatgaagttcaaagaactaaaagaatcttcagaagcactccaaaatcagaattctgtacttcaatctgataagagaactcttgtccaccagctctcagaaaaaacggtccatctcagtaattacactgttattttaggttgagggcatcactgtaactctgctgaatttggaaaggcaatacaaagaactcggaaggcggcactcagatctgcagaaggagaaggacttggtgcttgatgaagtgatcaagatacaggaacagataaggcttgagaggaaggagcatgaagattgtacacagtcaagcaacattagatttgatgctctacagaagaagattagtctattgctagaagagggcaggagtagagaggtgcagcttggtgaggaggagctcaagattgtcaaagctgagatagagatatttgtcttgcagcagtgtttgaatgacatgacagaagtaaattctgaaatcgcagaacaactgcgaaagaataaagaaatatgcaaggtccaggagggaaaaatctacagcttatcacagcataatcagaaactaactgaagggattgattcagtagtgagagtattgcatctggatcataagtatgaatccttaggccaaatgaagcttgaaatcattgtgcagctcatcttaaatgagatcagctgcctgctgaataacatatctgatgcccaggatgtgaagcagaaggagcttgttgagaaatcacttgtagttacacttctggagcatttcgggcaagaggtggctgacttgaggtcagagcggaatgtcttgaggcaagatcagcagataaagattgaggaactgctccagctgcagagagaaaaggaggaacttatgaagataagtgatgaattcttggaagaggtggaggctcgtaatcacaaagtggatgagctaaaggctgaggcgaagttcttggttgtaaggttctccgaactgcaagagtctaggaggtcattgcaaagcgagatcaccaagctattacaatcgaactcttttctatcaaatgaactaaatgattccattgaaaaacagaagaggtttgaacatgatttcagcaatcttgttagtgaagcagttagtaaagatatcctcagtgtgatctttagaagccttcatgaagagaggacattgcagctgaagtctttgcataataactttggctgtcttcaaacagcaggcggtgagctttatcaggagatcaagatgatgaacaagaggcttggagacatagaaatggagaacaagtaccttggcaaagaactaagtagaactatgagtgtttatggtggatctattgtgcaaacagcaacaggaaaaggaaatccagggcgaagagatgccaaccttctgaattcaaacaggaaaatccaacaagattgtcatgtaaatctggaggtggaacaagaggaagtttgcaatgctgattttcaggagtcaaatgaaacactacaggatgaggtccgtaagttaaggagcgaagtggaaatgcttaggagcaaggagaaggctgtgttcaacatcaaatcctgtgatgaagagatcatgaaattgctggctaacatgcaaatggctatcatgaatgcagctctgttcaaagagaaggttcttgagctcatcataacatgcgagagttttgagataagtgccatggtacagaaggaggttctgaaggaagaaatcatacaaagaaattcatatgtagatgagctgaaggacaaactaaatgctgttgagattgaaaacagaagactgaaggtcgacctaaatggtgatttcacaatgttagggtcattgcagactgaagtcagtgccctggaggagcaaaccttatctctcgctaacgaccacttgcatacaaataagctcaggatggaggaaaatgcattatctccacaccttgtgaagaccacaacaagatccagtggcgaagaaaatgcattgaggatggtgaaggggatggagctgcaaaaattgcatggaacaatcaaagcccttcagaaggtggtcacagatactggtgtcctccttgaacaagagaggcttgatttcaatgccaatttaaaagaagcaaagaagcagatcgaggtgctaaagctcaaggagatcttggatgatgatataattgaaatgaactacgagcaaatgttaaaagacatacagcttgacctcattcaaacttcttcaggccagaaaaccagtccgtttggtcaggaaaagaaaaatgtagcacaagtagatgacaagatggtaaactcacgcggttctattgggccgagccatggacatgtggctgacgacctaagaccgccgcaaagtgagtcatttgggagagagaacaatttaatggtcgtgaaagagctcagcattgacaagcaagagttaccgaggtcgcttgctatggagccacacgaggagtggagaaacaaggtcgtagaaaggttggcttctgatgcccagcgactcagtgccctccagtccagcatccaagaacttaaaacgaacgccgaaacatccgaagaggtagagctcgggagtgtcaggtaccaaataacagaagctnn

SEQ ID NO: 215729 - DNA, 4426 bp, Zea Mays
  misc_feature (4425)..(4426): n is a, c, g, or t
gtgaaggaccttgatttcctcaacttttggagtagccactagtccacttacagcatcgttttggtaatttgactgctgttagattgtgatttcttcttgctgctttcgcccttcactgttgctggaattacagaagatcaggctctttctttgtcagaagttaggaacattgcttctctttggcttctggtaatatggcagcgacgtcgccaaacaacataaggcgcaagtactcgtggtggtgggacagtcatatctgcccaaaaaactcgaaatggttgcaagaaaatctttcagatatggatagtaaaattaagctgatgatcaagatcattgaagaagatgctgaatcatttgcaaaaagagctgaaatgtactaccgacggcggcctgagctgatgaccttacttgaggagctgtaccgtgcataccgagctttagcagaaagatatgaccatgcggcaggagaactccgtcaagcacatcgaaaaatagcagaagcatttcctgatcaggttctaatggacttggatgatgaccttccagcagaaactgcttccattgaaactgacatggacaatccagacatggctccatatttcctctctttcatcaacgctagtgatttgaaaaggaatgctaaagatgaccaagattttgagagactgcagaaagaactagcaagcttgtcacaggaaaaccaagacctcaaggacaggatctcgtccatgttagagcaaggcaacaaggctgagtgcgagatccttcgcctcaaggagtcccttgctcaacaagaagcagaaaaggagtctgcagtttcactatgccagcaatcaactgctagactacaaaacctgaagtctgaaattatgcatacccaggagaaattcaacaggctgaaagaagagatgcaaactgaactacaacctttgaggaaaggagatgaacatttatttttacttgaaagagctaatcaggacttgcacttggagctagataacctgaaacttctgttgaaacagaagcatggcgaagtaaatgaaaagcaagatgagttggaaaagcttcatatctctacagaagaagagcatctcaagcgtatgcaagcagaaatggcacagctttctttggaaaaacagttatcactggcacaagacaaactgaggcatttgactcttgagaagcaggttgaagcacacaagataaaggaggtcgaaacgagcaaagttgtgattcagaaagaactggagaagattcttgaagagaaccaaaggttgaatgaccaaagtcactcttcttcagcagtgataattcgtctgcaggatgagataatttccatgaaaaatgtgcaacgaagattagaggaagagatttttcagcatgtggaggaaaagaagacacttcaacatgagctttcttatcttaaagaggataggagtgacttggagaggaaacactctacaatcaaggaacagataggatctatgaacttgaatttggaatctctacaagcactagcacaagagctgagggatggcaatgttgagctgaaagagattgtcaagaaccatgagagcattgaacttgtgcatatcgataacctaagaaagttggagaggatgtcagagacaaatgcacatttagagaagtctttgtcagctgcaacaactgagcttgagggactgagggagagcaaggtggcattagaagaatcatgcatgcacttcagatccacgattaacactcatcagtctgagcgagctgtgcttgtagcgcagattgaggtaatttctcagaccatggaggagctactggagaagaatgttttcttggagaattccttatctgacgctaatgctgaacttgagagtttaagaatgaagttcaaagaactaaaagaatcttcagaagcactccaaaatcagaattctgtacttcaatctgataagagaactcttgtccaccaggttgagggcatcactgtaactctgctgaatttggaaaggcaatacaaagaactcggaaggcggcactcagatctgcagaaggagaaggacttggtgcttgatgaagtgatcaagatacaggaacagataaggcttgagaggaaggagcatgaagattgtacacagtcaagcaacattagatttgatgctctacagaagaagattagtctattgctagaagagggcaggagtagagaggtgcagcttggtgaggaggagctcaagattgtcaaagctgagatagagatatttgtcttgcagcagtgtttgaatgacatgacagaagtaaattctgaaatcgcagaacaactgcgaaagaataaagaaatatgcaaggtccaggagggaaaaatctacagcttatcacagcataatcagaaactaactgaagggattgattcagtagtgagagtattgcatctggatcataagtatgaatccttaggccaaatgaagcttgaaatcattgtgcagctcatcttaaatgagatcagctgcctgctgaataacatatctgatgcccaggatgtgaagcagaaggagcttgttgagaaatcacttgtagttacacttctggagcatttcgggcaagaggtggctgacttgaggtcagagcggaatgtcttgaggcaagatcagcagataaagattgaggaactgctccagctgcagagagaaaaggaggaacttatgaagataagtgatgaattcttggaagaggtggaggctcgtaatcacaaagtggatgagctaaaggctgaggcgaagttcttggttgtaaggttctccgaactgcaagagtctaggaggtcattgcaaagcgagatcaccaagctattacaatcgaactcttttctatcaaatgaactaaatgattccattgaaaaacagaagaggtttgaacatgatttcagcaatcttgttagtgaagcagttagtaaagatatcctcagtgtgatctttagaagccttcatgaagagaggacattgcagctgaagtctttgcataataactttggctgtcttcaaacagcaggcggtgagctttatcaggagatcaagatgatgaacaagaggcttggagacatagaaatggagaacaagtaccttggcaaagaactaagtagaactatgagtgtttatggtggatctattgtgcaaacagcaacaggaaaaggaaatccagggcgaagagatgccaaccttctgaattcaaacaggaaaatccaacaagattgtcatgtaaatctggaggtggaacaagaggaagtttgcaatgctgattttcaggagtcaaatgaaacactacaggatgaggtccgtaagttaaggagcgaagtggaaatgcttaggagcaaggagaaggctgtgttcaacatcaaatcctgtgatgaagagatcatgaaattgctggctaacatgcaaatggctatcatgaatgcagctctgttcaaagagaaggttcttgagctcatcataacatgcgagagttttgagataagtgccatggtacagaaggaggttctgaaggaagaaatcatacaaagaaattcatatgtagatgagctgaaggacaaactaaatgctgttgagattgaaaacagaagactgaaggtcgacctaaatggtgatttcacaatgttagggtcattgcagactgaagtcagtgccctggaggagcaaaccttatctctcgctaacgaccacttgcatacaaataagctcaggatggaggaaaatgcattatctccacaccttgtgaagaccacaacaagatccagtggcgaagaaaatgcattgaggatggtgaaggggatggagctgcaaaaattgcatggaacaatcaaagcccttcagaaggtggtcacagatactggtgtcctccttgaacaagagaggcttgatttcaatgccaatttaaaagaagcaaagaagcagatcgaggtgctaaagctcaaggagatcttggatgatgatataattgaaatgaactacgagcaaatgttaaaagacatacagcttgacctcattcaaacttcttcaggccagaaaaccagtccgtttggtcaggaaaagaaaaatgtagcacaagtagatgacaagatggtaaactcacgcggttctattgggccgagccatggacatgtggctgacgacctaagaccgccgcaaagtgagtcatttgggagagagaacaatttaatggtcgtgaaagagctcagcattgacaagcaagagttaccgaggtcgcttgctatggagccacacgaggagtggagaaacaaggtcgtagaaaggttggcttctgatgcccagcgactcagtgccctccagtccagcatccaagaacttaaaacgaacgccgaaacatccgaagaggtagagctcgggagtgtcaggtaccaaataacagaagctnn

SEQ ID NO: 215730 - DNA, 1814 bp, Zea Mays
atgacccctgaagcagctttggatcatgtacgatccattaggcctcgagtgcttttggcgccctcgcagtggcatgctattagttcatttggagctctcaccggtggacaacttccagtatggagtacgaacttggcctgtttcctagaagccattgaagctggctgtacgaacacaggaaatgatactatagtgcagcaagataacatagataaagagaatgactctgctatgaaattagacgtttccagttccatggaaaaaccttcaggccaggggccagaggagtctatccttgagagcgattgtattggtgatgtccccatagaatgtgataaacatggtgatagtgaaccattgagcatggaaggcaaaatcatttctggcaatgtgaatgtgaagaaccaaatatcgagggaggatctaaaagaagcattcaaaaattttggaactgtccggatgcgccaacagagtgaaaccctaggaaaacatgccatgcactttcttgctggttatatttccatgttttctacacagggtccttttcagacagggataacacggataagctgtgcaggggagctcttagcacatattagaacagtgaagatgtacagttgggagaaactattcactgaacgtttggtggaaagaagagaatcagaagtgaagcatctcgcgacaagaaaatatctggatgcttggtgcgtttatttctgggcaaccacaccgacattgttctccctttccaccttttctatttttgcaataacgggacacgcattggatgctgccacggtatttacttgtgttgcactctttaacacactaatatcaccgctaaactcatttccatgggttattaatgggatgattgatgctgttatctctagcagacgactgagtaattatttatctactccagagcatcactcatccgagttaaatgcctctgctgaccttttaaaccaccactttaagagatattccaaagttggttctggtaaatcatctttattgaacacaatcattggagagactcgtgtcatcagtgggttcaattgcctatgtaccacaggtaccatggattttatctggctttttacgagataatattttgcttggtaaagaatttgatccaaggagaggagatatgtcacatattggagagaaaggtaccaacttatctggtggacaaagagctcgtctagcattggcaagggctttgtaccacaattctgatgtatacttgtttgatgacatccttagcgcggttgactcccaagttgcttcgtgcatcctggaaaaggctattatgggggcaccaactaatgcagaaaacaagattactaagcacacacaatcttcaggtagttttcactgaatcttgtccaaaaaaaaactacaccacattggtattaaatgtatgaatcgtccttttcccctctattcaacttttgttatagaggctcgacatgattttaataaggtgcgttcacattttatgttttctaagtaattgttgctaggccgagggaagtagctactttgacctgctcaatatgggagacaactatgacagattctgctcttctgaatcctaaaatgacggtgcattacagtaaaacgacagagttctgatggctctgttatgtccgatggccccgggcagccgtcggacataacacaatacgtctgacggctggcagagagactaattggtctactaaagtagctactctgacctgctcaatatgggagacagctatgacagattctgctcttctgaagaagctattttgatcgattttggc

SEQ ID NO: 215731 - DNA, 2051 bp, Zea Mays
gttgctcctgcacttggcacccttgcggagattaaatacaggaacatgacccctgaagcagctttggatcatgtacgatccattaggcctcgagtgcttttggcgccctcgcagtggcatgctattagttcatttggagctctcaccggtggacaacttccagtatggagtacgaacttggcctgtttcctagaagccattgaagctggctgtacgaacacaggaaatgatactatagtgcagcaagataacatagataaagagaatgactctgctatgaaattagacgtttccagttccatggaaaaaccttcaggccaggggccagaggagtctatccttgagagcgatgttattatgcaagggatgtcttcagatgacatgaccaaagagaaagatctaaacattggggaagctacataatctgagaagtgtattggtgatgtccccatagaatgtgataaacatggtgatagtgaaccattgagcatggaaggcaaaatcatttctggcaatgtgaatgtgaagaaccaaatatcgagggaggatctaaaagaagcattcaaaaattttggaactgtccggatgcgccaacagagtgaaaccctaggaaaacatgccatgcactttcttgctggttatatttccatgttttctacacagggtccttttcagacagggataacacggataagctgtgcaggggagctcttagcacatattagaacagtgaagatgtacagttgggagaaactattcactgaacgtttggtggaaagaagagaatcagaagtgaagcatctcgcgacaagaaaatatctggatgcttggtgcgtttatttctgggcaaccacaccgacattgttctccctttccaccttttctatttttgcaataacgggacacgcattggatgctgccacggtatttacttgtgttgcactctttaacacactaatatcaccgctaaactcatttccatgggttattaatgggatgattgatgctgttatctctagcagacgactgagtaattatttatctactccagagcatcactcatccgagttaaatgcctctgctgaccttttaaaccaccactttaagagatattccaaagtaactcataatccaatggccatcatctttcagaatgtatcctgttcttggtctagcagctctgttgctgaactgaacatagttctcagagatatatctttgcagctacaaaagggctctttattgcaattgtaggtgaggttggttctggtaaatcatctttattgaacacaatcattggagagactcgtgtcatcagtgggttcaattgcctatgtaccacaggtaccatggattttatctggctttttacgagataatattttgcttggtaaagaatttgatccaaggaggtagtttatctgtctctgacatacattaccacaagtttgtttcattatgtcattgcatggcattaaagcagctatcatgattcatgaactattggagatgctcatacaccatagaatttattgcttccccttttaattagcattctgcattacaaaatcaatgcatatacgaagaagtaatagaggcatgtgcgcttcatgttgacatattggcaatgaccagaggagatatgtcacatattggagagaaaggtaccaacttatctggtggacaaagagctcgtctagcattggcaagggctttgtaccacaattctgatgtatacttgtttgatgacatccttagcgcggttgactcccaagttgcttcgtgcatcctggaaaaggctattatgggggcaccaactaatgcagaaaacaagattactaagcacacacaatcttcagtaaaacgacagagttctgatggctctgttatgtccgatggccccgggcagccgtcggacataacacaatacgtctgacggctggcagagagactaattggtctactaaagtagctactctgacctgctcaatatgggagacagctatgacagattctgctcttctgaagaagctattttgatcgattttggc

SEQ ID NO: 215732 - DNA, 2061 bp, Zea Mays
gttgctcctgcacttggcacccttgcggagattaaatacaggaacatgacccctgaagcagctttggatcatgtacgatccattaggcctcgagtgcttttggcgccctcgcagtggcatgctattagttcatttggagctctcaccggtggacaacttccagtatggagtacgaacttggcctgtttcctagaagccattgaagctggctgtacgaacacaggaaatgatactatagtgcagcaagataacatagataaagagaatgactctgctatgaaattagacgtttccagttccatggaaaaaccttcaggccaggggccagaggagtctatccttgagagcgatgttattatgcaagggatgtcttcagatgacatgaccaaagagaaagatctaaacattggggaagctacataatctgagaagtgtattggtgatgtccccatagaatgtgataaacatggtgatagtgaaccattgagcatggaaggcaaaatcatttctggcaatgtgaatgtgaagaaccaaatatcgagggaggatctaaaagaagcattcaaaaattttggaactgtccggatgcgccaacagagtgaaaccctaggaaaacatgccatgcactttcttgctggttatatttccatgttttctacacagggtccttttcagacagggataacacggggagctcttagcacatattagaacagtgaagatgtacagttgggagaaactattcactgaacgtttggtggaaagaagagaatcagaagtgaagcatctcgcgacaagaaaatatctggatgcttggtgcgtttatttctgggcaaccacaccgacattgttctccctttccaccttttctatttttgcaataacgggacacgcattggatgctgccacggtatttacttgtgttgcactctttaacacactaatatcaccgctaaactcatttccatgggttattaatgggatgattgatgctgttatctctagcagacgactgagtaattatttatctactccagagcatcactcatccgagttaaatgcctctgctgaccttttaaaccaccactttaagagatattccaaagtaactcataatccaatggccatcatctttcagaatgtatcctgttcttggtctagcagctctgttgctgaactgaacatagttctcagagatatatctttgcagctacaaaagggctctttattgcaattgtaggttggttctggtaaatcatctttattgaacacaatcattggagagactcgtgtcatcagtgggttcaattgcctatgtaccacaggtaccatggattttatctggctttttacgagataatattttgcttggtaaagaatttgatccaaggagaggagatatgtcacatattggagagaaaggtaccaacttatctggtggacaaagagctcgtctagcattggcaagggctttgtaccacaattctgatgtatacttgtttgatgacatccttagcgcggttgactcccaagttgcttcgtgcatcctggaaaaggctattatgggggcaccaactaatgcagaaaacaagattactaagcacacacaatcttcaggtagttttcactgaatcttgtccaaaaaaaaactacaccacattggtattaaatgtatgaatcgtccttttcccctctattcaacttttgttatagaggctcgacatgattttaataaggtgcgttcacattttatgttttctaagtaattgttgctaggccgagggaagtagctactttgacctgctcaatatgggagacaactatgacagattctgctcttctgaatcctaaaatgacggtgcattacagtaaaacgacagagttctgatggctctgttatgtccgatggccccgggcagccgtcggacataacacaatacgtctgacggctggcagagagactaattggtctactaaagtagctactctgacctgctcaatatgggagacagctatgacagattctgctcttctgaagaagctattttgatcgattttggc

SEQ ID NO: 215733 - DNA, 605 bp, Zea Mays
atgacccctgaagcagctttggatcatgtacgatccattaggcctcgagtgcttttggcgccctcgcagtggcatgctattagttcatttggagctctcaccggtggacaacttccagtatggagtacgaacttggcctgtttcctagaagccattgaagctggctgtacgaacacaggaaatgatactatagtgcagcaagataacatagataaagagaatgactctgctatgaaattagacgtttccagttccatggaaaaaccttcaggccaggggccagaggagtctatccttgagagcgattgtattggtgatgtccccatagaatgtgataaacatggtgatagtgaaccattgagcatggaaggcaaaatcatttctggcaatgtgaatgtgaagaaccaaatatcgagggaggatctaaaagaagcattcaaaaattttggaactgtccggatgcgccaacagagtgaaaccctaggaaaacatgccatgcactttcttgctggttatatttccatgttttctacacagggtccttttcagacagggataacacggattatattgcttggaacaatgttactattctttctcacctg

SEQ ID NO: 215734 - DNA, 597 bp, Zea Mays
atccgcggcgcccgcgctagaaaagagtccatctcctccctccctggctcggctgtcggctcccttcgccaccgccttcacctccttccctcaccttccagagcccactgttccccggcggcggcagagatgaacgtgtggaactacgtcgtcacggcgcacaagcccacaagcgtcagccattcctgcgtcggcaactttaccagccccaaccagctcaacctcattatcgcgaaatgcacccggatcgagatccatttgcttacccctcagggccttcagccgatgcttgatgtgcctatatatgggagaattgcaacgattgagctcttccggcctcataatgagactcaggattttcttttcattgctacggagaggtacaaattctgtgttctgcaatgggacacagaaaaatcagagctaatcaccaggaaaacaaaactggtgttctctatttcgtatggaaaataatgatttatttgtaacatggatttgtacaggggcagacgcaaggggtgggcaaggtgggccatggccccaccttaattttataacttcttatacctaggtttaaatatacattaaaataaaaaa

SEQ ID NO: 215735 - DNA, 510 bp, Zea Mays
atccgcggcgcccgcgctagaaaagagtccatctcctccctccctggctcggctgtcggctcccttcgccaccgccttcacctccttccctcaccttccagagcccactgttccccggcggcggcagagatgaacgtgtggaactacgtcgtcacggcgcacaagcccacaagcgtcagccattcctgcgtcggcaactttaccagccccaaccagctcaacctcattatcgcgaaatgcacccggatcgagatccatttgcttacccctcagggccttcagccgatgcttgatgtgcctatatatgggagaattgcaacgattgagctcttccggcctcataatgagactcaggattttcttttcattgctacggagaggtacaaattctgtgttctgcaatgggacacagaaaaatcagagctaatcaccagcgctccactactcagcccaatccccacccgagtcatttgattctctctcctagcggctagcccactcgtggctcgc

SEQ ID NO: 215736 - DNA, 1577 bp, Zea Mays
gggatgctcccactccagcccgtctccagccacgccgccccccgcaccaacccacccccaccacacggaaggcggaaatcccccacgcgcaagcgtttgccttgttgcttggcgtccgtctgccgaaacaaaagtcgccgtcctcccccctcgtcgcttcatcacctcacctccgccgtcgcctcccctcatccctccaccggcccgtttgaccctctccctggctcgctcgttctcctcctcctccgtacccgtcctagtaggtttagcgctcaacagaaccccaatcaccaccccggcgccccccgagagcagttgccttgccgcttgctgcggttccatatggtgccccccgcgtcggcgtgagggctgcgcgcgctcgtgctgtttatcgggaggagatagatggggcccgccgtccgcagtagcgtcgtgatcagggccactgtggtagggctcgtgctggttggcatcgccctggccctgccgctggccgcggcgctgcggccgctccgggagcacgtcgcgtccatcggagccgcagcctccgctggttcgtggggcgatgagcatgccttctacaaaagggatgagaacgatataggcccatattcatggaatattactggaacatataaagggagctggacttttgctggtgccacaaatggttcgtctagatttcttgagtttgtggaatctaaaggtgattcagttttggaattgttgagcactccaacaaagataagcggggtgcattatgttcagggttcagttacattccatgatgtcattgacaatgcccacaatggtggagtggctcaaataaggttagaaggagtttacatatggccttttagacaacttcgcatggtagcaaacagtggtgcagatggtgaaccactccaggaagaggattatttcttgtcaaatccataccatttattgcggattttctcctctcaagtgtttcaagaatcttctgaagagaagaaccgaaggaagaattctctcacatatgacatggagaaacattgcaacacagaaatagctgctaaggtggttcgtgtgtcatctaacccaaatgatggagaacacgagaagtaccgtttggagggtttgatggagagtccagccgtcgatgatgatggggaatgcttctctcctatcttattgaatgcaacttctttgaatgttgaagtttattacaacaaagcagtcaactacacactgatggtcacttttatctctttccttcaagttttgctgctgattagacaaatggagcatagcaacacacaatctggagctgctaaggtttctattttaatgattggccaacaagctatcatggatgcatatctctgtctacttcacctgactgctgggatattggttgagtcactcttcaatgccttcgcaacggctgcattcttcaaatttgttgtattttctatttttgaaatgaggtaccttctcgccatatggaaagcaagtaggcctttaaacagtggagaaggttgggagataatgaggcgagagctgtctgttctttacagccgcttttatggcatcca

SEQ ID NO: 215737 - DNA, 1577 bp, Zea Mays; identical to SEQ ID NO: 215736

SEQ ID NO: 215738 - DNA, 1839 bp, Zea Mays
  misc_feature (1838)..(1839): n is a, c, g, or t
gggatgctcccactccagcccgtctccagccacgccgccccccgcaccaacccacccccaccacacggaaggcggaaatcccccacgcgcaagcgtttgccttgttgcttggcgtccgtctgccgaaacaaaagtcgccgtcctcccccctcgtcgcttcatcacctcacctccgccgtcgcctcccctcatccctccaccggcccgtttgaccctctccctggctcgctcgttctcctcctcctccgtacccgtcctagtaggtttagcgctcaacagaaccccaatcaccaccccggcgccccccgagagcagttgccttgccgcttgctgcggttccatatggtgccccccgcgtcggcgtgagggctgcgcgcgctcgtgctgtttatcgggaggagatagatggggcccgccgtccgcagtagcgtcgtgatcagggccactgtggtagggctcgtgctggttggcatcgccctggccctgccgctggccgcggcgctgcggccgctccgggagcacgtcgcgtccatcggagccgcagcctccgctggttcgtggggcgatgagcatgccttctacaaaagggatgagaacgatataggcccatattcatggaatattactggaacatataaagggagctggacttttgctggtgccacaaatggttcgtctagatttcttgagtttgtggaatctaaaggtgattcagttttggaattgttgagcactccaacaaagataagcggggtgcattatgttcagggttcagttacattccatgatgtcattgacaatgcccacaatggtggagtggctcaaataaggttagaaggagtttacatatggccttttagacaacttcgcatggtagcaaacagtggtgcagatggtgaaccactccaggaagaggattatttcttgtcaaatccataccatttattgcggattttctcctctcaagtgtttcaagaatcttctgaagagaagaaccgaaggaagaattctctcacatatgacatggagaaacattgcaacacagaaatagctgctaaggtggttcgtgtgtcatctaacccaaatgatggagaacacgagaagtaccgtttggagggtttgatggagagtccagccgtcgatgatgatggggaatgcttctctcctatcttattgaatgcaacttctttgaatgttgaagtttattacaacaaagcagtcaactacacactgatggtcacttttatctctttccttcaagttttgctgctgattagacaaatggagcatagcaacacacaatctggagctgctaaggtttctattttaatgattggccaacaagctatcatggatgcatatctctgtctacttcacctgactgctgggatattggttgagtcactcttcaatgccttcgcaacggctgcattcttcaaatttgttgtattttctatttttgaaatgaggtaccttctcgccatatggaaagcaagtaggcctttaaacagtggagaaggttgggagataatgaggcgagagctgtctgttctttacagccgcttttgtaagtagttactatgctcatttggtttcttttcacgaagaatcacgccaatagatcaatgaatcccaaacaacatggttttcatacagagtggtggcatgcttcttgtcatatatttgtttcaattagaacttacatatgcaatcaatctgacatttcccctgttagctggtgacctttattgtcccatttacctgctgcatgtaaatcactattacccatgtttttagttggtaggtgaagtacttgatgcttgctataaatggaaacnn

SEQ ID NO: 215739 - DNA, 3323 bp, Zea Mays
atcagatctgatcttaggagataactggaataaacacattaaatgtacagattccatatcttcatattgcttgatacataattttcaaccaatcactggtcaaactagcaggtgcggaatctggcaatacattattgtagattgttcaggattgcatatcaacacaaataatcaagtttcccgcaaaaatcagagtatcctccatgagatcttccttatattacacatgaagcactatggcaatatgaattgtcaaatgtcaatcattacttgaattatgcttctcataagggacatgtatactcttatcttggaagaatgacactacggaccttaggattagctcacttgttttctctaatacaccctacataggtaaagcacctattatcaccatcagtggtgttcaccattaaccatcctaatcgactggactggaggtgccaagacgattagctcgatcagaattcagaaagctagtcgtccgactagaacagggacaaccagattggttgctctgttttttgaagcctgtttaactgggcctacgtatgggagtacaagagcaccacagaaacacaaagcaagggagacacgcaggtaaatccaaacgatggctgtaatttctcccgcacacgactcctcccttcccatgcacgatttcccactcccgctcatgattcctcctccgtgtgctgttctgtttcccatgcatcatcctcctctctagtgagcggtgtagccagtgccctctgccagttcaagtggctgccaatattcgtgatgagctcctccgatgaaggtgtgtgcctttccctctccatcttcctctctctcctcccccatccctcactctgcagcctctgctaggttgcttgctcgttgtgctgtccctctgctattctttggttctccatcctaagatattatgcttgcatatgagtatattgcagatgtccgatgagtggactgacacaagccaccaccatctcatcaatttccttgctaatagtccagcagggacattcttcctagggtctgttgatgcttcaagtgaggtagcaaatgcacatattttggctgacttgttggggaagcaaattgataaggttgagaaggaatatgtggtgcagattgtcactgacaatggagccaagttcaaggcagcaggaggcttctaatggagaggatcccacatttgttttggacatcttatgctgcccattgcttggatttcttgttggcggacattggaaagatcaataaatcaacacttgcatcaacatggtaaagaaaatatgcagatttgtctacaagcatgggagggatcatgatctaatgagatgcttggatttcttgttcgcggacattggaaagatcaagaaattcaacacttgcatcaacatggcaaagaaaatatgcagatttgtctacaagcatgggagggttcatgatctaatgagagataagataggtcaagatcttgtgaggccagctgtaactcgctttgccacttcatttctcacattgacaagcatgtataagcacaggaatggattgaaaaaatttattgttatgaatggcatgctactagcttccctacctctcaagaaggtcggcaagttgagaacattgtcctttcaatgtcattttggaataaactggaatggtgcctaagagcttcacagccacttcttgttgctctaaggatagcagatggagataccagcagctcctgagattatggcagccatggatgttgcaaagaccacaatcaaggattctttgaaagacgaaccaagtttacttaaggaggtactaggatcatggtttttaaagcagtaaggcagtccaaggcgttggagcactgcctggacgcctaggcggcgcctaggcgaggtaggcgggcaaggcgcctaggcgttagagcaccgcccggacgcctaggcgacgccttaagaacagagactaggatactatgacaagagatgggaaaaccaaatggagcaaaagccatatagtgcagccctattcgtgaatccaagcaagtactttttcataaggaaaaaagataggagacaagctacggagctgagaattgtgtttaatgaagttatgtgaaagttggtgaatggtgatggggataagataagtaagcaagccgatgactatgagagagctgaaggcgaatccttctcaaagcatggagcaataagaaacagatagaaaataaaaacctagtaagttctgtataactatttccttccttttttctcagaaaaaaatgaactaataatggaattgtatgtttggaatgcaaattacagttctttggtggggtgggtgcatatggtgccctgacatatgagctccaacgtttagcaaaaagaattgttagcctttgttgtgctgcatctaaatacaagtgtaattggagtgaattttctcatggaagtgttgggacaggtctgaagggacgtaacttgcctagggctggtgctgctcgtgctgttgttgctgcccctgtaaggcatagttatgctaggaacaggaagcatctaaggaagacagtggctcaaagatattgatgaggaatataatgatgaagaccaagatcagcatggagaatctgattcagcaacagcaatggaagagaatgaagaatctattcatactgcccatggatcttgtaatacccaacttttataaagaagtggagttaataccctatatgaatgcgcttgcatttgtgatcacatgtaaagtaaatggaaataaatcttgcatatcatgctggtgtttttgtatgaggtgcatctaaatgggaatctaaggattcaaaacccacttgaattcaaaatttaaaaaaaggggaaaatgaaaaacttaaaaatctagaaagaaaattctaatgaagattaactatcctttccttaattagataataggaaaaaaattgccaaggcctaaggaggcccacgaaggggctgcgacagcagcagccatgggccctccaaggggattagataaagatagttagagataagattagaagattagttgagattatctaggagattagtcgaaattatctaggaaggttatcagttagtagttgttgagagcttttaggagagtttaaggagataaggatctctagctagataggggcggccagcgggcctatttatgtaatcaatggatgagaaataaaggaggcaagaattagaagggagaaaccctcctcttgctcggtcgtgggcagaggcccccgaccgacgttcctgtccatcaatacccctctccaatccctcaccgatcta

SEQ ID NO: 215740 - DNA, 3148 bp, Zea Mays
atcagatctgatcttaggagataactggaataaacacattaaatgtacagattccatatcttcatattgcttgatacataattttcaaccaatcactggtcaaactagcaggtgcggaatctggcaatacattattgtagattgttcaggattgcatatcaacacaaataatcaagtttcccgcaaaaatcagagtatcctccatgagatcttccttatattacacatgaagcactatggcaatatgaattgtcaaatgtcaatcattacttgaattatgcttctcataagggacatgtatactcttatcttggaagaatgacactacggaccttaggattagctcacttgttttctctaatacaccctacataggtaaagcacctattatcaccatcagtggtgttcaccattaaccatcctaatcgactggactggaggtgccaagacgattagctcgatcagaattcagaaagctagtcgtccgactagaacagggacaaccagattggttgctctgttttttgaagcctgtttaactgggcctacgtatgggagtacaagagcaccacagaaacacaaagcaagggagacacgcaggtaaatccaaacgatggctgtaatttctcccgcacacgactcctcccttcccatgcacgatttcccactcccgctcatgattcctcctccgtgtgctgttctgtttcccatgcatcatcctcctctctagtgagcggtgtagccagtgccctctgccagttcaagtggctgccaatattcgtgatgagctcctccgatgaaggtgtgtgcctttccctctccatcttcctctctctcctcccccatccctcactctgcagcctctgctaggttgcttgctcgttgtgctgtccctctgctattctttggttctccatcctaagatattatgcttgcatatgagtatattgcagatgtccgatgagtggactgacacaagccaccaccatctcatcaatttccttgctaatagtccagcagggacattcttcctagggtctgttgatgcttcaagtgaggtagcaaatgcacatattttggctgacttgttggggaagcaaattgataaggttgagaaggaatatgtggtgcagattgtcactgacaatggagccaagttcaaggcagcaggaggcttctaatggagaggatcccacatttgttttggacatcttatgctgcccattgcttggatttcttgttggcggacattggaaagatcaataaatcaacacttgcatcaacatggtaaagaaaatatgcagatttgtctacaagcatgggagggatcatgatctaatgagatgcttggatttcttgttcgcggacattggaaagatcaagaaattcaacacttgcatcaacatggcaaagaaaatatgcagatttgtctacaagcatgggagggttcatgatctaatgagagataagataggtcaagatcttgtgaggccagctgtaactcgctttgccacttcatttctcacattgacaagcatgtataagcacaggaatggattgaaaaaatttattgttatgaatggcatgctactagcttccctacctctcaagaaggtcggcaagttgagaacattgtcctttcaatgtcattttggaataaactggaatggtgcctaagagcttcacagccacttcttgttgctctaaggatagcagatggagataccagcagctcctgagattatggcagccatggatgttgcaaagaccacaatcaaggattctttgaaagacgaaccaagtttacttaaggagttctttggtggggtgggtgcatatggtgccctgacatatgagctccaacgtttagcaaaaagaattgttagcctttgttgtgctgcatctaaatacaagtgtaattggagtgaattttctcatggaagtgttgggacagtaagtactagtgctaagtaattggagtttggtagcaatattactgcatggtatgtgattctgcattgtattttgtgtaggtccatacaaaaaaaagaacctggttcgaacaccgaaggttaaataagtaggtgtatgtcagctacaaccggaagatggaaaacagattttttaaaactagaagctgggttccaaaagaaagaaatgcaagccactcttgattgaacaattttaattgggaaaatggatggtcggtgaaaattgtgaaccagttcccgtaggtggtgacaatgctatgacttgggttaatgtgaatgatgatattggtgcaactcagggtctgaagggacgtaacttgcctagggctggtgctgctcgtgctgttgttgctgcccctgtaaggcatagttatgctaggaacaggaagcatctaaggaagacagtggctcaaagatattgatgaggaatataatgatgaagaccaagatcagcatggagaatctgattcagcaacagcaatggaagagaatgaagaatctattcatactgcccatggatcttgtaatacccaacttttataaagaagtggagttaataccctatatgaatgcgcttgcatttgtgatcacatgtaaagtaaatggaaataaatcttgcatatcatgctggtgtttttgtatgaggtgcatctaaatgggaatctaaggattcaaaacccacttgaattcaaaatttaaaaaaaggggaaaatgaaaaacttaaaaatctagaaagaaaattctaatgaagattaactatcctttccttaattagataataggaaaaaaattgccaaggcctaaggaggcccacgaaggggctgcgacagcagcagccatgggccctccaaggggattagataaagatagttagagataagattagaagattagttgagattatctaggagattagtcgaaattatctaggaaggttatcagttagtagttgttgagagcttttaggagagtttaaggagataaggatctctagctagataggggcggccagcgggcctatttatgtaatcaatggatgagaaataaaggaggcaagaattagaagggagaaaccctcctcttgctcggtcgtgggcagaggcccccgaccgacgttcctgtccatcaatacccctctccaatccctcaccgatcta

SEQ ID NO: 215741 - DNA, 3997 bp, Zea Mays
acggtgaagccagagtccaaaatcaccctgctctacaccgcaagtcccagatctcggttgaacaagacaacactcgagcaccagtgacgcattccctctcccaccctctaggcccctaccctcccatggcgaagggcgtcggtggcggggatcccataccgctgtcgcggttcggcgcgctggtggcccagctggagtccgtagtggcatcggccaggcagaagacccccgacgcgctgctctgcttcgacctcctctccgagctctcctctgccatcgacgaggcccccaaggagaccatacaactttggcaaaggaaatgtgaggatgctctccaatccttgctcgtccttgggacacgacgtccagttcggcgcttggcgtcatcagcgatgggccgaattatcgagaaaggcgatgtgatatctgtatattcaagggcaagtaacttgcaggggtggttggtcgatgtgaaaagggctgaggccactgcatgtgcaggtgcagcacaatgtctgggggaaatttaccgtttatttggacgcaagattactgcagggctgattgagacatcaagcattgtagctaaactcatgaagtatcatgaggactttgtgagacaagatgctcttctcttgcttgagaatgcattggaaggctcaggtggtggtggtgctgctgcagcttatcaagaggcttttcgtatcatcatgcgaggtgtaagtgataaatcgttcattgtcagagcagcggcagcacgttgcttgaaggcatttgctaatattggtgggcctgcattggggatggctgatttcgattcttctatgtcttattgtgtgaagggtttggaagatagtgtatcttcagttagagattcatttgccgaagcacttggtgccatacttgctcttgcagtgaatccagatgcccaggtgaagaaaggcgggaaaaaacaaactgcttctgcaaagaaaattgaagatggtgtgcagaagcatttgattgtgccatttgtcaaagcaaatggagcaaatgcaaaggaactccggattggtttgactttatcatgggtgttctttctgcatatgattcatatgaagtatggcaccccagatagcgaacttcaaaattatgccatacaaacgatggaaattctccaggggaatgattcccttgatccacatgcgctggcatgcgttctgtatgttcttcgagttggtgtcgcggatcagatgactgagctgacacaacgcgattttttgctatttctgggaagaaagctggagtctttgaactacacagctgcaacgagagtggcaacactacgcattttgtgttacctattgagaagcgttggtgaggttccagctgaattcaaggatgttcttgataacacagttgttgcagcattgtctcattcttctgctcatgttcgtgtggaggcagctttaacattgcgtgctttagcagaggttgatcctacttgtgtaggtggtttagtttcatatggtcttacaacattgcaagctctacgagagactgtatcatttgataagggcaaaagtttgaaccttgagctcgactcactacatggacaggccactgtgttagctgctcttgttgcaatatcaccaaagttgcttcttggttatcctgcgaggctgcccaagtctgtacttgaattatccaaaaaaatgctgaatggtttcagtcgaaatccagtggctgctattgcagagcgtgaagctggttggttgctattagcttctcttctagcatccatgccaaaagaggagctggaagaccaggtgtttgatgttcttttgctatgggcgggtccttttactggaaatcctgaatcttaccttcgtcatatacaggattgggcatcagaattgcgggttctgtcagttgcagttgaggcgcttactgccttcataagaagttttgtttatccatctatcacaactactgattgtggaatcttgcttaatcctgtacttgcctaccttggcggagctctatccctcatatcttcgttgagatctaaacaagtgcccaatgtaaggtctgcgctggacctactcacaactagaacattgatggcttattggtccctttcgaatccagtggtatataaaactgagcaccagcagatacttcagctatgctcaagtccgttcagtgatccttctggatgggaagaaagctcatgcttgaagtttttgttggataagagagatgcttcactgggcccatggatacctggaagggattcatttgaggatgaattacgtgcttttgatggtggtgctgatgggtttctaccgtgtgtgtgggatgatgaaatcagcaacttccctcagccagagtcaattcggaaaatgctcgtcaaccagatgcttctctgttatggttccatatttgcatgtcaggaaaacactgtcaagataagcctcttgaacaatcttgaccagtgcctgaagtctgggaagaagtacctgtggtttaagtttctcattacaaatgcatgtgttgctctattgtcagggttaaaggaattcctcgctttacgtggtgctcaatcattgccaattgatatattaagtatgattcagtccattttcaaggccattttagtagagcctgaaatttctacagcacagcggcgagcagcgtgcgagggtctcggtttattagcacgagctgggaatgatatctttacagcaaggatggctcgctctcttctcggagagctggtaacaacaacagatctgagctatacaacttctgttgcattttcattgggttgcatccatcgaagtgctggaggaatggcattatctactctggttaccccaactgtgagctcactatctcatttgagtaaaagctctaatttcaatctgcagttgtggtcactgcatgctcttcttttaacaattgaagctgctggcttgtcttatgtctcgcaagttcaggggacacttttccttgctatggagattctcctcttggaagaaaatggatatgttgatcttcgacaaggaattggtcatcttattaatgcaatagttgctgttattggtccagagcttgctcctgatagcacattcttttcacgatgcaagtctgttattgcagagataagttcatcaaatgaaatggctacacttttagaatcggttagattctcccagcagcttgtgctttttgctcctcaagctgttcctgtgcacttgcacgttcaaggtcttatcccaatgctttactcaagacagccaagtcttagatatttagcagtgtcgacactgcaccatctgattgaaagggacccggctgcaatgattgacgagaatattgaagagaatctgttcagtatgcttgatgaggagaccgattcagaaacagcgatgttggttcgtgcaactattattcgcttattgtatacatcatgtccagtatgtccatcacggtggctggcagttttacgaaatattgttcttgctacgtcaattagaagaaacacaggtgaagttctgtcatgttttgggcataatcctcctgatagtacatctgagaatgatgtgtactatggagaagatgaagacaacatgatttccagctcaaagcagcagcaaatccgctgtgctggttctatatccagccagtttcctccaaggaataaacacctcagatatcgtaccagggtttttgctgcagaatgcgttagccatgtaccaattgcagttggagcagaacctgctcattttgacctcttgttggcaaggagcgcaatatctcaaggcacttatttgtcaaatgattggctagtgcttaaactacaggaactggtctcactttcataccagattagtactgggcaatttgaaggaatgcaaccaataggtgtgaagcttttgtgtttgataatggacaaggtctcagacatggaatatgagcaatcaacaattattttatttatattgagttgcat

SEQ ID NO: 215742 - DNA, 5732 bp, Zea Mays
acggtgaagccagagtccaaaatcaccctgctctacaccgcaagtcccagatctcggttgaacaagacaacactcgagcaccagtgacgcattccctctcccaccctctaggcccctaccctcccatggcgaagggcgtcggtggcggggatcccataccgctgtcgcggttcggcgcgctggtggcccagctggagtccgtagtggcatcggccaggcagaagacccccgacgcgctgctctgcttcgacctcctctccgagctctcctctgccatcgacgaggcccccaaggagaccatacaactttggcaaaggaaatgtgaggatgctctccaatccttgctcgtccttgggacacgacgtccagttcggcgcttggcgtcatcagcgatgggccgaattatcgagaaaggcgatgtgatatctgtatattcaagggcaagtaacttgcaggggtggttggtcgatgtgaaaagggctgaggccactgcatgtgcaggtgcagcacaatgtctgggggaaatttaccgtttatttggacgcaagattactgcagggctgattgagacatcaagcattgtagctaaactcatgaagtatcatgaggactttgtgagacaagatgctcttctcttgcttgagaatgcattggaaggctcaggtggtggtggtgctgctgcagcttatcaagaggcttttcgtatcatcatgcgaggtgtaagtgataaatcgttcattgtcagagcagcggcagcacgttgcttgaaggcatttgctaatattggtgggcctgcattggggatggctgatttcgattcttctatgtcttattgtgtgaagggtttggaagatagtgtatcttcagttagagattcatttgccgaagcacttggtgccatacttgctcttgcagtgaatccagatgcccaggtgaagaaaggcgggaaaaaacaaactgcttctgcaaagaaaattgaagatggtgtgcagaagcatttgattgtgccatttgtcaaagcaaatggagcaaatgcaaaggaactccggattggtttgactttatcatgggtgttctttctgcatatgattcatatgaagtatggcaccccagatagcgaacttcaaaattatgccatacaaacgatggaaattctccaggggaatgattcccttgatccacatgcgctggcatgcgttctgtatgttcttcgagttggtgtcgcggatcagatgactgagctgacacaacgcgattttttgctatttctgggaagaaagctggagtctttgaactacacagctgcaacgagagtggcaacactacgcattttgtgttacctattgagaagcgttggtgaggttccagctgaattcaaggatgttcttgataacacagttgttgcagcattgtctcattcttctgctcatgttcgtgtggaggcagctttaacattgcgtgctttagcagaggttgatcctacttgtgtaggtggtttagtttcatatggtcttacaacattgcaagctctacgagagactgtatcatttgataagggcaaaagtttgaaccttgagctcgactcactacatggacaggccactgtgttagctgctcttgttgcaatatcaccaaagttgcttcttggttatcctgcgaggctgcccaagtctgtacttgaattatccaaaaaaatgctgaatggtttcagtcgaaatccagtggctgctattgcagagcgtgaagctggttggttgctattagcttctcttctagcatccatgccaaaagaggagctggaagaccaggtgtttgatgttcttttgctatgggcgggtccttttactggaaatcctgaatcttaccttcgtcatatacaggattgggcatcagaattgcgggttctgtcagttgcagttgaggcgcttactgccttcataagaagttttgtttatccatctatcacaactactgattgtggaatcttgcttaatcctgtacttgcctaccttggcggagctctatccctcatatcttcgttgagatctaaacaagtgcccaatgtaaggtctgcgctggacctactcacaactagaacattgatggcttattggtccctttcgaatccagtggtatataaaactgagcaccagcagatacttcagctatgctcaagtccgttcagtgatccttctggatgggaagaaagctcatgcttgaagtttttgttggataagagagatgcttcactgggcccatggatacctggaagggattcatttgaggatgaattacgtgcttttgatggtggtgctgatgggtttctaccgtgtgtgtgggatgatgaaatcagcaacttccctcagccagagtcaattcggaaaatgctcgtcaaccagatgcttctctgttatggttccatatttgcatgtcaggaaaacactgtcaagataagcctcttgaacaatcttgaccagtgcctgaagtctgggaagaagtacctgtggtttaagtttctcattacaaatgcatgtgttgctctattgtcagggttaaaggaattcctcgctttacgtggtgctcaatcattgccaattgatatattaagtatgattcagtccattttcaaggccattttagtagagcctgaaatttctacagcacagcggcgagcagcgtgcgagggtctcggtttattagcacgagctgggaatgatatctttacagcaaggatggctcgctctcttctcggagagctggtaacaacaacagatctgagctatacaacttctgttgcattttcattgggttgcatccatcgaagtgctggaggaatggcattatctactctggttaccccaactgtgagctcactatctcatttgagtaaaagctctaatttcaatctgcagttgtggtcactgcatgctcttcttttaacaattgaagctgctggcttgtcttatgtctcgcaagttcaggggacacttttccttgctatggagattctcctcttggaagaaaatggatatgttgatcttcgacaaggaattggtcatcttattaatgcaatagttgctgttattggtccagagcttgctcctgatagcacattcttttcacgatgcaagtctgttattgcagagataagttcatcaaatgaaatggctacacttttagaatcggttagattctcccagcagcttgtgctttttgctcctcaagctgttcctgtgcacttgcacgttcaaggtcttatcccaatgctttactcaagacagccaagtcttagatatttagcagtgtcgacactgcaccatctgattgaaagggacccggctgcaatgattgacgagaatattgaagagaatctgttcagtatgcttgatgaggagaccgattcagaaacagcgatgttggttcgtgcaactattattcgcttattgtatacatcatgtccagtatgtccatcacggtggctggcagttttacgaaatattgttcttgctacgtcaattagaagaaacacaggtgaagttctgtcatgttttgggcataatcctcctgatagtacatctgagaatgatgtgtactatggagaagatgaagacaacatgatttccagctcaaagcagcagcaaatccgctgtgctggttctatatccagccagtttcctccaaggaataaacacctcagatatcgtaccagggtttttgctgcagaatgcgttagccatgtaccaattgcagttggagcagaacctgctcattttgacctcttgttggcaaggagcgcaatatctcaaggcacttatttgtcaaatgattggctagtgcttaaactacaggaactggtctcactttcataccagattagtactgggcaatttgaaggaatgcaaccaataggtgtgaagcttttgtgtttgataatggacaagttcggcaaggcagtagatccggaatttcctggccatatcttgctggaacaatttcaggcccaacttgtttctgctgttagaatggctataagcactgcttctggtccacttcttttggaggctggacttgaactcgctacaagggtgttatgacgagcagcataattggtggggatagactagctcttagtcgcttgttttctctgataacacgcccgttaagtgacatagagggcctactatatccatcttttgctgactgggtagtgtgcaagataaaagttcgccttctaactgcccatgcagcagtcaagtgtaacacctatcaattcttgaggatgagggaaaatgctcctaatgaataccagcaattggcaccttcacttgtaaacagttcaactctattaggaaaatactggattcgagcactcaaggattatgtttctataagttttggtttgcactcaaaaatcaattacaagccattccttgatgggattcagtcattattagtcttgtccaaggtgcagaggtatcttgatgaagtttggttattaattcttaaagcaacagctcttgatgccgcgcctttggattttgatgagaataatcctaaaaatttactcgaacaaacatttatatctgggcattgtatggtcaaattggacagaactgaattccaatttctttgggggttatctatccttgtgctgttccattcctgccaatcaatgaagaataattctttgaagatcaaccttgactttaaacaagacaaaaactttggggaatttattgttcatggacttgatgacaaaagaccgtgtgatcaggtcttacgcgtgctttcgtccctcacaacagaagtctttttcagcaataattttatttcagtggatatttgccagcaactcctccaggcacttacatatgcagattgttcaagcgctcctatcatccacctattcacccagacaaactcagggaagcaccacctcaactggtggggtactcgagaagaagtcaaccccccctccccctgtttgcgcagctgtcacacaagatgccgccagtggccaatgccacccatctgctacggatagtctgtctctaacatcagctgtaataccccttaccggtgaggaacgcactaggcccaaatatttacaccgatacaggatagagactgtgtggaacaaggactctaacaaagactatatatgagaacgaaaacaaggacacatggacatgcatctaacaaggaaaggttcctggattattttcctagtgtttttttacataagcgtctccctgatatatggtcttataagcaagagcggacggctacaagtgaggtccccacacacatccatgtattaattatcaatgaacacatgtccccttaaaatatcccacattgcgctactggtccattacttcacttgcctctagttgattttcatggtgcgcctgcagctgcaggtgtagcttacatggtaggcagtgagtgggataaaatgatacaatggaagaaagaggtgcacagtgggaaagtatcccaggttgattgactactgttttgtagcttagggaaagtagatcttttactcccttcagtcttgatgctggaatgagattaactaatgtgaacttgtgtagttgcaagtattgcttctctcttttttcttgaagggctaatattgtctctggtttgattccttttgcctctatgttagcaatatttaaggataatacagtaacaaagttttattcattgcatgttgcttattt

SEQ ID NO: 215743 - DNA, 5904 bp, Zea Mays
acggtgaagccagagtccaaaatcaccctgctctacaccgcaagtcccagatctcggttgaacaagacaacactcgagcaccagtgacgcattccctctcccaccctctaggcccctaccctcccatggcgaagggcgtcggtggcggggatcccataccgctgtcgcggttcggcgcgctggtggcccagctggagtccgtagtggcatcggccaggcagaagacccccgacgcgctgctctgcttcgacctcctctccgagctctcctctgccatcgacgaggcccccaaggagaccatacaactttggcaaaggaaatgtgaggatgctctccaatccttgctcgtccttgggacacgacgtccagttcggcgcttggcgtcatcagcgatgggccgaattatcgagaaaggcgatgtgatatctgtatattcaagggcaagtaacttgcaggggtggttggtcgatgtgaaaagggctgaggccactgcatgtgcaggtgcagcacaatgtctgggggaaatttaccgtttatttggacgcaagattactgcagggctgattgagacatcaagcattgtagctaaactcatgaagtatcatgaggactttgtgagacaagatgctcttctcttgcttgagaatgcattggaaggctcaggtggtggtggtgctgctgcagcttatcaagaggcttttcgtatcatcatgcgaggtgtaagtgataaatcgttcattgtcagagcagcggcagcacgttgcttgaaggcatttgctaatattggtgggcctgcattggggatggctgatttcgattcttctatgtcttattgtgtgaagggtttggaagatagtgtatcttcagttagagattcatttgccgaagcacttggtgccatacttgctcttgcagtgaatccagatgcccaggtgaagaaaggcgggaaaaaacaaactgcttctgcaaagaaaattgaagatggtgtgcagaagcatttgattgtgccatttgtcaaagcaaatggagcaaatgcaaaggaactccggattggtttgactttatcatgggtgttctttctgcatatgattcatatgaagtatggcaccccagatagcgaacttcaaaattatgccatacaaacgatggaaattctccaggggaatgattcccttgatccacatgcgctggcatgcgttctgtatgttcttcgagttggtgtcgcggatcagatgactgagctgacacaacgcgattttttgctatttctgggaagaaagctggagtctttgaactacacagctgcaacgagagtggcaacactacgcattttgtgttacctattgagaagcgttggtgaggttccagctgaattcaaggatgttcttgataacacagttgttgcagcattgtctcattcttctgctcatgatatgcagctcttgcatgttcaagaaaaagacatgccaccacaatacaagaaagtcaatttttcattgatgttggtcggctgttcacattgtgcattaatgaaatgcaaacatgaaactggctacatgtcacatctatttttaatcatgttatcattttgttgtatcaagctggttcgtgtggaggcagctttaacattgcgtgctttagcagaggttgatcctacttgtgtaggtggtttagtttcatatggtcttacaacattgcaagctctacgagagactgtatcatttgataagggcaaaagtttgaaccttgagctcgactcactacatggacaggccactgtgttagctgctcttgttgcaatatcaccaaagttgcttcttggttatcctgcgaggctgcccaagtctgtacttgaattatccaaaaaaatgctgaatggtttcagtcgaaatccagtggctgctattgcagagcgtgaagctggttggttgctattagcttctcttctagcatccatgccaaaagaggagctggaagaccaggtgtttgatgttcttttgctatgggcgggtccttttactggaaatcctgaatcttaccttcgtcatatacaggattgggcatcagaattgcgggttctgtcagttgcagttgaggcgcttactgccttcataagaagttttgtttatccatctatcacaactactgattgtggaatcttgcttaatcctgtacttgcctaccttggcggagctctatccctcatatcttcgttgagatctaaacaagtgcccaatgtaaggtctgcgctggacctactcacaactagaacattgatggcttattggtccctttcgaatccagtggtatataaaactgagcaccagcagatacttcagctatgctcaagtccgttcagtgatccttctggatgggaagaaagctcatgcttgaagtttttgttggataagagagatgcttcactgggcccatggatacctggaagggattcatttgaggatgaattacgtgcttttgatggtggtgctgatgggtttctaccgtgtgtgtgggatgatgaaatcagcaacttccctcagccagagtcaattcggaaaatgctcgtcaaccagatgcttctctgttatggttccatatttgcatgtcaggaaaacactgtcaagataagcctcttgaacaatcttgaccagtgcctgaagtctgggaagaagtacctgtggtttaagtttctcattacaaatgcatgtgttgctctattgtcagggttaaaggaattcctcgctttacgtggtgctcaatcattgccaattgatatattaagtatgattcagtccattttcaaggccattttagtagagcctgaaatttctacagcacagcggcgagcagcgtgcgagggtctcggtttattagcacgagctgggaatgatatctttacagcaaggatggctcgctctcttctcggagagctggtaacaacaacagatctgagctatacaacttctgttgcattttcattgggttgcatccatcgaagtgctggaggaatggcattatctactctggttaccccaactgtgagctcactatctcatttgagtaaaagctctaatttcaatctgcagttgtggtcactgcatgctcttcttttaacaattgaagctgctggcttgtcttatgtctcgcaagttcaggggacacttttccttgctatggagattctcctcttggaagaaaatggatatgttgatcttcgacaaggaattggtcatcttattaatgcaatagttgctgttattggtccagagcttgctcctgatagcacattcttttcacgatgcaagtctgttattgcagagataagttcatcaaatgaaatggctacacttttagaatcggttagattctcccagcagcttgtgctttttgctcctcaagctgttcctgtgcacttgcacgttcaaggtcttatcccaatgctttactcaagacagccaagtcttagatatttagcagtgtcgacactgcaccatctgattgaaagggacccggctgcaatgattgacgagaatattgaagagaatctgttcagtatgcttgatgaggagaccgattcagaaacagcgatgttggttcgtgcaactattattcgcttattgtatacatcatgtccagtatgtccatcacggtggctggcagttttacgaaatattgttcttgctacgtcaattagaagaaacacaggtgaagttctgtcatgttttgggcataatcctcctgatagtacatctgagaatgatgtgtactatggagaagatgaagacaacatgatttccagctcaaagcagcagcaaatccgctgtgctggttctatatccagccagtttcctccaaggaataaacacctcagatatcgtaccagggtttttgctgcagaatgcgttagccatgtaccaattgcagttggagcagaacctgctcattttgacctcttgttggcaaggagcgcaatatctcaaggcacttatttgtcaaatgattggctagtgcttaaactacaggaactggtctcactttcataccagattagtactgggcaatttgaaggaatgcaaccaataggtgtgaagcttttgtgtttgataatggacaagttcggcaaggcagtagatccggaatttcctggccatatcttgctggaacaatttcaggcccaacttgtttctgctgttagaatggctataagcactgcttctggtccacttcttttggaggctggacttgaactcgctacaagggttatgacgagcagcataattggtggggatagactagctcttagtcgcttgttttctctgataacacgcccgttaagtgacatagagggcctactatatccatcttttgctgactgggtagtgtgcaagataaaagttcgccttctaactgcccatgcagcagtcaagtgtaacacctatcaattcttgaggatgagggaaaatgctcctaatgaataccagcaattggcaccttcacttgtaaacagttcaactctattaggaaaatactggattcgagcactcaaggattatgtttctataagttttggtttgcactcaaaaatcaattacaagccattccttgatgggattcagtcattattagtcttgtccaaggtgcagaggtatcttgatgaagtttggttattaattcttaaagcaacagctcttgatgccgcgcctttggattttgatgagaataatcctaaaaatttactcgaacaaacatttatatctgggcattgtatggtcaaattggacagaactgaattccaatttctttgggggttatctatccttgtgctgttccattcctgccaatcaatgaagaataattctttgaagatcaaccttgactttaaacaagacaaaaactttggggaatttattgttcatggacttgatgacaaaagaccgtgtgatcaggtcttacgcgtgctttcgtccctcacaacagaagtctttttcagcaataattttatttcagtggatatttgccagcaactcctccaggcacttacatatgcagattgttcaagcgctcctatcatccacctattcacccagacaaactcagggaagcaccacctcaactggtggggtactcgagaagaagtcaaccccccctccccctgtttgcgcagctgtcacacaagatgccgccagtggccaatgccacccatctgctacggatagtctgtctctaacatcagctgtaataccccttaccggtgaggaacgcactaggcccaaatatttacaccgatacaggatagagactgtgtggaacaaggactctaacaaagactatatatgagaacgaaaacaaggacacatggacatgcatctaacaaggaaaggttcctggattattttcctagtgtttttttacataagcgtctccctgatatatggtcttataagcaagagcggacggctacaagtgaggtccccacacacatccatgtattaattatcaatgaacacatgtccccttaaaatatcccacattgcgctactggtccattacttcacttgcctctagttgattttcatggtgcgcctgcagctgcaggtgtagcttacatggtaggcagtgagtgggataaaatgatacaatggaagaaagaggtgcacagtgggaaagtatcccaggttgattgactactgttttgtagcttagggaaagtagatcttttactcccttcagtcttgatgctggaatgagattaactaatgtgaacttgtgtagttgcaagtattgcttctctcttttttcttgaagggctaatattgtctctggtttgattccttttgcctctatgttagcaatatttaaggataatacagtaacaaagttttattcattgcatgttgcttattt

SEQ ID NO: 215744 - DNA, 6993 bp, Zea Mays
acggtgaagccagagtccaaaatcaccctgctctacaccgcaagtcccagatctcggttgaacaagacaacactcgagcaccagtgacgcattccctctcccaccctctaggcccctaccctcccatggcgaagggcgtcggtggcggggatcccataccgctgtcgcggttcggcgcgctggtggcccagctggagtccgtagtggcatcggccaggcagaagacccccgacgcgctgctctgcttcgacctcctctccgagctctcctctgccatcgacgaggcccccaaggagaccatacaactttggcaaaggaaatgtgaggatgctctccaatccttgctcgtccttgggacacgacgtccagttcggcgcttggcgtcatcagcgatgggccgaattatcgagaaaggcgatgtgatatctgtatattcaagggcaagtaacttgcaggggtggttggtcgatgtgaaaagggctgaggccactgcatgtgcaggtgcagcacaatgtctgggggaaatttaccgtttatttggacgcaagattactgcagggctgattgagacatcaagcattgtagctaaactcatgaagtatcatgaggactttgtgagacaagatgctcttctcttgcttgagaatgcattggaaggctcaggtggtggtggtgctgctgcagcttatcaagaggcttttcgtatcatcatgcgaggtgtaagtgataaatcgttcattgtcagagcagcggcagcacgttgcttgaaggcatttgctaatattggtgggcctgcattggggatggctgatttcgattcttctatgtcttattgtgtgaagggtttggaagatagtgtatcttcagttagagattcatttgccgaagcacttggtgccatacttgctcttgcagtgaatccagatgcccaggtgaagaaaggcgggaaaaaacaaactgcttctgcaaagaaaattgaagatggtgtgcagaagcatttgattgtgccatttgtcaaagcaaatggagcaaatgcaaaggaactccggattggtttgactttatcatgggtgttctttctgcatatgattcatatgaagtatggcaccccagatagcgaacttcaaaattatgccatacaaacgatggaaattctccaggggaatgattcccttgatccacatgcgctggcatgcgttctgtatgttcttcgagttggtgtcgcggatcagatgactgagctgacacaacgcgattttttgctatttctgggaagaaagctggagtctttgaactacacagctgcaacgagagtggcaacactacgcattttgtgttacctattgagaagcgttggtgaggttccagctgaattcaaggatgttcttgataacacagttgttgcagcattgtctcattcttctgctcatgttcgtgtggaggcagctttaacattgcgtgctttagcagaggttgatcctacttgtgtaggtggtttagtttcatatggtcttacaacattgcaagctctacgagagactgtatcatttgataagggcaaaagtttgaaccttgagctcgactcactacatggacaggccactgtgttagctgctcttgttgcaatatcaccaaagttgcttcttggttatcctgcgaggctgcccaagtctgtacttgaattatccaaaaaaatgctgaatggtttcagtcgaaatccagtggctgctattgcagagcgtgaagctggttggttgctattagcttctcttctagcatccatgccaaaagaggagctggaagaccaggtgtttgatgttcttttgctatgggcgggtccttttactggaaatcctgaatcttaccttcgtcatatacaggattgggcatcagaattgcgggttctgtcagttgcagttgaggcgcttactgccttcataagaagttttgtttatccatctatcacaactactgattgtggaatcttgcttaatcctgtacttgcctaccttggcggagctctatccctcatatcttcgttgagatctaaacaagtgcccaatgtaaggtctgcgctggacctactcacaactagaacattgatggcttattggtccctttcgaatccagtggtatataaaactgagcaccagcagatacttcagctatgctcaagtccgttcagtgatccttctggatgggaagaaagctcatgcttgaagtttttgttggataagagagatgcttcactgggcccatggatacctggaagggattcatttgaggatgaattacgtgcttttgatggtggtgctgatgggtttctaccgtgtgtgtgggatgatgaaatcagcaacttccctcagccagagtcaattcggaaaatgctcgtcaaccagatgcttctctgttatggttccatatttgcatgtcaggaaaacactgtcaagataagcctcttgaacaatcttgaccagtgcctgaagtctgggaagaagtacctgtggtttaagtttctcattacaaatgcatgtgttgctctattgtcagggttaaaggaattcctcgctttacgtggtgctcaatcattgccaattgatatattaagtatgattcagtccattttcaaggccattttagtagagcctgaaatttctacagcacagcggcgagcagcgtgcgagggtctcggtttattagcacgagctgggaatgatatctttacagcaaggatggctcgctctcttctcggagagctggtaacaacaacagatctgagctatacaacttctgttgcattttcattgggttgcatccatcgaagtgctggaggaatggcattatctactctggttaccccaactgtgagctcactatctcatttgagtaaaagctctaatttcaatctgcagttgtggtcactgcatgctcttcttttaacaattgaagctgctggcttgtcttatgtctcgcaagttcaggggacacttttccttgctatggagattctcctcttggaagaaaatggatatgttgatcttcgacaaggaattggtcatcttattaatgcaatagttgctgttattggtccagagcttgctcctgatagcacattcttttcacgatgcaagtctgttattgcagagataagttcatcaaatgaaatggctacacttttagaatcggttagattctcccagcagcttgtgctttttgctcctcaagctgttcctgtgcacttgcacgttcaaggtcttatcccaatgctttactcaagacagccaagtcttagatatttagcagtgtcgacactgcaccatctgattgaaagggacccggctgcaatgattgacgagaatattgaagagaatctgttcagtatgcttgatgaggagaccgattcagaaacagcgatgttggttcgtgcaactattattcgcttattgtatacatcatgtccagtatgtccatcacggtggctggcagttttacgaaatattgttcttgctacgtcaattagaagaaacacaggtgaagttctgtcatgttttgggcataatcctcctgatagtacatctgagaatgatgtgtactatggagaagatgaagacaacatgatttccagctcaaagcagcagcaaatccgctgtgctggttctatatccagccagtttcctccaaggaataaacacctcagatatcgtaccagggtttttgctgcagaatgcgttagccatgtaccaattgcagttggagcagaacctgctcattttgacctcttgttggcaaggagcgcaatatctcaaggcacttatttgtcaaatgattggctagtgcttaaactacaggaactggtctcactttcataccagattagtactgggcaatttgaaggaatgcaaccaataggtgtgaagcttttgtgtttgataatggacaagttcggcaaggcagtagatccggaatttcctggccatatcttgctggaacaatttcaggcccaacttgtttctgctgttagaatggctataagcactgcttctggtccacttcttttggaggctggacttgaactcgctacaagggttatgacgagcagcataattggtggggatagactagctcttagtcgcttgttttctctgataacacgcccgttaagtgacatagagggcctactatatccatcttttgctgactgggtagtgtgcaagataaaagttcgccttctaactgcccatgcagcagtcaagtgtaacacctatcaattcttgaggatgagggaaaatgctcctaatgaataccagcaattggcaccttcacttgtaaacagttcaactctattaggaaaatactggattcgagcactcaaggattatgtttctataagttttggtttgcactcaaaaatcaattacaagccattccttgatgggattcagtcattattagtcttgtccaaggtgcagaggtatcttgatgaagtttggttattaattcttaaagcaacagctcttgatgccgcgcctttggattttgatgagaataatcctaaaaatttactcgaacaaacatttatatctgggcattgtatggtcaaattggacagaactgaattccaatttctttgggggttatctatccttgtgctgttccattcctgccaatcaatgaagaataattctttgaagatcaaccttgactttaaacaagacaaaaactttggggaatttattgttcatggacttgatgacaaaagaccgtgtgatcaggtcttacgcgtgctttcgtccctcacaacagaagtctttttcagcaataattttatttcagtggatatttgccagcaactcctccaggcacttacatatgcagattgttcaagcgctcctatcatccacctattcacccagattatcagattctgccctgacaatttttttgaggttgaagcctttgtcttctctgcaatagagttattgtctcagtatctgggtctgatacttcaatgggatgggagttctcagaataattcaagtaacactttgatttctgagttgtctattgcaagcgagacgatggcttatcggatcaaaggagagtatttgtggaagctggtgatgttagtggtatctacttcacaccaatcatttcaacaagtttcaactaatttatgcttctcaaatattatatgcttcctccaaaatatcttccctttcatgaggaaaatttttagagaaagagtcgaatcagatggtgagtgcacaagtcctaaagttgtctttggtgctatggttggcctagtgggatacttctatgtagagtgtgataaaaagatctcattgctcgaaaacaagatttctgattcctacaagctgttgaataagatactacttttttgcttgggagaagccactgctcttgcaaaacttgttcctgagatcatttatcgaagtgaaaatgtaagtaacaatgatgtgctcctttggggcagcttcaggctgtgcgtacaggttattcaaggttcatttcgtagtaccaacatacaggtgcacatgctgggtctgcaagtactgagaagctatgcacagaaggagctaactgaaggttcagaaacaaagttggattcttttatgatgttgcttacggaattgttgggagacttgtttttggtgatggagactacattgaaggaatgttcaaacaaaaaatctgtcagtgtcgttgatgaatgtttgaaacttgttttcctcttccacacactagcacaatcaaagaaataccgacaagatgctacaactcttctgctggaggccttgctgatggttttctctctgtccagtgatactgtttcacaggagcttgctgaagtgaacaccatttccagaaagttgttctctcattttattcagattccgtctgtggctatacagatcaaagacataatgctttctgcaccagctgaaaggagactacagcttcaggacatggtccgagcttcagtcagtcaagggcagataacggtgccagtggctacgagtgcacactcagaacagaatattcaggatagttgcagtaaaaaccctgggtccacatctgaagcttctgattgtgttgcaactcacgggaataatgacaatgaagttgttgatgatgactgggatgacgattgggatgctttccaatctcttcctgcaattgcaaatgatggtgttgattctggagaaatctctcttacaactaggtacaatgaacagatccctcaagaaaatagcagttacggttcttgtaatgcggatattacagctcgtgctatggaagacataacttgtgtggacaaggaacttgaggagccctctgatttgcaattctcaagtactgaacaacagcctaaacatgatttaccagggtcatcccacgaaggttgtgctaaacttgaaagacatccatctgttgattgcaaagagcaattagctgatgatgagacagcagatgaactgcagcagcaggttcatgaagacactgatcatgtaaataaagatagcgaagttctctctgcagaaattcatggggttaaattggatatccttgatgaagatgttgaagatgattccccaatgaattcaaacaatctatcagatatcgcagaggaagagtcctagggttggtacaatgcaacgagggtggaccgcaagcttgtcgagatagtagagaagagctgtccggttcctctgatgctggcataccagattttagtatgtcaggacacgtgatgagcaagagcggaggaaatgagcaaaatgttattttgcctgtatcaatatatattgcacgagataaaaataatataaggttacaaccatgatttttattttgtgccttcctccgcccctccgcttctaaataaatagttacctttgaatgaatttcaagaaaacccaatcaagacttatgacatcaaattaatatcattaaatctaacatagaatatat

SEQ ID NO: 215745 - DNA, 6737 bp, Zea Mays
acggtgaagccagagtccaaaatcaccctgctctacaccgcaagtcccagatctcggttgaacaagacaacactcgagcaccagtgacgcattccctctcccaccctctaggcccctaccctcccatggcgaagggcgtcggtggcggggatcccataccgctgtcgcggttcggcgcgctggtggcccagctggagtccgtagtggcatcggccaggcagaagacccccgacgcgctgctctgcttcgacctcctctccgagctctcctctgccatcgacgaggcccccaaggagaccatacaactttggcaaaggaaatgtgaggatgctctccaatccttgctcgtccttgggacacgacgtccagttcggcgcttggcgtcatcagcgatgggccgaattatcgagaaaggcgatgtgatatctgtatattcaagggcaagtaacttgcaggggtggttggtcgatgtgaaaagggctgaggccactgcatgtgcaggtgcagcacaatgtctgggggaaatttaccgtttatttggacgcaagattactgcagggctgattgagacatcaagcattgtagctaaactcatgaagtatcatgaggactttgtgagacaagatgctcttctcttgcttgagaatgcattggaaggctcaggtggtggtggtgctgctgcagcttatcaagaggcttttcgtatcatcatgcgaggtgtaagtgataaatcgttcattgtcagagcagcggcagcacgttgcttgaaggcatttgctaatattggtgggcctgcattggggatggctgatttcgattcttctatgtcttattgtgtgaagggtttggaagatagtgtatcttcagttagagattcatttgccgaagcacttggtgccatacttgctcttgcagtgaatccagatgcccaggtgaagaaaggcgggaaaaaacaaactgcttctgcaaagaaaattgaagatggtgtgcagaagcatttgattgtgccatttgtcaaagcaaatggagcaaatgcaaaggaactccggattggtttgactttatcatgggtgttctttctgcatatgattcatatgaagtatggcaccccagatagcgaacttcaaaattatgccatacaaacgatggaaattctccaggggaatgattcccttgatccacatgcgctggcatgcgttctgtatgttcttcgagttggtgtcgcggatcagatgactgagctgacacaacgcgattttttgctatttctgggaagaaagctggagtctttgaactacacagctgcaacgagagtggcaacactacgcattttgtgttacctattgagaagcgttggtgaggttccagctgaattcaaggatgttcttgataacacagttgttgcagcattgtctcattcttctgctcatgttcgtgtggaggcagctttaacattgcgtgctttagcagaggttgatcctacttgtgtaggtggtttagtttcatatggtcttacaacattgcaagctctacgagagactgtatcatttgataagggcaaaagtttgaaccttgagctcgactcactacatggacaggccactgtgttagctgctcttgttgcaatatcaccaaagttgcttcttggttatcctgcgaggctgcccaagtctgtacttgaattatccaaaaaaatgctgaatggtttcagtcgaaatccagtggctgctattgcagagcgtgaagctggttggttgctattagcttctcttctagcatccatgccaaaagaggagctggaagaccaggtgtttgatgttcttttgctatgggcgggtccttttactggaaatcctgaatcttaccttcgtcatatacaggattgggcatcagaattgcgggttctgtcagttgcagttgaggcgcttactgccttcataagaagttttgtttatccatctatcacaactactgattgtggaatcttgcttaatcctgtacttgcctaccttggcggagctctatccctcatatcttcgttgagatctaaacaagtgcccaatgtaaggtctgcgctggacctactcacaactagaacattgatggcttattggtccctttcgaatccagtggtatataaaactgagcaccagcagatacttcagctatgctcaagtccgttcagtgatccttctggatgggaagaaagctcatgcttgaagtttttgttggataagagagatgcttcactgggcccatggatacctggaagggattcatttgaggatgaattacgtgcttttgatggtggtgctgatgggtttctaccgtgtgtgtgggatgatgaaatcagcaacttccctcagccagagtcaattcggaaaatgctcgtcaaccagatgcttctctgttatggttccatatttgcatgtcaggaaaacactgtcaagataagcctcttgaacaatcttgaccagtgcctgaagtctgggaagaagtacctgtggtttaagtttctcattacaaatgcatgtgttgctctattgtcagggttaaaggaattcctcgctttacgtggtgctcaatcattgccaattgatatattaagtatgattcagtccattttcaaggccattttagtagagcctgaaatttctacagcacagcggcgagcagcgtgcgagggtctcggtttattagcacgagctgggaatgatatctttacagcaaggatggctcgctctcttctcggagagctggtaacaacaacagatctgagctatacaacttctgttgcattttcattgggttgcatccatcgaagtgctggaggaatggcattatctactctggttaccccaactgtgagctcactatctcatttgagtaaaagctctaatttcaatctgcagttgtggtcactgcatgctcttcttttaacaattgaagctgctggcttgtcttatgtctcgcaagttcaggggacacttttccttgctatggagattctcctcttggaagaaaatggatatgttgatcttcgacaaggaattggtcatcttattaatgcaatagttgctgttattggtccagagcttgctcctgatagcacattcttttcacgatgcaagtctgttattgcagagataagttcatcaaatgaaatggctacacttttagaatcggttagattctcccagcagcttgtgctttttgctcctcaagctgttcctgtgcacttgcacgttcaaggtcttatcccaatgctttactcaagacagccaagtcttagatatttagcagtgtcgacactgcaccatctgattgaaagggacccggctgcaatgattgacgagaatattgaagagaatctgttcagtatgcttgatgaggagaccgattcagaaacagcgatgttggttcgtgcaactattattcgcttattgtatacatcatgtccagtatgtccatcacggtggctggcagttttacgaaatattgttcttgctacgtcaattagaagaaacacaggtgaagttctgtcatgttttgggcataatcctcctgatagtacatctgagaatgatgtgtactatggagaagatgaagacaacatgatttccagctcaaagcagcagcaaatccgctgtgctggttctatatccagccagtttcctccaaggaataaacacctcagatatcgtaccagggtttttgctgcagaatgcgttagccatgtaccaattgcagttggagcagaacctgctcattttgacctcttgttggcaaggagcgcaatatctcaaggcacttatttgtcaaatgattggctagtgcttaaactacaggaactggtctcactttcataccagattagtactgggcaatttgaaggaatgcaaccaataggtgtgaagcttttgtgtttgataatggacaagttcggcaaggcagtagatccggaatttcctggccatatcttgctggaacaatttcaggcccaacttgtttctgctgttagaatggctataagcactgcttctggtccacttcttttggaggctggacttgaactcgctacaagggttatgacgagcagcataattggtggggatagactagctcttagtcgcttgttttctctgataacacgcccgttaagtgacatagagggcctactatatccatcttttgctgactgggtagtgtgcaagataaaagttcgccttctaactgcccatgcagcagtcaagtgtaacacctatcaattcttgaggatgagggaaaatgctcctaatgaataccagcaattggcaccttcacttgtaaacagttcaactctattaggaaaatactggattcgagcactcaaggattatgtttctataagttttggtttgcactcaaaaatcaattacaagccattccttgatgggattcagtcattattagtcttgtccaaggtgcagaggtatcttgatgaagtttggttattaattcttaaagcaacagctcttgatgccgcgcctttggattttgatgagaataatcctaaaaatttactcgaacaaacatttatatctgggcattgtatggtcaaattggacagaactgaattccaatttctttgggggttatctatccttgtgctgttccattcctgccaatcaatgaagaataattctttgaagatcaaccttgactttaaacaagacaaaaactttggggaatttattgttcatggacttgatgacaaaagaccgtgtgatcaggtcttacgcgtgctttcgtccctcacaacagaagtctttttcagcaataattttatttcagtggatatttgccagcaactcctccaggcacttacatatgcagattgttcaagcgctcctatcatccacctattcacccagattatcagattctgccctgacaatttttttgaggttgaagcctttgtcttctctgcaatagagttattgtctcagtatctgggtctgatacttcaatgggatgggagttctcagaataattcaagtaacactttgatttctgagttgtctattgcaagcgagacgatggcttatcggatcaaaggagagtatttgtggaagctggtgatgttagtggtatctacttcacaccaatcatttcaacaagtttcaactaatttatgcttctcaaatattatatgcttcctccaaaatatcttccctttcatgaggaaaatttttagagcttcaggctgtgcgtacaggttattcaaggttcatttcgtagtaccaacatacaggtgcacatgctgggtctgcaagtactgagaagctatgcacagaaggagctaactgaaggttcagaaacaaagttggattcttttatgatgttgcttacggaattgttgggagacttgtttttggtgatggagactacattgaaggaatgttcaaacaaaaaatctgtcagtgtcgttgatgaatgtttgaaacttgttttcctcttccacacactagcacaatcaaagaaataccgacaagatgctacaactcttctgctggaggccttgctgatggttttctctctgtccagtgatactgtttcacaggagcttgctgaagtgaacaccatttccagaaagttgttctctcattttattcagattccgtctgtggctatacagatcaaagacataatgctttctgcaccagctgaaaggagactacagcttcaggacatggtccgagcttcagtcagtcaagggcagataacggtgccagtggctacgagtgcacactcagaacagaatattcaggatagttgcagtaaaaaccctgggtccacatctgaagcttctgattgtgttgcaactcacgggaataatgacaatgaagttgttgatgatgactgggatgacgattgggatgctttccaatctcttcctgcaattgcaaatgatggtgttgattctggagaaatctctcttacaactaggtacaatgaacagatccctcaagaaaatagcagttacggttcttgtaatgcggatattacagctcgtgctatggaagacataacttgtgtggacaaggaacttgaggagccctctgatttgcaattctcaagtactgaacaacagcctaaacatgatttaccagggtcatcccacgaaggttgtgctaaacttgaaagacatccatctgttgattgcaaagagcaattagctgatgatgagacagcagatgaactgcagcagcaggttcatgaagacactgatcatgtaaataaagatagcgaagttctctctgcagaaattcatggggttaaattggatatccttgatgaagatgttgaagatgattccccaatgaattcaaacaatctatcagatatcgcagaggaagagtcctagggttggtacaatgcaacgagggtggaccgcaagcttgtcgagatagtagagaagagctgtccggttcctctgatgctggcataccagattttagtatgtcaggacacgtgatgagcaagagcggaggaaatgagcaaaatgttattttgcctgtatcaatatatattgcacgagataaaaataatataaggttacaaccatgatttttattttgtgccttcctccgcccctccgcttctaaataaatagttacctttgaatgaatttcaagaaaacccaatcaagacttatgacatcaaattaatatcattaaatctaacatagaatatat

SEQ ID NO: 215746 - DNA, 5362 bp, Zea Mays
atggggagaatggcggcggtaggcgcggcgggagagagcgctgcccacacagggggggtgggaggtggctggctcaaggttgtccatgtggctgctattgcagagcgtgaagctggttggttgctattagcttctcttctagcatccatgccaaaagaggagctggaagaccaggtgtttgatgttcttttgctatgggcgggtccttttactggaaatcctgaatcttaccttcgtcatatacaggattgggcatcagaattgcgggttctgtcagttgcagttgaggcgcttactgccttcataagaagttttgtttatccatctatcacaactactgattgtggaatcttgcttaatcctgtacttgcctaccttggcggagctctatccctcatatcttcgttgagatctaaacaagtgcccaatgtaaggtctgcgctggacctactcacaactagaacattgatggcttattggtccctttcgaatccagtggtatataaaactgagcaccagcagatacttcagctatgctcaagtccgttcagtgatccttctggatgggaagaaagctcatgcttgaagtttttgttggataagagagatgcttcactgggcccatggatacctggaagggattcatttgaggatgaattacgtgcttttgatggtggtgctgatgggtttctaccgtgtgtgtgggatgatgaaatcagcaacttccctcagccagagtcaattcggaaaatgctcgtcaaccagatgcttctctgttatggttccatatttgcatgtcaggaaaacactgtcaagataagcctcttgaacaatcttgaccagtgcctgaagtctgggaagaagtacctgtggtttaagtttctcattacaaatgcatgtgttgctctattgtcagggttaaaggaattcctcgctttacgtggtgctcaatcattgccaattgatatattaagtatgattcagtccattttcaaggccattttagtagagcctgaaatttctacagcacagcggcgagcagcgtgcgagggtctcggtttattagcacgagctgggaatgatatctttacagcaaggatggctcgctctcttctcggagagctggtaacaacaacagatctgagctatacaacttctgttgcattttcattgggttgcatccatcgaagtgctggaggaatggcattatctactctggttaccccaactgtgagctcactatctcatttgagtaaaagctctaatttcaatctgcagttgtggtcactgcatgctcttcttttaacaattgaagctgctggcttgtcttatgtctcgcaagttcaggggacacttttccttgctatggagattctcctcttggaagaaaatggatatgttgatcttcgacaaggaattggtcatcttattaatgcaatagttgctgttattggtccagagcttgctcctgatagcacattcttttcacgatgcaagtctgttattgcagagataagttcatcaaatgaaatggctacacttttagaatcggttagattctcccagcagcttgtgctttttgctcctcaagctgttcctgtgcacttgcacgttcaaggtcttatcccaatgctttactcaagacagccaagtcttagatatttagcagtgtcgacactgcaccatctgattgaaagggacccggctgcaatgattgacgagaatattgaagagaatctgttcagtatgcttgatgaggagaccgattcagaaacagcgatgttggttcgtgcaactattattcgcttattgtatacatcatgtccagtatgtccatcacggtggctggcagttttacgaaatattgttcttgctacgtcaattagaagaaacacaggtgaagttctgtcatgttttgggcataatcctcctgatagtacatctgagaatgatgtgtactatggagaagatgaagacaacatgatttccagctcaaagcagcagcaaatccgctgtgctggttctatatccagccagtttcctccaaggaataaacacctcagatatcgtaccagggtttttgctgcagaatgcgttagccatgtaccaattgcagttggagcagaacctgctcattttgacctcttgttggcaaggagcgcaatatctcaaggcacttatttgtcaaatgattggctagtgcttaaactacaggaactggtctcactttcataccagattagtactgggcaatttgaaggaatgcaaccaataggtgtgaagcttttgtgtttgataatggacaagttcggcaaggcagtagatccggaatttcctggccatatcttgctggaacaatttcaggcccaacttgtttctgctgttagaatggctataagcactgcttctggtccacttcttttggaggctggacttgaactcgctacaagggttatgacgagcagcataattggtggggatagactagctcttagtcgcttgttttctctgataacacgcccgttaagtgacatagagggcctactatatccatcttttgctgactgggtagtgtgcaagataaaagttcgccttctaactgcccatgcagcagtcaagtgtaacacctatcaattcttgaggatgagggaaaatgctcctaatgaataccagcaattggcaccttcacttgtaaacagttcaactctattaggaaaatactggattcgagcactcaaggattatgtttctataagttttggtttgcactcaaaaatcaattacaagccattccttgatgggattcagtcattattagtcttgtccaaggtgcagaggtatcttgatgaagtttggttattaattcttaaagcaacagctcttgatgccgcgcctttggattttgatgagaataatcctaaaaatttactcgaacaaacatttatatctgggcattgtatggtcaaattggacagaactgaattccaatttctttgggggttatctatccttgtgctgttccattcctgccaatcaatgaagaataattctttgaagatcaaccttgactttaaacaagacaaaaactttggggaatttattgttcatggacttgatgacaaaagaccgtgtgatcaggtcttacgcgtgctttcgtccctcacaacagaagtctttttcagcaataattttatttcagtggatatttgccagcaactcctccaggcacttacatatgcagattgttcaagcgctcctatcatccacctattcacccagattatcagattctgccctgacaatttttttgaggttgaagcctttgtcttctctgcaatagagttattgtctcagtatctgggtctgatacttcaatgtagggatgggagttctcagaataattcaagtaacactttgatttctgagttgtctattgcaagcgagacgatggcttatcggatcaaaggagagtatttgtggaagctggtgatgttagtggtatctacttcacaccaatcatttcaacaagtttcaactaatttatgcttctcaaatattatatgcttcctccaaaatatcttccctttcatgaggaaaatttttagagaaagagtcgaatcagatggtgagtgcacaagtcctaaagttgtctttggtgctatggttggcctagtgggatacttctatgtagagtgtgataaaaagatctcattgctcgaaaacaagatttctgattcctacaagctgttgaataagatactacttttttgcttgggagaagccactgctcttgcaaaacttgttcctgagatcatttatcgaagtgaaaatgtaagtaacaatgatgtgctcctttggggcagcttcaggctgtgcgtacaggttattcaaggttcatttcgtagtaccaacatacaggtgcacatgctgggtctgcaagtactgagaagctatgcacagaaggagctaactgaaggttcagaaacaaagttggattcttttatgatgttgcttacggaattgttgggagacttgtttttggtgatggagactacattgaaggaatgttcaaacaaaaaatctgtcagtgtcgttgatgaatgtttgaaacttgttttcctcttccacacactagcacaatcaaagaaataccgacaagatgctacaactcttctgctggaggccttgctgatggttttctctctgtccagtgatactgtttcacaggagcttgctgaagtgaacaccatttccagaaagttgttctctcattttattcagattccgtctgtggctatacagatcaaagacataatgctttctgcaccagctgaaaggagactacagcttcaggacatggtccgagcttcagtcagtcaagggcagataacggtgccagtggctacgagtgcacactcagaacagaatattcaggatagttgcagtaaaaaccctgggtccacatctgaagcttctgattgtgttgcaactcacgggaataatgacaatgaagttgttgatgatgactgggatgacgattgggatgctttccaatctcttcctgcaattgcaaatgatggtgttgattctggagaaatctctcttacaactaggtacaatgaacagatccctcaagaaaatagcagttacggttcttgtaatgcggatattacagctcgtgctatggaagacataacttgtgtggacaaggaacttgaggagccctctgatttgcaattctcaagtactgaacaacagcctaaacatgatttaccagggtcatcccacgaaggttgtgctaaacttgaaagacatccatctgttgattgcaaagagcaattagctgatgatgagacagcagatgaactgcagcagcaggttcatgaagacactgatcatgtaaataaagatagcgaagttctctctgcagaaattcatggggttaaattggatatccttgatgaagatgttgaagatgattccccaatgaattcaaacaatctatcagatatcgcagaggaagagtcctagggttggtacaatgcaacgagggtggaccgcaagcttgtcgagatagtagagaagagctgtccggttcctctgatgctggcataccagattttagtatgtcaggacacgtgatgagcaagagcggaggaaatgagcaaaatgttattttgcctgtatcaatatatattgcacgagataaaaataatataaggttacaaccatgatttttattttgtgccttcctccgcccctccgcttctaaataaatagttacctttgaatgaatttcaagaaaacccaatcaagacttatgacatcaaattaatatcattaaatctaacatagaatatat

SEQ ID NO: 215747 - DNA, 5116 bp, Zea Mays
ttgaagattgtgcctatatcgattgttctagttttgaggcaaataacatcccacggtctatccgttacctatccatttccatgcaagatcattgtgctcagaatttcgaggaacaaatgggaaaactgaaagaaaagatatacattaacaatttgcggagtttgatgatatttggaaaatacattatgttacatctgctcaatattttaagggacacatttaaggaaataagacgtcttcgtgttctatctatattcatatactcccatagttccttgccaaacaacttttcagagcttcttcatctccgctacttaaaacttttgtcaccttattactcagaaatgtcattgccaaacacggtctcaaggttttatcacctgaaatttctagatcttgaacaatggggaagtgatcgttctttgcctaaggacattagccgccttgaaaatctatgccattttgttgtttcggaaaagattgattccaatgttcctgaggtggggaaaatgatcttcttacaagaattgaaagaattccatgttaataaagagagtgttggatttgagctacaagaattgggtaaactagatgagcttggagggaagctcaatatatacgggcttgaaaatgtgagaaccaagaaagaagctaaagaggccaagctgatgtcaaagaggaatttagttgagttgggattaatttggaacatgaaacaagagtccaccgaagatgatatcctagatagtatccaaccacactctaatgttaggagtctttttattgtaaatcatggtggtaccctcggtcctagttggttgtgcagcagcgacaccatatacatgaaaaacttggagactctacatctagagagcgtatcgtgggctaaccttccacctattgggcagttctatcacttaagagagctaaggctgagtaaaattgttggcatatcacagattggacctggcttcttcgatagcacgacagaaaaaagtgtctcacacttgaaggcagttgagtttaatgatatgccagagcttgtcgagtgggttgggggagctaactggaatctgttctcaggaattgaaagaatcaagtgtactaattgtcctaggctgacagggttgctggtttcagattggtctatttcttctatataagacagcactgtatggttccctaatcttcatgacctttacatttatgaatgcccgaagttgtgccttccacccttgcctcacacttcaaaggtatcccgtattcatatgggagacttttcttatgaaggtcgtaccatgttgaaaattaataacccctctagatttgccttcgaaaatctgggtgacctagagacattggtagcttgggatgcactacccttgtcctttatggatcttaaaaagctacattccttgagacgtataaatgtcactagatgtgaggaaacatttttgagaggactggatgatggtgttgtgctacccacagtccaatctctctaccttggacgatttacacctaccaaaaattatttgtcaaaattattcaaatgttttccagcactttcttctttgcatgtgatggcatcaccatcagatgaggacaacgaggaagtggtactgcattttccaccctctagctcgctgagagatgtcaacttcacagggtgtaagaatctgatcctacccatggaggaaggagctggattctgtggcctctcgtcgctcgagtcagtgaccatacacaaatgtgacaggttattctctcgatggtccatcggaggacgagcaactcagactcagagcatcatcaaccctctcccaccctacctgaggaaactcttcctttcttatatggaaactctgcctcaggaagctctgctcatgaatttgacatctcttgagaaactcacactatgtaattgtcttggctgtgagcaaagcaccgagcgaatggctgtactcgcgaatctaacatctcttaccacgctatatttatataattgcagaaatatcacaatggatggattcaatcctcacatcacatccagcctcaagtatctatgcgtgtacaatgagagaaatgatggaactgatccgtattctgtagcagcagatctacttgtagcggtggtgaggaccaaaacaatgcccgacgtttccttcaaactggtgggactttatgtggacaacatctcgggagtgcttgttgctcccatctgcaagctgctctccgctaccctcgagacgttaaacttcagtaatgattggcggacagagaacttcacgaaagagcaggacgaggcgcttcagctcctcacgtctctccaattccttgagttttataactgcagggctctgcagtccctcccccaaggactgcaccgccttccttctctccacggaataactatctatgggcctcaaaacattagatcactgcctaaggagggcctccccgattcactacgaatactacgtataactaactgttgtgctgagatttatgaggcatgccagcaattgaagggaacaaggccagatataaatgtacttgcctccaaagctcgtgtgcaaaattgaatacctgcttctgcatgtcttcacagtcagctctgcttcaacatgcctttcactctacaggtaaatactgtgaaaacatcttcctatacgtgagatagttgatcttcatcgattctacagccaggatgatgtcttattggatgatgtgttggtcatggttggcacaaaattcagtagcgttcaaggcaataaacgagaacaagcatgggatgtggaaaattttagaaagtaaagacaagtgaattcttgacgacgttggcttggcaccttagtttgagtacataatgaaagaacaaccttttagcaaccctggagcatctagaaaatatcagtcatgtaactatcgttaatcatttgaaaaccactggaagacaggagatgtagcaccacaagccattcctttgatcatttgaaaaccattgcggctctttctgattatatcaaccagttgagtggatgaaagaccaaaaaatgctttggaagaagggctcacaattgtggataataaggcatccagtattatagaggaaacaaaggaaattcaaattagacggaaacctgctagtccaagttcttatatgccaaattcatcagtagatacacatacactctacaccctaatcttctttgttatgacatttattgtttttttcatgaactacgtacatcttaattttcaattcatctagaatactgaataggtgatgattcatcaccaaattgataagtgaatattaatacatctgaaacctaaaattaaatatatattatataagttgttgttaatgttcattccatttttgaacacttgcatgaattttagttctctgtttcttttgaaaaattctgtgttgcaaaaatataaatttatatgaaaatatattatatggtgatgagaagtttgagtttagtatatggtttcatattagctatacattgttggtactatcggcttgttctctttttgtttgaaaaaaatactatcggcttgttcttaaggacacataaaggactagttcggaagcaagagaattagaggagagatggctaaaatccccttcctaattaaataggaagggaatttgagcaccctcaatcccctctaattcccttgctttcaaactagcccaaagagtgtcactgcatcctctgaattatgatatattgaacatggtgttataattgtgaaccgatgagtataacttattttctccatattctgaacaacccattacttaaacagatttgcatcctactggagacattgctggcagaggaattgagactggcataggagaactcaatatatgcttgtgaataacgcatccagtgaaagatagtagattttcatcaattcactacccaggatgttgtcgcattggatgagaatgacatggaagacggcgaactagaggaagacaacaacctcatctaagctgaaaatgtgttgcctgtggttgaagaaaatctagcagatgaacaacactgccttccctgtcctctctagacctgaatctctctgatggtttggattcgtccatgattgatcctgtacgatgaaggatcagctcgtccaacgtttttcaaggaacgaactcaatctgaggaattaccttttcattggtcacctggggtactacgaggaatgacttcacgatagacgactcggttttgcgacgcaaaccaaacgccatggttaggctcagatgttggatcagatgattcctcgtggcttcgtgacgcaaaccaaacgacatggctaggctcagatgttggatcgtatgatttctcgtggcttcgtgacgcaaaccaaacagccttgagcggcctttgcatgctgcatgagatcaagcaagccgccgactggcaatgctccacctgccattcagttcgttggtgaggtattaatcaccagccatgttggcacttggcggcatgcagatggagcagaacatccaggtgaagcggacagatacatgatcgatcatgagttggcgcagacacaggccagacaaccagaggctatattccaattcatacattccatgataagcaaaggaagatccaagacaacacaaatatacaaatagttagttatacaagcaaaaatcctgttgttttgtgcctcccattttctagtccagaattaatatgacaatttttcactgaaactggttggatcagagaccaggaaaaaaagggaaatgacaactacagctgtgttttttttttcaaagaaggcagctgcccgtcgatgatgtgctcacttgaggatttcctctgccttttcagtgacactgcttcatccttttcagagtcaaatgaatctctacctcatttcactgcacatacttccaaactgatttgctgtaacatacttgagtttcggtatgacattaatttttaactcataagagaacaaaatcagaagaaaaaaaaacaacaaccatgctggactgatcttacaacaacaaccatggatggtggtcttaataaggcctcgtttggcagggctccggcttctctaaaac

SEQ ID NO: 215748 - DNA, 5122 bp, Zea Mays
tgaagattgtgcctatatcgattgttctagttttgaggcaaataacatcccacggtctatccgttacctatccatttccatgcaagatcattgtgctcagaatttcgaggaacaaatgggaaaactgaaagaaaagatatacattaacaatttgcggagtttgatgatatttggaaaatacattatgttacatctgctcaatattttaagggacacatttaaggaaataagacgtcttcgtgttctatctatattcatatactcccatagttccttgccaaacaacttttcagagcttcttcatctccgctacttaaaacttttgtcaccttattactcagaaatgtcattgccaaacacggtctcaaggttttatcacctgaaatttctagatcttgaacaatggggaagtgatcgttctttgcctaaggacattagccgccttgaaaatctatgccattttgttgtttcggaaaagattgattccaatgttcctgaggtggggaaaatgatcttcttacaagaattgaaagaattccatgttaataaagagagtgttggatttgagctacaagaattgggtaaactagatgagcttggagggaagctcaatatatacgggcttgaaaatgtgagaaccaagaaagaagctaaagaggccaagctgatgtcaaagaggaatttagttgagttgggattaatttggaacatgaaacaagagtccaccgaagatgatatcctagatagtatccaaccacactctaatgttaggagtctttttattgtaaatcatggtggtaccctcggtcctagttggttgtgcagcagcgacaccatatacatgaaaaacttggagactctacatctagagagcgtatcgtgggctaaccttccacctattgggcagttctatcacttaagagagctaaggctgagtaaaattgttggcatatcacagattggacctggcttcttcgatagcacgacagaaaaaagtgtctcacacttgaaggcagttgagtttaatgatatgccagagcttgtcgagtgggttgggggagctaactggaatctgttctcaggaattgaaagaatcaagtgtactaattgtcctaggctgacagggttgctgttgtgccttccacccttgcctcacacttcaaaggtatcccgtattcatatgggagacttttcttatgaaggtcgtaccatgttgaaaattaataacccctctagatttgccttcgaaaatctgggtgacctagagacattggtagcttgggatgcactacccttgtcctttatggatcttaaaaagctacattccttgagacgtataaatgtcactagatgtgaggaaacatttttgagaggactggatgatggtgttgtgctacccacagtccaatctctctaccttggacgatttacacctaccaaaaattatttgtcaaaattattcaaatgttttccagcactttcttctttgcatgtgatggcatcaccatcagatgaggacaacgaggaagtggtactgcattttccaccctctagctcgctgagagatgtcaacttcacagggtgtaagaatctgatcctacccatggaggaaggagctggattctgtggcctctcgtcgctcgagtcagtgaccatacacaaatgtgacaggttattctctcgatggtccatcggaggacgagcaactcagactcagagcatcatcaaccctctcccaccctacctgaggaaactcttcctttcttatatggaaactctgcctcaggaagctctgctcatgaatttgacatctcttgagaaactcacactatgtaattgtcttggctgtgagcaaagcaccgagcgaatggctgtactcgcgaatctaacatctcttaccacgctatatttatataattgcagaaatatcacaatggatggattcaatcctcacatcacatccagcctcaagtatctatgcgtgtacaatgagagaaatgatggaactgatccgtattctgtagcagcagatctacttgtagcggtggtgaggaccaaaacaatgcccgacgtttccttcaaactggtgggactttatgtggacaacatctcgggagtgcttgttgctcccatctgcaagctgctctccgctaccctcgagacgttaaacttcagtaatgattggcggacagagaacttcacgaaagagcaggacgaggcgcttcagctcctcacgtctctccaattccttgagttttataactgcagggctctgcagtccctcccccaaggactgcaccgccttccttctctccacggaataactatctatgggcctcaaaacattagatcactgcctaaggagggcctccccgattcactacgaatactacgtataactaactgttgtgctgagatttatgaggcatgccagcaattgaagggaacaaggccagatataaatgtacttgcctccaaagctcgtgtgcaaaattgaatacctgcttctgcatgtcttcacagtcagctctgcttcaacatgcctttcactctacaggtaaatactgtgaaaacatcttcctatacgtgagatagttgatcttcatcgattctacagccaggatgatgtcttattggatgatgtgttggtcatggttggcacaaaattcagtagactatgcttcatcgtaatgttgcacagcgttcaaggcaataaacgagaacaagcatgggatgtggaaaattttagaaagtaaagacaagtgaattcttgacgacgttggcttggcaccttagtttgagtacataatgaaagaacaaccttttagcaaccctggagcatctagaaaatatcagtcatgtaactatcgttaatcatttgaaaaccactggaagacaggagatgtagcaccacaagccattcctttgatcatttgaaaaccattgcggctctttctgattatatcaaccagttgagtggatgaaagaccaaaaaatgctttggaagaagggctcacaattgtggataataaggcatccagtattatagaggaaacaaaggaaattcaaattagacggaaacctgctagtccaagttcttatatgccaaattcatcagtagatacacatacactctacaccctaatcttctttgttatgacatttattgtttttttcatgaactacgtacatcttaattttcaattcatctagaatactgaataggtgatgattcatcaccaaattgataagtgaatattaatacatctgaaacctaaaattaaatatatattatataagttgttgttaatgttcattccatttttgaacacttgcatgaattttagttctctgtttcttttgaaaaattctgtgttgcaaaaatataaatttatatgaaaatatattatatggtgatgagaagtttgagtttagtatatggtttcatattagctatacattgttggtactatcggcttgttctctttttgtttgaaaaaaatactatcggcttgttcttaaggacacataaaggactagttcggaagcaagagaattagaggagagatggctaaaatccccttcctaattaaataggaagggaatttgagcaccctcaatcccctctaattcccttgctttcaaactagcccaaagagtgtcactgcatcctctgaattatgatatattgaacatggtgttataattgtgaaccgatgagtataacttattttctccatattctgaacaacccattacttaaacagatttgcatcctactggagacattgctggcagaggaattgagactggcataggagaactcaatatatgcttgtgaataacgcatccagtgaaagatagtagattttcatcaattcactacccaggatgttgtcgcattggatgagaatgacatggaagacggcgaactagaggaagacaacaacctcatctaagctgaaaatgtgttgcctgtggttgaagaaaatctagcagatgaacaacactgccttccctgtcctctctagacctgaatctctctgatggtttggattcgtccatgattgatcctgtacgatgaaggatcagctcgtccaacgtttttcaaggaacgaactcaatctgaggaattaccttttcattggtcacctggggtactacgaggaatgacttcacgatagacgactcggttttgcgacgcaaaccaaacgccatggttaggctcagatgttggatcagatgattcctcgtggcttcgtgacgcaaaccaaacgacatggctaggctcagatgttggatcgtatgatttctcgtggcttcgtgacgcaaaccaaacagcctcatgctctagccaaaggcatgatcgtcatcgttctgaaacaaagaaaatgatgtgtattcctttcagtgagcggcctttgcatgctgcatgagatcaagcaagccgccgactggcaatgctccacctgccattcagttcgttggtgaggtattaatcaccagccatgttggcacttggcggcatgcagatggagcagaacatccaggtgaagcggacagatacatgatcgatcatgagttggcgcagacacaggccagacaaccagaggctatattccaattcatacattccatgataagcaaaggaagatccaagacaacacaaatatacaaatagttagttatacaagcaaaaatcctgttgttttgtgcctcccattttctagtccagaattaatatgacaatttttcactgaaactggttggatcagagaccaggaaaaaaagggaaatgacaactacagctgtgttttttttttcaaagaaggcagctgcccgtcgatgatgtgctcacttgaggatttcctctgccttttcagtgacactgcttcatccttttcagagtcaaatgaatctctacctcatttcactgcacatacttccaaactgatttgctgtaacatacttgagtttcggtatgacattaatttttaactcataagagaacaaaatcagaagaaaaaaaaacaacaaccatgctggactgatcttacaacaacaaccatggatggtggtcttaataaggcctcgtttggcagggctccggcttctctaaaac

SEQ ID NO: 215749 - DNA, 5142 bp, Zea Mays
tgaagattgtgcctatatcgattgttctagttttgaggcaaataacatcccacggtctatccgttacctatccatttccatgcaagatcattgtgctcagaatttcgaggaacaaatgggaaaactgaaagaaaagatatacattaacaatttgcggagtttgatgatatttggaaaatacattatgttacatctgctcaatattttaagggacacatttaaggaaataagacgtcttcgtgttctatctatattcatatactcccatagttccttgccaaacaacttttcagagcttcttcatctccgctacttaaaacttttgtcaccttattactcagaaatgtcattgccaaacacggtctcaaggttttatcacctgaaatttctagatcttgaacaatggggaagtgatcgttctttgcctaaggacattagccgccttgaaaatctatgccattttgttgtttcggaaaagattgattccaatgttcctgaggtggggaaaatgatcttcttacaagaattgaaagaattccatgttaataaagagagtgttggatttgagctacaagaattgggtaaactagatgagcttggagggaagctcaatatatacgggcttgaaaatgtgagaaccaagaaagaagctaaagaggccaagctgatgtcaaagaggaatttagttgagttgggattaatttggaacatgaaacaagagtccaccgaagatgatatcctagatagtatccaaccacactctaatgttaggagtctttttattgtaaatcatggtggtaccctcggtcctagttggttgtgcagcagcgacaccatatacatgaaaaacttggagactctacatctagagagcgtatcgtgggctaaccttccacctattgggcagttctatcacttaagagagctaaggctgagtaaaattgttggcatatcacagattggacctggcttcttcgatagcacgacagaaaaaagtgtctcacacttgaaggcagttgagtttaatgatatgccagagcttgtcgagtgggttgggggagctaactggaatctgttctcaggaattgaaagaatcaagtgtactaattgtcctaggctgacagggttgctggtttcagattggtctatttcttctatataagacagcactgtatggttccctaatcttcatgacctttacatttatgaatgcccgaagttgtgccttccacccttgcctcacacttcaaaggtatcccgtattcatatgggagacttttcttatgaaggtcgtaccatgttgaaaattaataacccctctagatttgccttcgaaaatctgggtgacctagagacattggtagcttgggatgcactacccttgtcctttatggatcttaaaaagctacattccttgagacgtataaatgtcactagatgtgaggaaacatttttgagaggactggatgatggtgttgtgctacccacagtccaatctctctaccttggacgatttacacctaccaaaaattatttgtcaaaattattcaaatgttttccagcactttcttctttgcatgtgatggcatcaccatcagatgaggacaacgaggaagtggtactgcattttccaccctctagctcgctgagagatgtcaacttcacagggtgtaagaatctgatcctacccatggaggaaggagctggattctgtggcctctcgtcgctcgagtcagtgaccatacacaaatgtgacaggttattctctcgatggtccatcggaggacgagcaactcagactcagagcatcatcaaccctctcccaccctacctgaggaaactcttcctttcttatatggaaactctgcctcaggaagctctgctcatgaatttgacatctcttgagaaactcacactatgtaattgtcttggctgtgagcaaagcaccgagcgaatggctgtactcgcgaatctaacatctcttaccacgctatatttatataattgcagaaatatcacaatggatggattcaatcctcacatcacatccagcctcaagtatctatgcgtgtacaatgagagaaatgatggaactgatccgtattctgtagcagcagatctacttgtagcggtggtgaggaccaaaacaatgcccgacgtttccttcaaactggtgggactttatgtggacaacatctcgggagtgcttgttgctcccatctgcaagctgctctccgctaccctcgagacgttaaacttcagtaatgattggcggacagagaacttcacgaaagagcaggacgaggcgcttcagctcctcacgtctctccaattccttgagttttataactgcagggctctgcagtccctcccccaaggactgcaccgccttccttctctccacggaataactatctatgggcctcaaaacattagatcactgcctaaggagggcctccccgattcactacgaatactacgtataactaactgttgtgctgagatttatgaggcatgccagcaattgaagggaacaaggccagatataaatgtacttgcctccaaagctcgtgtgcaaaattgaatacctgcttctgcatgtcttcacagtcagctctgcttcaacatgcctttcactctacaggtaaatactgtgaaaacatcttcctatacgtgagatagttgatcttcatcgattctacagccaggatgatgtcttattggatgatgtgttggtcatggttggcacaaaattcagtagactatgcttcatcgtaatgttgcacagcgttcaaggcaataaacgagaacaagcatgggatgtggaaaattttagaaagtaaagacaagtgaattcttgacgacgttggcttggcaccttagtttgagtacataatgaaagaacaaccttttagcaaccctggagcatctagaaaatatcagtcatgtaactatcgttaatcatttgaaaaccactggaagacaggagatgtagcaccacaagccattcctttgatcatttgaaaaccattgcggctctttctgattatatcaaccagttgagtggatgaaagaccaaaaaatgctttggaagaagggctcacaattgtggataataaggcatccagtattatagaggaaacaaaggaaattcaaattagacggaaacctgctagtccaagttcttatatgccaaattcatcagtagatacacatacactctacaccctaatcttctttgttatgacatttattgtttttttcatgaactacgtacatcttaattttcaattcatctagaatactgaataggtgatgattcatcaccaaattgataagtgaatattaatacatctgaaacctaaaattaaatatatattatataagttgttgttaatgttcattccatttttgaacacttgcatgaattttagttctctgtttcttttgaaaaattctgtgttgcaaaaatataaatttatatgaaaatatattatatggtgatgagaagtttgagtttagtatatggtttcatattagctatacattgttggtactatcggcttgttctctttttgtttgaaaaaaatactatcggcttgttcttaaggacacataaaggactagttcggaagcaagagaattagaggagagatggctaaaatccccttcctaattaaataggaagggaatttgagcaccctcaatcccctctaattcccttgctttcaaactagcccaaagagtgtcactgcatcctctgaattatgatatattgaacatggtgttataattgtgaaccgatgagtataacttattttctccatattctgaacaacccattacttaaacagatttgcatcctactggagacattgctggcagaggaattgagactggcataggagaactcaatatatgcttgtgaataacgcatccagtgaaagatagtagattttcatcaattcactacccaggatgttgtcgcattggatgagaatgacatggaagacggcgaactagaggaagacaacaacctcatctaagctgaaaatgtgttgcctgtggttgaagaaaatctagcagatgaacaacactgccttccctgtcctctctagacctgaatctctctgatggtttggattcgtccatgattgatcctgtacgatgaaggatcagctcgtccaacgtttttcaaggaacgaactcaatctgaggaattaccttttcattggtcacctggggtactacgaggaatgacttcacgatagacgactcggttttgcgacgcaaaccaaacgccatggttaggctcagatgttggatcagatgattcctcgtggcttcgtgacgcaaaccaaacgacatggctaggctcagatgttggatcgtatgatttctcgtggcttcgtgacgcaaaccaaacagccttgagcggcctttgcatgctgcatgagatcaagcaagccgccgactggcaatgctccacctgccattcagttcgttggtgaggtattaatcaccagccatgttggcacttggcggcatgcagatggagcagaacatccaggtgaagcggacagatacatgatcgatcatgagttggcgcagacacaggccagacaaccagaggctatattccaattcatacattccatgataagcaaaggaagatccaagacaacacaaatatacaaatagttagttatacaagcaaaaatcctgttgttttgtgcctcccattttctagtccagaattaatatgacaatttttcactgaaactggttggatcagagaccaggaaaaaaagggaaatgacaactacagctgtgttttttttttcaaagaaggcagctgcccgtcgatgatgtgctcacttgaggatttcctctgccttttcagtgacactgcttcatccttttcagagtcaaatgaatctctacctcatttcactgcacatacttccaaactgatttgctgtaacatacttgagtttcggtatgacattaatttttaactcataagagaacaaaatcagaagaaaaaaaaacaacaaccatgctggactgatcttacaacaacaaccatggatggtggtcttaataaggcctcgtttggcagggctccggcttctctaaaac

SEQ ID NO: 215750 - DNA, 5072 bp, Zea Mays
tgaagattgtgcctatatcgattgttctagttttgaggcaaataacatcccacggtctatccgttacctatccatttccatgcaagatcattgtgctcagaatttcgaggaacaaatgggaaaactgaaagaaaagatatacattaacaatttgcggagtttgatgatatttggaaaatacattatgttacatctgctcaatattttaagggacacatttaaggaaataagacgtcttcgtgttctatctatattcatatactcccatagttccttgccaaacaacttttcagagcttcttcatctccgctacttaaaacttttgtcaccttattactcagaaatgtcattgccaaacacggtctcaaggttttatcacctgaaatttctagatcttgaacaatggggaagtgatcgttctttgcctaaggacattagccgccttgaaaatctatgccattttgttgtttcggaaaagattgattccaatgttcctgaggtggggaaaatgatcttcttacaagaattgaaagaattccatgttaataaagagagtgttggatttgagctacaagaattgggtaaactagatgagcttggagggaagctcaatatatacgggcttgaaaatgtgagaaccaagaaagaagctaaagaggccaagctgatgtcaaagaggaatttagttgagttgggattaatttggaacatgaaacaagagtccaccgaagatgatatcctagatagtatccaaccacactctaatgttaggagtctttttattgtaaatcatggtggtaccctcggtcctagttggttgtgcagcagcgacaccatatacatgaaaaacttggagactctacatctagagagcgtatcgtgggctaaccttccacctattgggcagttctatcacttaagagagctaaggctgagtaaaattgttggcatatcacagattggacctggcttcttcgatagcacgacagaaaaaagtgtctcacacttgaaggcagttgagtttaatgatatgccagagcttgtcgagtgggttgggggagctaactggaatctgttctcaggaattgaaagaatcaagtgtactaattgtcctaggctgacagggttgctggtttcagattggtctatttcttctatataagacagcactgtatggttccctaatcttcatgacctttacatttatgaatgcccgaagttgtgccttccacccttgcctcacacttcaaaggtatcccgtattcatatgggagacttttcttatgaaggtcgtaccatgttgaaaattaataacccctctagatttgccttcgaaaatctgggtgacctagagacattggtagcttgggatgcactacccttgtcctttatggatcttaaaaagctacattccttgagacgtataaatgtcactagatgtgaggaaacatttttgagaggactggatgatggtgttgtgctacccacagtccaatctctctaccttggacgatttacacctaccaaaaattatttgtcaaaattattcaaatgttttccagcactttcttctttgcatgtgatggcatcaccatcagatgaggacaacgaggaagtggtactgcattttccaccctctagctcgctgagagatgtcaacttcacagggtgtaagaatctgatcctacccatggaggaaggagctggattctgtggcctctcgtcgctcgagtcagtgaccatacacaaatgtgacaggttattctctcgatggtccatcggaggacgagcaactcagactcagagcatcatcaaccctctcccaccctacctgaggaaactcttcctttcttatatggaaactctgcctcaggaagctctgctcatgaatttgacatctcttgagaaactcacactatgtaattgtcttggctgtgagcaaagcaccgagcgaatggctgtactcgcgaatctaacatctcttaccacgctatatttatataattgcagaaatatcacaatggatggattcaatcctcacatcacatccagcctcaagtatctatgcgtgtacaatgagagaaatgatggaactgatccgtattctgtagcagcagatctacttgtagcggtggtgaggaccaaaacaatgcccgacgtttccttcaaactggtgggactttatgtggacaacatctcgggagtgcttgttgctcccatctgcaagctgctctccgctaccctcgagacgttaaacttcagtaatgattggcggacagagaacttcacgaaagagcaggacgaggcgcttcagctcctcacgtctctccaattccttgagttttataactgcagggctctgcagtccctcccccaaggactgcaccgccttccttctctccacggaataactatctatgggcctcaaaacattagatcactgcctaaggagggcctccccgattcactacgaatactacgtataactaactgttgtgctgagatttatgaggcatgccagcaattgaagggaacaaggccagatataaatgtacttgcctccaaagctcgtgtgcaaaattgaatacctgcttctgcatgtcttcacagtcagctctgcttcaacatgcctttcactctacaggtaaatactgtgaaaacatcttcctatacgtgagatagttgatcttcatcgattctacagccaggatgatgtcttattggatgatgtgttggtcatggttggcacaaaattcagtagtcatgtaactatcgttaatcatttgaaaaccactggaagacaggagatgtagcaccacaagccattcctttgatcatttgaaaaccattgcggctctttctgattatatcaaccagttgagtggatgaaagaccaaaaaatgctttggaagaagggctcacaattgtggataataaggcatccagtattatagaggaaacaaaggaaattcaaattagacggaaacctgctagtccaagttcttatatgccaaattcatcagtagatacacatacactctacaccctaatcttctttgttatgacatttattgtttttttcatgaactacgtacatcttaattttcaattcatctagaatactgaataggtgatgattcatcaccaaattgataagtgaatattaatacatctgaaacctaaaattaaatatatattatataagttgttgttaatgttcattccatttttgaacacttgcatgaattttagttctctgtttcttttgaaaaattctgtgttgcaaaaatataaatttatatgaaaatatattatatggtgatgagaagtttgagtttagtatatggtttcatattagctatacattgttggtactatcggcttgttctctttttgtttgaaaaaaatactatcggcttgttcttaaggacacataaaggactagttcggaagcaagagaattagaggagagatggctaaaatccccttcctaattaaataggaagggaatttgagcaccctcaatcccctctaattcccttgctttcaaactagcccaaagagtgtcactgcatcctctgaattatgatatattgaacatggtgttataattgtgaaccgatgagtataacttattttctccatattctgaacaacccattacttaaacagatttgcatcctactggagacattgctggcagaggaattgagactggcataggagaactcaatatatgcttgtgaataacgcatccagtgaaagatagtagattttcatcaattcactacccaggatgttgtcgcattggatgagaatgacatggaagacggcgaactagaggaagacaacaacctcatctaagctgaaaatgtgttgcctgtggttgaagaaaatctagcagatgaacaacactgccttccctgtcctctctagacctgaatctctctgatggtttggattcgtccatgattgatcctgtacgatgaaggatcagctcgtccaacgtttttcaaggaacgaactcaatctgaggaattaccttttcattggtcacctggggtactacgaggaatgacttcacgatagacgactcggttttgcgacgcaaaccaaacgccatggttaggctcagatgttggatcagatgattcctcgtggcttcgtgacgcaaaccaaacgacatggctaggctcagatgttggatcgtatgatttctcgtggcttcgtgacgcaaaccaaacagcctgtaagtccgcacaccttatctatcatggtcattgttgagctgatcagtaattggagtcgtgtgataagcttaatggacctcctatttgtcgtgatcttcacagatcaacaagtgagcggcctttgcatgctgcatgagatcaagcaagccgccgactggcaatgctccacctgccattcagttcgttggtgaggtattaatcaccagccatgttggcacttggcggcatgcagatggagcagaacatccaggtgaagcggacagatacatgatcgatcatgagttggcgcagacacaggccagacaaccagaggctatattccaattcatacattccatgataagcaaaggaagatccaagacaacacaaatatacaaatagttagttatacaagcaaaaatcctgttgttttgtgcctcccattttctagtccagaattaatatgacaatttttcactgaaactggttggatcagagaccaggaaaaaaagggaaatgacaactacagctgtgttttttttttcaaagaaggcagctgcccgtcgatgatgtgctcacttgaggatttcctctgccttttcagtgacactgcttcatccttttcagagtcaaatgaatctctacctcatttcactgcacatacttccaaactgatttgctgtaacatacttgagtttcggtatgacattaatttttaactcataagagaacaaaatcagaagaaaaaaaaacaacaaccatgctggactgatcttacaacaacaaccatggatggtggtcttaataaggcctcgtttggcagggctccggcttctctaaaac

SEQ ID NO: 215751 - DNA, 4559 bp, Zea Mays
tgaagattgtgcctatatcgattgttctagttttgaggcaaataacatcccacggtctatccgttacctatccatttccatgcaagatcattgtgctcagaatttcgaggaacaaatgggaaaactgaaagaaaagatatacattaacaatttgcggagtttgatgatatttggaaaatacattatgttacatctgctcaatattttaagggacacatttaaggaaataagacgtcttcgtgttctatctatattcatatactcccatagttccttgccaaacaacttttcagagcttcttcatctccgctacttaaaacttttgtcaccttattactcagaaatgtcattgccaaacacggtctcaaggttttatcacctgaaatttctagatcttgaacaatggggaagtgatcgttctttgcctaaggacattagccgccttgaaaatctatgccattttgttgtttcggaaaagattgattccaatgttcctgaggtggggaaaatgatcttcttacaagaattgaaagaattccatgttaataaagagagtgttggatttgagctacaagaattgggtaaactagatgagcttggagggaagctcaatatatacgggcttgaaaatgtgagaaccaagaaagaagctaaagaggccaagctgatgtcaaagaggaatttagttgagttgggattaatttggaacatgaaacaagagtccaccgaagatgatatcctagatagtatccaaccacactctaatgttaggagtctttttattgtaaatcatggtggtaccctcggtcctagttggttgtgcagcagcgacaccatatacatgaaaaacttggagactctacatctagagagcgtatcgtgggctaaccttccacctattgggcagttctatcacttaagagagctaaggctgagtaaaattgttggcatatcacagattggacctggcttcttcgatagcacgacagaaaaaagtgtctcacacttgaaggcagttgagtttaatgatatgccagagcttgtcgagtgggttgggggagctaactggaatctgttctcaggaattgaaagaatcaagtgtactaattgtcctaggctgacagggttgctggtttcagattggtctatttcttctatataagacagcactgtatggttccctaatcttcatgacctttacatttatgaatgcccgaagttgtgccttccacccttgcctcacacttcaaaggtatcccgtattcatatgggagacttttcttatgaaggtcgtaccatgttgaaaattaataacccctctagatttgccttcgaaaatctgggtgacctagagacattggtagcttgggatgcactacccttgtcctttatggatcttaaaaagctacattccttgagacgtataaatgtcactagatgtgaggaaacatttttgagaggactggatgatggtgttgtgctacccacagtccaatctctctaccttggacgatttacacctaccaaaaattatttgtcaaaattattcaaatgttttccagcactttcttctttgcatgtgatggcatcaccatcagatgaggacaacgaggaagtggtactgcattttccaccctctagctcgctgagagatgtcaacttcacagggtgtaagaatctgatcctacccatggaggaaggagctggattctgtggcctctcgtcgctcgagtcagtgaccatacacaaatgtgacaggttattctctcgatggtccatcggaggacgagcaactcagactcagagcatcatcaaccctctcccaccctacctgaggaaactcttcctttcttatatggaaactctgcctcaggaagctctgctcatgaatttgacatctcttgagaaactcacactatgtaattgtcttggctgtgagcaaagcaccgagcgaatggctgtactcgcgaatctaacatctcttaccacgctatatttatataattgcagaaatatcacaatggatggattcaatcctcacatcacatccagcctcaagtatctatgcgtgtacaatgagagaaatgatggaactgatccgtattctgtagcagcagatctacttgtagcggtggtgaggaccaaaacaatgcccgacgtttccttcaaactggtgggactttatgtggacaacatctcgggagtgcttgttgctcccatctgcaagctgctctccgctaccctcgagacgttaaacttcagtaatgattggcggacagagaacttcacgaaagagcaggacgaggcgcttcagctcctcacgtctctccaattccttgagttttataactgcagggctctgcagtccctcccccaaggactgcaccgccttccttctctccacggaataactatctatgggcctcaaaacattagatcactgcctaaggagggcctccccgattcactacgaatactacgtataactaactgttgtgctgagatttatgaggcatgccagcaattgaagggaacaaggccagatataaatgtacttgcctccaaagctcgtgtgcaaaattgaatacctgcttctgcatgtcttcacagtcagctctgcttcaacatgcctttcactctacaggtaaatactgtgaaaacatcttcctatacgtgagatagttgatcttcatcgattctacagccaggatgatgtcttattggatgatgtgttggtcatggttggcacaaaattcagtagactatgcttcatcgtaatgttgcacagcgttcaaggcaataaacgagaacaagcatgggatgtggaaaattttagaaagtaaagacaagtgaattcttgacgacgttggcttggcaccttagtttgagtacataatgaaagaacaaccttttagcaaccctggagcatctagaaaatatcagtcatgtaactatcgttaatcatttgaaaaccactggaagacaggagatgtagcaccacaagccattcctttgatcatttgaaaaccattgcggctctttctgattatatcaaccagttgagtggatgaaagaccaaaaaatgctttggaagaagggctcacaattgtggataataaggcatccagtattatagaggaaacaaaggaaattcaaattagacggaaacctgctagtccaagttcttatatgccaaattcatcaatttgcatcctactggagacattgctggcagaggaattgagactggcataggagaactcaatatatgcttgtgaataacgcatccagtgaaagatagtagattttcatcaattcactacccaggatgttgtcgcattggatgagaatgacatggaagacggcgaactagaggaagacaacaacctcatctaagctgaaaatgtgttgcctgtggttgaagaaaatctagcagatgaacaacactgccttccctgtcctctctagacctgaatctctctgatggtttggattcgtccatgattgatcctgtacgatgaaggatcagctcgtccaacgtttttcaaggaacgaactcaatctgaggaattaccttttcattggtcacctggggtactacgaggaatgacttcacgatagacgactcggttttgcgacgcaaaccaaacgccatggttaggctcagatgttggatcagatgattcctcgtggcttcgtgacgcaaaccaaacgacatggctaggctcagatgttggatcgtatgatttctcgtggcttcgtgacgcaaaccaaacagcctcatgctctagccaaaggcatgatcgtcatcgttctgaaacaaagaaaatgatgtgtattcctttcagtgagcggcctttgcatgctgcatgagatcaagcaagccgccgactggcaatgctccacctgccattcagttcgttggtgaggtattaatcaccagccatgttggcacttggcggcatgcagatggagcagaacatccaggtgaagcggacagatacatgatcgatcatgagttggcgcagacacaggccagacaaccagaggctatattccaattcatacattccatgataagcaaaggaagatccaagacaacacaaatatacaaatagttagttatacaagcaaaaatcctgttgttttgtgcctcccattttctagtccagaattaatatgacaatttttcactgaaactggttggatcagagaccaggaaaaaaagggaaatgacaactacagctgtgttttttttttcaaagaaggcagctgcccgtcgatgatgtgctcacttgaggatttcctctgccttttcagtgacactgcttcatccttttcagagtcaaatgaatctctacctcatttcactgcacatacttccaaactgatttgctgtaacatacttgagtttcggtatgacattaatttttaactcataagagaacaaaatcagaagaaaaaaaaacaacaaccatgctggactgatcttacaacaacaaccatggatggtggtcttaataaggcctcgtttggcagggctccggcttctctaaaac

SEQ ID NO: 215752 - DNA, 4532 bp, Zea Mays
tgaagattgtgcctatatcgattgttctagttttgaggcaaataacatcccacggtctatccgttacctatccatttccatgcaagatcattgtgctcagaatttcgaggaacaaatgggaaaactgaaagaaaagatatacattaacaatttgcggagtttgatgatatttggaaaatacattatgttacatctgctcaatattttaagggacacatttaaggaaataagacgtcttcgtgttctatctatattcatatactcccatagttccttgccaaacaacttttcagagcttcttcatctccgctacttaaaacttttgtcaccttattactcagaaatgtcattgccaaacacggtctcaaggttttatcacctgaaatttctagatcttgaacaatggggaagtgatcgttctttgcctaaggacattagccgccttgaaaatctatgccattttgttgtttcggaaaagattgattccaatgttcctgaggtggggaaaatgatcttcttacaagaattgaaagaattccatgttaataaagagagtgttggatttgagctacaagaattgggtaaactagatgagcttggagggaagctcaatatatacgggcttgaaaatgtgagaaccaagaaagaagctaaagaggccaagctgatgtcaaagaggaatttagttgagttgggattaatttggaacatgaaacaagagtccaccgaagatgatatcctagatagtatccaaccacactctaatgttaggagtctttttattgtaaatcatggtggtaccctcggtcctagttggttgtgcagcagcgacaccatatacatgaaaaacttggagactctacatctagagagcgtatcgtgggctaaccttccacctattgggcagttctatcacttaagagagctaaggctgagtaaaattgttggcatatcacagattggacctggcttcttcgatagcacgacagaaaaaagtgtctcacacttgaaggcagttgagtttaatgatatgccagagcttgtcgagtgggttgggggagctaactggaatctgttctcaggaattgaaagaatcaagtgtactaattgtcctaggctgacagggttgctggtttcagattggtctatttcttctatataagacagcactgtatggttccctaatcttcatgacctttacatttatgaatgcccgaagttgtgccttccacccttgcctcacacttcaaaggtatcccgtattcatatgggagacttttcttatgaaggtcgtaccatgttgaaaattaataacccctctagatttgccttcgaaaatctgggtgacctagagacattggtagcttgggatgcactacccttgtcctttatggatcttaaaaagctacattccttgagacgtataaatgtcactagatgtgaggaaacatttttgagaggactggatgatggtgttgtgctacccacagtccaatctctctaccttggacgatttacacctaccaaaaattatttgtcaaaattattcaaatgttttccagcactttcttctttgcatgtgatggcatcaccatcagatgaggacaacgaggaagtggtactgcattttccaccctctagctcgctgagagatgtcaacttcacagggtgtaagaatctgatcctacccatggaggaaggagctggattctgtggcctctcgtcgctcgagtcagtgaccatacacaaatgtgacaggttattctctcgatggtccatcggaggacgagcaactcagactcagagcatcatcaaccctctcccaccctacctgaggaaactcttcctttcttatatggaaactctgcctcaggaagctctgctcatgaatttgacatctcttgagaaactcacactatgtaattgtcttggctgtgagcaaagcaccgagcgaatggctgtactcgcgaatctaacatctcttaccacgctatatttatataattgcagaaatatcacaatggatggattcaatcctcacatcacatccagcctcaagtatctatgcgtgtacaatgagagaaatgatggaactgatccgtattctgtagcagcagatctacttgtagcggtggtgaggaccaaaacaatgcccgacgtttccttcaaactggtgggactttatgtggacaacatctcgggagtgcttgttgctcccatctgcaagctgctctccgctaccctcgagacgttaaacttcagtaatgattggcggacagagaacttcacgaaagagcaggacgaggcgcttcagctcctcacgtctctccaattccttgagttttataactgcagggctctgcagtccctcccccaaggactgcaccgccttccttctctccacggaataactatctatgggcctcaaaacattagatcactgcctaaggagggcctccccgattcactacgaatactacgtataactaactgttgtgctgagatttatgaggcatgccagcaattgaagggaacaaggccagatataaatgtacttgcctccaaagctcgtgtgcaaaattgaatacctgcttctgcatgtcttcacagtcagctctgcttcaacatgcctttcactctacaggtaaatactgtgaaaacatcttcctatacgtgagatagttgatcttcatcgattctacagccaggatgatgtcttattggatgatgtgttggtcatggttggcacaaaattcagtagcgttcaaggcaataaacgagaacaagcatgggatgtggaaaattttagaaagtaaagacaagtgaattcttgacgacgttggcttggcaccttagtttgagtacataatgaaagaacaaccttttagcaaccctggagcatctagaaaatatcagtcatgtaactatcgttaatcatttgaaaaccactggaagacaggagatgtagcaccacaagccattcctttgatcatttgaaaaccattgcggctctttctgattatatcaaccagttgagtggatgaaagaccaaaaaatgctttggaagaagggctcacaattgtggataataaggcatccagtattatagaggaaacaaaggaaattcaaattagacggaaacctgctagtccaagttcttatatgccaaattcatcaatttgcatcctactggagacattgctggcagaggaattgagactggcataggagaactcaatatatgcttgtgaataacgcatccagtgaaagatagtagattttcatcaattcactacccaggatgttgtcgcattggatgagaatgacatggaagacggcgaactagaggaagacaacaacctcatctaagctgaaaatgtgttgcctgtggttgaagaaaatctagcagatgaacaacactgccttccctgtcctctctagacctgaatctctctgatggtttggattcgtccatgattgatcctgtacgatgaaggatcagctcgtccaacgtttttcaaggaacgaactcaatctgaggaattaccttttcattggtcacctggggtactacgaggaatgacttcacgatagacgactcggttttgcgacgcaaaccaaacgccatggttaggctcagatgttggatcagatgattcctcgtggcttcgtgacgcaaaccaaacgacatggctaggctcagatgttggatcgtatgatttctcgtggcttcgtgacgcaaaccaaacagcctcatgctctagccaaaggcatgatcgtcatcgttctgaaacaaagaaaatgatgtgtattcctttcagtgagcggcctttgcatgctgcatgagatcaagcaagccgccgactggcaatgctccacctgccattcagttcgttggtgaggtattaatcaccagccatgttggcacttggcggcatgcagatggagcagaacatccaggtgaagcggacagatacatgatcgatcatgagttggcgcagacacaggccagacaaccagaggctatattccaattcatacattccatgataagcaaaggaagatccaagacaacacaaatatacaaatagttagttatacaagcaaaaatcctgttgttttgtgcctcccattttctagtccagaattaatatgacaatttttcactgaaactggttggatcagagaccaggaaaaaaagggaaatgacaactacagctgtgttttttttttcaaagaaggcagctgcccgtcgatgatgtgctcacttgaggatttcctctgccttttcagtgacactgcttcatccttttcagagtcaaatgaatctctacctcatttcactgcacatacttccaaactgatttgctgtaacatacttgagtttcggtatgacattaatttttaactcataagagaacaaaatcagaagaaaaaaaaacaacaaccatgctggactgatcttacaacaacaaccatggatggtggtcttaataaggcctcgtttggcagggctccggcttctctaaaac

SEQ ID NO: 215753 - DNA, 5368 bp, Zea Mays
tgaagattgtgcctatatcgattgttctagttttgaggcaaataacatcccacggtctatccgttacctatccatttccatgcaagatcattgtgctcagaatttcgaggaacaaatgggaaaactgaaagaaaagatatacattaacaatttgcggagtttgatgatatttggaaaatacattatgttacatctgctcaatattttaagggacacatttaaggaaataagacgtcttcgtgttctatctatattcatatactcccatagttccttgccaaacaacttttcagagcttcttcatctccgctacttaaaacttttgtcaccttattactcagaaatgtcattgccaaacacggtctcaaggttttatcacctgaaatttctagatcttgaacaatggggaagtgatcgttctttgcctaaggacattagccgccttgaaaatctatgccattttgttgtttcggaaaagattgattccaatgttcctgaggtggggaaaatgatcttcttacaagaattgaaagaattccatgttaataaagagagtgttggatttgagctacaagaattgggtaaactagatgagcttggagggaagctcaatatatacgggcttgaaaatgtgagaaccaagaaagaagctaaagaggccaagctgatgtcaaagaggaatttagttgagttgggattaatttggaacatgaaacaagagtccaccgaagatgatatcctagatagtatccaaccacactctaatgttaggagtctttttattgtaaatcatggtggtaccctcggtcctagttggttgtgcagcagcgacaccatatacatgaaaaacttggagactctacatctagagagcgtatcgtgggctaaccttccacctattgggcagttctatcacttaagagagctaaggctgagtaaaattgttggcatatcacagattggacctggcttcttcgatagcacgacagaaaaaagtgtctcacacttgaaggcagttgagtttaatgatatgccagagcttgtcgagtgggttgggggagctaactggaatctgttctcaggaattgaaagaatcaagtgtactaattgtcctaggctgacagggttgctggtttcagattggtctatttcttctatataagacagcactgtatggttccctaatcttcatgacctttacatttatgaatgcccgaagttgtgccttccacccttgcctcacacttcaaaggtatcccgtattcatatgggagacttttcttatgaaggtcgtaccatgttgaaaattaataacccctctagatttgccttcgaaaatctgggtgacctagagacattggtagcttgggatgcactacccttgtcctttatggatcttaaaaagctacattccttgagacgtataaatgtcactagatgtgaggaaacatttttgagaggactggatgatggtgttgtgctacccacagtccaatctctctaccttggacgatttacacctaccaaaaattatttgtcaaaattattcaaatgttttccagcactttcttctttgcatgtgatggcatcaccatcagatgaggacaacgaggaagtggtactgcattttccaccctctagctcgctgagagatgtcaacttcacagggtgtaagaatctgatcctacccatggaggaaggagctggattctgtggcctctcgtcgctcgagtcagtgaccatacacaaatgtgacaggttattctctcgatggtccatcggaggacgagcaactcagactcagagcatcatcaaccctctcccaccctacctgaggaaactcttcctttcttatatggaaactctgcctcaggaagctctgctcatgaatttgacatctcttgagaaactcacactatgtaattgtcttggctgtgagcaaagcaccgagcgaatggctgtactcgcgaatctaacatctcttaccacgctatatttatataattgcagaaatatcacaatggatggattcaatcctcacatcacatccagcctcaagtatctatgcgtgtacaatgagagaaatgatggaactgatccgtattctgtagcagcagatctacttgtagcggtggtgaggaccaaaacaatgcccgacgtttccttcaaactggtgggactttatgtggacaacatctcgggagtgcttgttgctcccatctgcaagctgctctccgctaccctcgagacgttaaacttcagtaatgattggcggacagagaacttcacgaaagagcaggacgaggcgcttcagctcctcacgtctctccaattccttgagttttataactgcagggctctgcagtccctcccccaaggactgcaccgccttccttctctccacggaataactatctatgggcctcaaaacattagatcactgcctaaggagggcctccccgattcactacgaatactacgtataactaactgttgtgctgagatttatgaggcatgccagcaattgaagggaacaaggccagatataaatgtacttgcctccaaagctcgtgtgcaaaattgaatacctgcttctgcatgtcttcacagtcagctctgcttcaacatgcctttcactctacaggtaaatactgtgaaaacatcttcctatacgtgagatagttgatcttcatcgattctacagccaggatgatgtcttattggatgatgtgttggtcatggttggcacaaaattcagtagcgttcaaggcaataaacgagaacaagcatgggatgtggaaaattttagaaagtaaagacaagtgaattcttgacgacgttggcttggcaccttagtttgagtacataatgaaagaacaaccttttagcaaccctggagcatctagaaaatatcaggtgaggcagtaagtggatctgaatatgtgaaaaaattggcagtcactaatggacttcttgtatatggcattgtctccctctctctgctgttttatagttcaaggcattctatttacagctattgcaactttttttgtaatttcagtcatgtaactatcgttaatcatttgaaaaccactggaagacaggagatgtagcaccacaagccattcctttgatcatttgaaaaccattgcggctctttctgattatatcaaccagttgagtggatgaaagaccaaaaaatgctttggaaggctcacaattgtggataataaggcatccagtattatagaggaaacaaaggaaattcaaattagacggaaacctgctagtccaagttcttatatgccaaattcatcagtagatacacatacactctacaccctaatcttctttgttatgacatttattgtttttttcatgaactacgtacatcttaattttcaattcatctagaatactgaataggtgatgattcatcaccaaattgataagtgaatattaatacatctgaaacctaaaattaaatatatattatataagttgttgttaatgttcattccatttttgaacacttgcatgaattttagttctctgtttcttttgaaaaattctgtgttgcaaaaatataaatttatatgaaaatatattatatggtgatgagaagtttgagtttagtatatggtttcatattagctatacattgttggtactatcggcttgttctctttttgtttgaaaaaaatactatcggcttgttcttaaggacacataaaggactagttcggaagcaagagaattagaggagagatggctaaaatccccttcctaattaaataggaagggaatttgagcaccctcaatcccctctaattcccttgctttcaaactagcccaaagagtgtcactgcatcctctgaattatgatatattgaacatggtgttataattgtgaaccgatgagtataacttattttctccatattctgaacaacccattacttaaacagatttgcatcctactggagacattgctggcagaggaattgagactggcataggagaactcaatatatgcttgtgaataacgcatccagtgaaagatagtagattttcatcaattcactacccaggatgttgtcgcattggatgagaatgacatggaagacggcgaactagaggaagacaacaacctcatctaagctgaaaatgtgttgcctgtggttgaagaaaatctagcagatgaacaacactgccttccctgtcctctctagacctgaatctctctgatggtttggattcgtccatgattgatcctgtacgatgaaggatcagctcgtccaacgtttttcaaggaacgaactcaatctgaggaattaccttttcattggtcacctggggtactacgaggaatgacttcacgatagacgactcggttttgcgacgcaaaccaaacgccatggttaggctcagatgttggatcagatgattcctcgtggcttcgtgacgcaaaccaaacgacatggctaggctcagatgttggatcgtatgatttctcgtggcttcgtgacgcaaaccaaacagcctgtaagtccgcacaccttatctatcatggtcattgttgagctgatcagtaattggagtcgtgtgataagcttaatggacctcctatttgtcgtgatcttcacagatcaacaagtgagcggcctttgcatgctgcatgagatcaagcaagccgccgactggcaatgctccacctgccattcagttcgttggtgaggtattaatcaccagccatgttggcacttggcggcatgcagatggagcagaacatccaggtgaagcggacagatacatgatcgatcatgagttggcgcagacacaggccagacaaccagaggctatattccaattcatacattccatgataagcaaaggaagatccaagacaacacaaatatacaaatagttagttatacaagcaaaaatcctgttgttttgtgcctcccattttctagtccagaattaatatgacaatttttcactgaaactggttggatcagagaccaggaaaaaaagggaaatgacaactacagctgtgttttttttttcaaagaaggcagctgcccgtcgatgatgtgctcacttgaggatttcctctgccttttcagtgacactgcttcatccttttcagagtcaaatgaatctctacctcatttcactgcacatacttccaaactgatttgctgtaacatacttgagtttcggtatgacattaatttttaactcataagagaacaaaatcagaagaaaaaaaaacaacaaccatgctggactgatcttacaacaacaaccatggatggtggtcttaataaggcctcgtttggcagggctccggcttctctaaaac

SEQ ID NO: 215754 - DNA, 4577 bp, Zea Mays
tgaagattgtgcctatatcgattgttctagttttgaggcaaataacatcccacggtctatccgttacctatccatttccatgcaagatcattgtgctcagaatttcgaggaacaaatgggaaaactgaaagaaaagatatacattaacaatttgcggagtttgatgatatttggaaaatacattatgttacatctgctcaatattttaagggacacatttaaggaaataagacgtcttcgtgttctatctatattcatatactcccatagttccttgccaaacaacttttcagagcttcttcatctccgctacttaaaacttttgtcaccttattactcagaaatgtcattgccaaacacggtctcaaggttttatcacctgaaatttctagatcttgaacaatggggaagtgatcgttctttgcctaaggacattagccgccttgaaaatctatgccattttgttgtttcggaaaagattgattccaatgttcctgaggtggggaaaatgatcttcttacaagaattgaaagaattccatgttaataaagagagtgttggatttgagctacaagaattgggtaaactagatgagcttggagggaagctcaatatatacgggcttgaaaatgtgagaaccaagaaagaagctaaagaggccaagctgatgtcaaagaggaatttagttgagttgggattaatttggaacatgaaacaagagtccaccgaagatgatatcctagatagtatccaaccacactctaatgttaggagtctttttattgtaaatcatggtggtaccctcggtcctagttggttgtgcagcagcgacaccatatacatgaaaaacttggagactctacatctagagagcgtatcgtgggctaaccttccacctattgggcagttctatcacttaagagagctaaggctgagtaaaattgttggcatatcacagattggacctggcttcttcgatagcacgacagaaaaaagtgtctcacacttgaaggcagttgagtttaatgatatgccagagcttgtcgagtgggttgggggagctaactggaatctgttctcaggaattgaaagaatcaagtgtactaattgtcctaggctgacagggttgctggtttcagattggtctatttcttctatataagacagcactgtatggttccctaatcttcatgacctttacatttatgaatgcccgaagttgtgccttccacccttgcctcacacttcaaaggtatcccgtattcatatgggagacttttcttatgaaggtcgtaccatgttgaaaattaataacccctctagatttgccttcgaaaatctgggtgacctagagacattggtagcttgggatgcactacccttgtcctttatggatcttaaaaagctacattccttgagacgtataaatgtcactagatgtgaggaaacatttttgagaggactggatgatggtgttgtgctacccacagtccaatctctctaccttggacgatttacacctaccaaaaattatttgtcaaaattattcaaatgttttccagcactttcttctttgcatgtgatggcatcaccatcagatgaggacaacgaggaagtggtactgcattttccaccctctagctcgctgagagatgtcaacttcacagggtgtaagaatctgatcctacccatggaggaaggagctggattctgtggcctctcgtcgctcgagtcagtgaccatacacaaatgtgacaggttattctctcgatggtccatcggaggacgagcaactcagactcagagcatcatcaaccctctcccaccctacctgaggaaactcttcctttcttatatggaaactctgcctcaggaagctctgctcatgaatttgacatctcttgagaaactcacactatgtaattgtcttggctgtgagcaaagcaccgagcgaatggctgtactcgcgaatctaacatctcttaccacgctatatttatataattgcagaaatatcacaatggatggattcaatcctcacatcacatccagcctcaagtatctatgcgtgtacaatgagagaaatgatggaactgatccgtattctgtagcagcagatctacttgtagcggtggtgaggaccaaaacaatgcccgacgtttccttcaaactggtgggactttatgtggacaacatctcgggagtgcttgttgctcccatctgcaagctgctctccgctaccctcgagacgttaaacttcagtaatgattggcggacagagaacttcacgaaagagcaggacgaggcgcttcagctcctcacgtctctccaattccttgagttttataactgcagggctctgcagtccctcccccaaggactgcaccgccttccttctctccacggaataactatctatgggcctcaaaacattagatcactgcctaaggagggcctccccgattcactacgaatactacgtataactaactgttgtgctgagatttatgaggcatgccagcaattgaagggaacaaggccagatataaatgtacttgcctccaaagctcgtgtgcaaaattgaatacctgcttctgcatgtcttcacagtcagctctgcttcaacatgcctttcactctacaggtaaatactgtgaaaacatcttcctatacgtgagatagttgatcttcatcgattctacagccaggatgatgtcttattggatgatgtgttggtcatggttggcacaaaattcagtagcgttcaaggcaataaacgagaacaagcatgggatgtggaaaattttagaaagtaaagacaagtgaattcttgacgacgttggcttggcaccttagtttgagtacataatgaaagaacaaccttttagcaaccctggagcatctagaaaatatcagtcatgtaactatcgttaatcatttgaaaaccactggaagacaggagatgtagcaccacaagccattcctttgatcatttgaaaaccattgcggctctttctgattatatcaaccagttgagtggatgaaagaccaaaaaatgctttggaagaagggctcacaattgtggataataaggcatccagtattatagaggaaacaaaggaaattcaaattagacggaaacctgctagtccaagttcttatatgccaaattcatcaatttgcatcctactggagacattgctggcagaggaattgagactggcataggagaactcaatatatgcttgtgaataacgcatccagtgaaagatagtagattttcatcaattcactacccaggatgttgtcgcattggatgagaatgacatggaagacggcgaactagaggaagacaacaacctcatctaagctgaaaatgtgttgcctgtggttgaagaaaatctagcagatgaacaacactgccttccctgtcctctctagacctgaatctctctgatggtttggattcgtccatgattgatcctgtacgatgaaggatcagctcgtccaacgtttttcaaggaacgaactcaatctgaggaattaccttttcattggtcacctggggtactacgaggaatgacttcacgatagacgactcggttttgcgacgcaaaccaaacgccatggttaggctcagatgttggatcagatgattcctcgtggcttcgtgacgcaaaccaaacgacatggctaggctcagatgttggatcgtatgatttctcgtggcttcgtgacgcaaaccaaacagcctgtaagtccgcacaccttatctatcatggtcattgttgagctgatcagtaattggagtcgtgtgataagcttaatggacctcctatttgtcgtgatcttcacagatcaacaagtgagcggcctttgcatgctgcatgagatcaagcaagccgccgactggcaatgctccacctgccattcagttcgttggtgaggtattaatcaccagccatgttggcacttggcggcatgcagatggagcagaacatccaggtgaagcggacagatacatgatcgatcatgagttggcgcagacacaggccagacaaccagaggctatattccaattcatacattccatgataagcaaaggaagatccaagacaacacaaatatacaaatagttagttatacaagcaaaaatcctgttgttttgtgcctcccattttctagtccagaattaatatgacaatttttcactgaaactggttggatcagagaccaggaaaaaaagggaaatgacaactacagctgtgttttttttttcaaagaaggcagctgcccgtcgatgatgtgctcacttgaggatttcctctgccttttcagtgacactgcttcatccttttcagagtcaaatgaatctctacctcatttcactgcacatacttccaaactgatttgctgtaacatacttgagtttcggtatgacattaatttttaactcataagagaacaaaatcagaagaaaaaaaaacaacaaccatgctggactgatcttacaacaacaaccatggatggtggtcttaataaggcctcgtttggcagggctccggcttctctaaaac

SEQ ID NO: 215755 - DNA, 5368 bp, Zea Mays
tgaagattgtgcctatatcgattgttctagttttgaggcaaataacatcccacggtctatccgttacctatccatttccatgcaagatcattgtgctcagaatttcgaggaacaaatgggaaaactgaaagaaaagatatacattaacaatttgcggagtttgatgatatttggaaaatacattatgttacatctgctcaatattttaagggacacatttaaggaaataagacgtcttcgtgttctatctatattcatatactcccatagttccttgccaaacaacttttcagagcttcttcatctccgctacttaaaacttttgtcaccttattactcagaaatgtcattgccaaacacggtctcaaggttttatcacctgaaatttctagatcttgaacaatggggaagtgatcgttctttgcctaaggacattagccgccttgaaaatctatgccattttgttgtttcggaaaagattgattccaatgttcctgaggtggggaaaatgatcttcttacaagaattgaaagaattccatgttaataaagagagtgttggatttgagctacaagaattgggtaaactagatgagcttggagggaagctcaatatatacgggcttgaaaatgtgagaaccaagaaagaagctaaagaggccaagctgatgtcaaagaggaatttagttgagttgggattaatttggaacatgaaacaagagtccaccgaagatgatatcctagatagtatccaaccacactctaatgttaggagtctttttattgtaaatcatggtggtaccctcggtcctagttggttgtgcagcagcgacaccatatacatgaaaaacttggagactctacatctagagagcgtatcgtgggctaaccttccacctattgggcagttctatcacttaagagagctaaggctgagtaaaattgttggcatatcacagattggacctggcttcttcgatagcacgacagaaaaaagtgtctcacacttgaaggcagttgagtttaatgatatgccagagcttgtcgagtgggttgggggagctaactggaatctgttctcaggaattgaaagaatcaagtgtactaattgtcctaggctgacagggttgctggtttcagattggtctatttcttctatataagacagcactgtatggttccctaatcttcatgacctttacatttatgaatgcccgaagttgtgccttccacccttgcctcacacttcaaaggtatcccgtattcatatgggagacttttcttatgaaggtcgtaccatgttgaaaattaataacccctctagatttgccttcgaaaatctgggtgacctagagacattggtagcttgggatgcactacccttgtcctttatggatcttaaaaagctacattccttgagacgtataaatgtcactagatgtgaggaaacatttttgagaggactggatgatggtgttgtgctacccacagtccaatctctctaccttggacgatttacacctaccaaaaattatttgtcaaaattattcaaatgttttccagcactttcttctttgcatgtgatggcatcaccatcagatgaggacaacgaggaagtggtactgcattttccaccctctagctcgctgagagatgtcaacttcacagggtgtaagaatctgatcctacccatggaggaaggagctggattctgtggcctctcgtcgctcgagtcagtgaccatacacaaatgtgacaggttattctctcgatggtccatcggaggacgagcaactcagactcagagcatcatcaaccctctcccaccctacctgaggaaactcttcctttcttatatggaaactctgcctcaggaagctctgctcatgaatttgacatctcttgagaaactcacactatgtaattgtcttggctgtgagcaaagcaccgagcgaatggctgtactcgcgaatctaacatctcttaccacgctatatttatataattgcagaaatatcacaatggatggattcaatcctcacatcacatccagcctcaagtatctatgcgtgtacaatgagagaaatgatggaactgatccgtattctgtagcagcagatctacttgtagcggtggtgaggaccaaaacaatgcccgacgtttccttcaaactggtgggactttatgtggacaacatctcgggagtgcttgttgctcccatctgcaagctgctctccgctaccctcgagacgttaaacttcagtaatgattggcggacagagaacttcacgaaagagcaggacgaggcgcttcagctcctcacgtctctccaattccttgagttttataactgcagggctctgcagtccctcccccaaggactgcaccgccttccttctctccacggaataactatctatgggcctcaaaacattagatcactgcctaaggagggcctccccgattcactacgaatactacgtataactaactgttgtgctgagatttatgaggcatgccagcaattgaagggaacaaggccagatataaatgtacttgcctccaaagctcgtgtgcaaaattgaatacctgcttctgcatgtcttcacagtcagctctgcttcaacatgcctttcactctacaggtaaatactgtgaaaacatcttcctatacgtgagatagttgatcttcatcgattctacagccaggatgatgtcttattggatgatgtgttggtcatggttggcacaaaattcacgttcaaggcaataaacgagaacaagcatgggatgtggaaaattttagaaagtaaagacaagtgaattcttgacgacgttggcttggcaccttagtttgagtacataatgaaagaacaaccttttagcaaccctggagcatctagaaaatatcaggtgaggcagtaagtggatctgaatatgtgaaaaaattggcagtcactaatggacttcttgtatatggcattgtctccctctctctgctgttttatagttcaaggcattctatttacagctattgcaactttttttgtaatttcagtcatgtaactatcgttaatcatttgaaaaccactggaagacaggagatgtagcaccacaagccattcctttgatcatttgaaaaccattgcggctctttctgattatatcaaccagttgagtggatgaaagaccaaaaaatgctttggaagaagggctcacaattgtggataataaggcatccagtattatagaggaaacaaaggaaattcaaattagacggaaacctgctagtccaagttcttatatgccaaattcatcagtagatacacatacactctacaccctaatcttctttgttatgacatttattgtttttttcatgaactacgtacatcttaattttcaattcatctagaatactgaataggtgatgattcatcaccaaattgataagtgaatattaatacatctgaaacctaaaattaaatatatattatataagttgttgttaatgttcattccatttttgaacacttgcatgaattttagttctctgtttcttttgaaaaattctgtgttgcaaaaatataaatttatatgaaaatatattatatggtgatgagaagtttgagtttagtatatggtttcatattagctatacattgttggtactatcggcttgttctctttttgtttgaaaaaaatactatcggcttgttcttaaggacacataaaggactagttcggaagcaagagaattagaggagagatggctaaaatccccttcctaattaaataggaagggaatttgagcaccctcaatcccctctaattcccttgctttcaaactagcccaaagagtgtcactgcatcctctgaattatgatatattgaacatggtgttataattgtgaaccgatgagtataacttattttctccatattctgaacaacccattacttaaacagatttgcatcctactggagacattgctggcagaggaattgagactggcataggagaactcaatatatgcttgtgaataacgcatccagtgaaagatagtagattttcatcaattcactacccaggatgttgtcgcattggatgagaatgacatggaagacggcgaactagaggaagacaacaacctcatctaagctgaaaatgtgttgcctgtggttgaagaaaatctagcagatgaacaacactgccttccctgtcctctctagacctgaatctctctgatggtttggattcgtccatgattgatcctgtacgatgaaggatcagctcgtccaacgtttttcaaggaacgaactcaatctgaggaattaccttttcattggtcacctggggtactacgaggaatgacttcacgatagacgactcggttttgcgacgcaaaccaaacgccatggttaggctcagatgttggatcagatgattcctcgtggcttcgtgacgcaaaccaaacgacatggctaggctcagatgttggatcgtatgatttctcgtggcttcgtgacgcaaaccaaacagcctgtaagtccgcacaccttatctatcatggtcattgttgagctgatcagtaattggagtcgtgtgataagcttaatggacctcctatttgtcgtgatcttcacagatcaacaagtgagcggcctttgcatgctgcatgagatcaagcaagccgccgactggcaatgctccacctgccattcagttcgttggtgaggtattaatcaccagccatgttggcacttggcggcatgcagatggagcagaacatccaggtgaagcggacagatacatgatcgatcatgagttggcgcagacacaggccagacaaccagaggctatattccaattcatacattccatgataagcaaaggaagatccaagacaacacaaatatacaaatagttagttatacaagcaaaaatcctgttgttttgtgcctcccattttctagtccagaattaatatgacaatttttcactgaaactggttggatcagagaccaggaaaaaaagggaaatgacaactacagctgtgttttttttttcaaagaaggcagctgcccgtcgatgatgtgctcacttgaggatttcctctgccttttcagtgacactgcttcatccttttcagagtcaaatgaatctctacctcatttcactgcacatacttccaaactgatttgctgtaacatacttgagtttcggtatgacattaatttttaactcataagagaacaaaatcagaagaaaaaaaaacaacaaccatgctggactgatcttacaacaacaaccatggatggtggtcttaataaggcctcgtttggcagggctccggcttctctaaaac

SEQ ID NO: 215756 - DNA, 5192 bp, Zea Mays
tgaagattgtgcctatatcgattgttctagttttgaggcaaataacatcccacggtctatccgttacctatccatttccatgcaagatcattgtgctcagaatttcgaggaacaaatgggaaaactgaaagaaaagatatacattaacaatttgcggagtttgatgatatttggaaaatacattatgttacatctgctcaatattttaagggacacatttaaggaaataagacgtcttcgtgttctatctatattcatatactcccatagttccttgccaaacaacttttcagagcttcttcatctccgctacttaaaacttttgtcaccttattactcagaaatgtcattgccaaacacggtctcaaggttttatcacctgaaatttctagatcttgaacaatggggaagtgatcgttctttgcctaaggacattagccgccttgaaaatctatgccattttgttgtttcggaaaagattgattccaatgttcctgaggtggggaaaatgatcttcttacaagaattgaaagaattccatgttaataaagagagtgttggatttgagctacaagaattgggtaaactagatgagcttggagggaagctcaatatatacgggcttgaaaatgtgagaaccaagaaagaagctaaagaggccaagctgatgtcaaagaggaatttagttgagttgggattaatttggaacatgaaacaagagtccaccgaagatgatatcctagatagtatccaaccacactctaatgttaggagtctttttattgtaaatcatggtggtaccctcggtcctagttggttgtgcagcagcgacaccatatacatgaaaaacttggagactctacatctagagagcgtatcgtgggctaaccttccacctattgggcagttctatcacttaagagagctaaggctgagtaaaattgttggcatatcacagattggacctggcttcttcgatagcacgacagaaaaaagtgtctcacacttgaaggcagttgagtttaatgatatgccagagcttgtcgagtgggttgggggagctaactggaatctgttctcaggaattgaaagaatcaagtgtactaattgtcctaggctgacagggttgctggtttcagattggtctatttcttctatataagacagcactgtatggttccctaatcttcatgacctttacatttatgaatgcccgaagttgtgccttccacccttgcctcacacttcaaaggtatcccgtattcatatgggagacttttcttatgaaggtcgtaccatgttgaaaattaataacccctctagatttgccttcgaaaatctgggtgacctagagacattggtagcttgggatgcactacccttgtcctttatggatcttaaaaagctacattccttgagacgtataaatgtcactagatgtgaggaaacatttttgagaggactggatgatggtgttgtgctacccacagtccaatctctctaccttggacgatttacacctaccaaaaattatttgtcaaaattattcaaatgttttccagcactttcttctttgcatgtgatggcatcaccatcagatgaggacaacgaggaagtggtactgcattttccaccctctagctcgctgagagatgtcaacttcacagggtgtaagaatctgatcctacccatggaggaaggagctggattctgtggcctctcgtcgctcgagtcagtgaccatacacaaatgtgacaggttattctctcgatggtccatcggaggacgagcaactcagactcagagcatcatcaaccctctcccaccctacctgaggaaactcttcctttcttatatggaaactctgcctcaggaagctctgctcatgaatttgacatctcttgagaaactcacactatgtaattgtcttggctgtgagcaaagcaccgagcgaatggctgtactcgcgaatctaacatctcttaccacgctatatttatataattgcagaaatatcacaatggatggattcaatcctcacatcacatccagcctcaagtatctatgcgtgtacaatgagagaaatgatggaactgatccgtattctgtagcagcagatctacttgtagcggtggtgaggaccaaaacaatgcccgacgtttccttcaaactggtgggactttatgtggacaacatctcgggagtgcttgttgctcccatctgcaagctgctctccgctaccctcgagacgttaaacttcagtaatgattggcggacagagaacttcacgaaagagcaggacgaggcgcttcagctcctcacgtctctccaattccttgagttttataactgcagggctctgcagtccctcccccaaggactgcaccgccttccttctctccacggaataactatctatgggcctcaaaacattagatcactgcctaaggagggcctccccgattcactacgaatactacgtataactaactgttgtgctgagatttatgaggcatgccagcaattgaagggaacaaggccagatataaatgtacttgcctccaaagctcgtgtgcaaaattgaatacctgcttctgcatgtcttcacagtcagctctgcttcaacatgcctttcactctacaggtaaatactgtgaaaacatcttcctatacgtgagatagttgatcttcatcgattctacagccaggatgatgtcttattggatgatgtgttggtcatggttggcacaaaattcagtagcgttcaaggcaataaacgagaacaagcatgggatgtggaaaattttagaaagtaaagacaagtgaattcttgacgacgttggcttggcaccttagtttgagtacataatgaaagaacaaccttttagcaaccctggagcatctagaaaatatcagtcatgtaactatcgttaatcatttgaaaaccactggaagacaggagatgtagcaccacaagccattcctttgatcatttgaaaaccattgcggctctttctgattatatcaaccagaagggctcacaattgtggataataaggcatccagtattatagaggaaacaaaggaaattcaaattagacggaaacctgctagtccaagttcttatatgccaaattcatcagtagatacacatacactctacaccctaatcttctttgttatgacatttattgtttttttcatgaactacgtacatcttaattttcaattcatctagaatactgaataggtgatgattcatcaccaaattgataagtgaatattaatacatctgaaacctaaaattaaatatatattatataagttgttgttaatgttcattccatttttgaacacttgcatgaattttagttctctgtttcttttgaaaaattctgtgttgcaaaaatataaatttatatgaaaatatattatatggtgatgagaagtttgagtttagtatatggtttcatattagctatacattgttggtactatcggcttgttctctttttgtttgaaaaaaatactatcggcttgttcttaaggacacataaaggactagttcggaagcaagagaattagaggagagatggctaaaatccccttcctaattaaataggaagggaatttgagcaccctcaatcccctctaattcccttgctttcaaactagcccaaagagtgtcactgcatcctctgaattatgatatattgaacatggtgttataattgtgaaccgatgagtataacttattttctccatattctgaacaacccattacttaaacagatttgcatcctactggagacattgctggcagaggaattgagactggcataggagaactcaatatatgcttgtgaataacgcatccagtgaaagatagtagattttcatcaattcactacccaggatgttgtcgcattggatgagaatgacatggaagacggcgaactagaggaagacaacaacctcatctaagctgaaaatgtgttgcctgtggttgaagaaaatctagcagatgaacaacactgccttccctgtcctctctagacctgaatctctctgatggtttggattcgtccatgattgatcctgtacgatgaaggatcagctcgtccaacgtttttcaaggaacgaactcaatctgaggaattaccttttcattggtcacctggggtactacgaggaatgacttcacgatagacgactcggttttgcgacgcaaaccaaacgccatggttaggctcagatgttggatcagatgattcctcgtggcttcgtgacgcaaaccaaacgacatggctaggctcagatgttggatcgtatgatttctcgtggcttcgtgacgcaaaccaaacagcctgtaagtccgcacaccttatctatcatggtcattgttgagctgatcagtaattggagtcgtgtgataagcttaatggacctcctatttgtcgtgatcttcacagatcaacaagtgagcggcctttgcatgctgcatgagatcaagcaagccgccgactggcaatgctccacctgccattcagttcgttggtgaggtattaatcaccagccatgttggcacttggcggcatgcagatggagcagaacatccaggtgaagcggacagatacatgatcgatcatgagttggcgcagacacaggccagacaaccagaggctatattccaattcatacattccatgataagcaaaggaagatccaagacaacacaaatatacaaatagttagttatacaagcaaaaatcctgttgttttgtgcctcccattttctagtccagaattaatatgacaatttttcactgaaactggttggatcagagaccaggaaaaaaagggaaatgacaactacagctgtgttttttttttcaaagaaggcagctgcccgtcgatgatgtgctcacttgaggatttcctctgccttttcagtgacactgcttcatccttttcagagtcaaatgaatctctacctcatttcactgcacatacttccaaactgatttgctgtaacatacttgagtttcggtatgacattaatttttaactcataagagaacaaaatcagaagaaaaaaaaacaacaaccatgctggactgatcttacaacaacaaccatggatggtggtcttaataaggcctcgtttggcagggctccggcttctctaaaac

SEQ ID NO: 215757 - DNA, 4604 bp, Zea Mays
tgaagattgtgcctatatcgattgttctagttttgaggcaaataacatcccacggtctatccgttacctatccatttccatgcaagatcattgtgctcagaatttcgaggaacaaatgggaaaactgaaagaaaagatatacattaacaatttgcggagtttgatgatatttggaaaatacattatgttacatctgctcaatattttaagggacacatttaaggaaataagacgtcttcgtgttctatctatattcatatactcccatagttccttgccaaacaacttttcagagcttcttcatctccgctacttaaaacttttgtcaccttattactcagaaatgtcattgccaaacacggtctcaaggttttatcacctgaaatttctagatcttgaacaatggggaagtgatcgttctttgcctaaggacattagccgccttgaaaatctatgccattttgttgtttcggaaaagattgattccaatgttcctgaggtggggaaaatgatcttcttacaagaattgaaagaattccatgttaataaagagagtgttggatttgagctacaagaattgggtaaactagatgagcttggagggaagctcaatatatacgggcttgaaaatgtgagaaccaagaaagaagctaaagaggccaagctgatgtcaaagaggaatttagttgagttgggattaatttggaacatgaaacaagagtccaccgaagatgatatcctagatagtatccaaccacactctaatgttaggagtctttttattgtaaatcatggtggtaccctcggtcctagttggttgtgcagcagcgacaccatatacatgaaaaacttggagactctacatctagagagcgtatcgtgggctaaccttccacctattgggcagttctatcacttaagagagctaaggctgagtaaaattgttggcatatcacagattggacctggcttcttcgatagcacgacagaaaaaagtgtctcacacttgaaggcagttgagtttaatgatatgccagagcttgtcgagtgggttgggggagctaactggaatctgttctcaggaattgaaagaatcaagtgtactaattgtcctaggctgacagggttgctggtttcagattggtctatttcttctatataagacagcactgtatggttccctaatcttcatgacctttacatttatgaatgcccgaagttgtgccttccacccttgcctcacacttcaaaggtatcccgtattcatatgggagacttttcttatgaaggtcgtaccatgttgaaaattaataacccctctagatttgccttcgaaaatctgggtgacctagagacattggtagcttgggatgcactacccttgtcctttatggatcttaaaaagctacattccttgagacgtataaatgtcactagatgtgaggaaacatttttgagaggactggatgatggtgttgtgctacccacagtccaatctctctaccttggacgatttacacctaccaaaaattatttgtcaaaattattcaaatgttttccagcactttcttctttgcatgtgatggcatcaccatcagatgaggacaacgaggaagtggtactgcattttccaccctctagctcgctgagagatgtcaacttcacagggtgtaagaatctgatcctacccatggaggaaggagctggattctgtggcctctcgtcgctcgagtcagtgaccatacacaaatgtgacaggttattctctcgatggtccatcggaggacgagcaactcagactcagagcatcatcaaccctctcccaccctacctgaggaaactcttcctttcttatatggaaactctgcctcaggaagctctgctcatgaatttgacatctcttgagaaactcacactatgtaattgtcttggctgtgagcaaagcaccgagcgaatggctgtactcgcgaatctaacatctcttaccacgctatatttatataattgcagaaatatcacaatggatggattcaatcctcacatcacatccagcctcaagtatctatgcgtgtacaatgagagaaatgatggaactgatccgtattctgtagcagcagatctacttgtagcggtggtgaggaccaaaacaatgcccgacgtttccttcaaactggtgggactttatgtggacaacatctcgggagtgcttgttgctcccatctgcaagctgctctccgctaccctcgagacgttaaacttcagtaatgattggcggacagagaacttcacgaaagagcaggacgaggcgcttcagctcctcacgtctctccaattccttgagttttataactgcagggctctgcagtccctcccccaaggactgcaccgccttccttctctccacggaataactatctatgggcctcaaaacattagatcactgcctaaggagggcctccccgattcactacgaatactacgtataactaactgttgtgctgagatttatgaggcatgccagcaattgaagggaacaaggccagatataaatgtacttgcctccaaagctcgtgtgcaaaattgaatacctgcttctgcatgtcttcacagtcagctctgcttcaacatgcctttcactctacaggtaaatactgtgaaaacatcttcctatacgtgagatagttgatcttcatcgattctacagccaggatgatgtcttattggatgatgtgttggtcatggttggcacaaaattcagtagactatgcttcatcgtaatgttgcacagcgttcaaggcaataaacgagaacaagcatgggatgtggaaaattttagaaagtaaagacaagtgaattcttgacgacgttggcttggcaccttagtttgagtacataatgaaagaacaaccttttagcaaccctggagcatctagaaaatatcagtcatgtaactatcgttaatcatttgaaaaccactggaagacaggagatgtagcaccacaagccattcctttgatcatttgaaaaccattgcggctctttctgattatatcaaccagttgagtggatgaaagaccaaaaaatgctttggaagaagggctcacaattgtggataataaggcatccagtattatagaggaaacaaaggaaattcaaattagacggaaacctgctagtccaagttcttatatgccaaattcatcaatttgcatcctactggagacattgctggcagaggaattgagactggcataggagaactcaatatatgcttgtgaataacgcatccagtgaaagatagtagattttcatcaattcactacccaggatgttgtcgcattggatgagaatgacatggaagacggcgaactagaggaagacaacaacctcatctaagctgaaaatgtgttgcctgtggttgaagaaaatctagcagatgaacaacactgccttccctgtcctctctagacctgaatctctctgatggtttggattcgtccatgattgatcctgtacgatgaaggatcagctcgtccaacgtttttcaaggaacgaactcaatctgaggaattaccttttcattggtcacctggggtactacgaggaatgacttcacgatagacgactcggttttgcgacgcaaaccaaacgccatggttaggctcagatgttggatcagatgattcctcgtggcttcgtgacgcaaaccaaacgacatggctaggctcagatgttggatcgtatgatttctcgtggcttcgtgacgcaaaccaaacagcctgtaagtccgcacaccttatctatcatggtcattgttgagctgatcagtaattggagtcgtgtgataagcttaatggacctcctatttgtcgtgatcttcacagatcaacaagtgagcggcctttgcatgctgcatgagatcaagcaagccgccgactggcaatgctccacctgccattcagttcgttggtgaggtattaatcaccagccatgttggcacttggcggcatgcagatggagcagaacatccaggtgaagcggacagatacatgatcgatcatgagttggcgcagacacaggccagacaaccagaggctatattccaattcatacattccatgataagcaaaggaagatccaagacaacacaaatatacaaatagttagttatacaagcaaaaatcctgttgttttgtgcctcccattttctagtccagaattaatatgacaatttttcactgaaactggttggatcagagaccaggaaaaaaagggaaatgacaactacagctgtgttttttttttcaaagaaggcagctgcccgtcgatgatgtgctcacttgaggatttcctctgccttttcagtgacactgcttcatccttttcagagtcaaatgaatctctacctcatttcactgcacatacttccaaactgatttgctgtaacatacttgagtttcggtatgacattaatttttaactcataagagaacaaaatcagaagaaaaaaaaacaacaaccatgctggactgatcttacaacaacaaccatggatggtggtcttaataaggcctcgtttggcagggctccggcttctctaaaac

SEQ ID NO: 215758 - DNA, 5252 bp, Zea Mays
gaagattgtgcctatatcgattgttctagttttgaggcaaataacatcccacggtctatccgttacctatccatttccatgcaagatcattgtgctcagaatttcgaggaacaaatgggaaaactgaaagaaaagatatacattaacaatttgcggagtttgatgatatttggaaaatacattatgttacatctgctcaatattttaagggacacatttaaggaaataagacgtcttcgtgttctatctatattcatatactcccatagttccttgccaaacaacttttcagagcttcttcatctccgctacttaaaacttttgtcaccttattactcagaaatgtcattgccaaacacggtctcaaggttttatcacctgaaatttctagatcttgaacaatggggaagtgatcgttctttgcctaaggacattagccgccttgaaaatctatgccattttgttgtttcggaaaagattgattccaatgttcctgaggtggggaaaatgatcttcttacaagaattgaaagaattccatgttaataaagagagtgttggatttgagctacaagaattgggtaaactagatgagcttggagggaagctcaatatatacgggcttgaaaatgtgagaaccaagaaagaagctaaagaggccaagctgatgtcaaagaggaatttagttgagttgggattaatttggaacatgaaacaagagtccaccgaagatgatatcctagatagtatccaaccacactctaatgttaggagtctttttattgtaaatcatggtggtaccctcggtcctagttggttgtgcagcagcgacaccatatacatgaaaaacttggagactctacatctagagagcgtatcgtgggctaaccttccacctattgggcagttctatcacttaagagagctaaggctgagtaaaattgttggcatatcacagattggacctggcttcttcgatagcacgacagaaaaaagtgtctcacacttgaaggcagttgagtttaatgatatgccagagcttgtcgagtgggttgggggagctaactggaatctgttctcaggaattgaaagaatcaagtgtactaattgtcctaggctgacagggttgctggtttcagattggtctatttcttctatataagacagcactgtatggttccctaatcttcatgacctttacatttatgaatgcccgaagttgtgccttccacccttgcctcacacttcaaaggtatcccgtattcatatgggagacttttcttatgaaggtcgtaccatgttgaaaattaataacccctctagatttgccttcgaaaatctgggtgacctagagacattggtagcttgggatgcactacccttgtcctttatggatcttaaaaagctacattccttgagacgtataaatgtcactagatgtgaggaaacatttttgagaggactggatgatggtgttgtgctacccacagtccaatctctctaccttggacgatttacacctaccaaaaattatttgtcaaaattattcaaatgttttccagcactttcttctttgcatgtgatggcatcaccatcagatgaggacaacgaggaagtggtactgcattttccaccctctagctcgctgagagatgtcaacttcacagggtgtaagaatctgatcctacccatggaggaaggagctggattctgtggcctctcgtcgctcgagtcagtgaccatacacaaatgtgacaggttattctctcgatggtccatcggaggacgagcaactcagactcagagcatcatcaaccctctcccaccctacctgaggaaactcttcctttcttatatggaaactctgcctcaggaagctctgctcatgaatttgacatctcttgagaaactcacactatgtaattgtcttggctgtgagcaaagcaccgagcgaatggctgtactcgcgaatctaacatctcttaccacgctatatttatataattgcagaaatatcacaatggatggattcaatcctcacatcacatccagcctcaagtatctatgcgtgtacaatgagagaaatgatggaactgatccgtattctgtagcagcagatctacttgtagcggtggtgaggaccaaaacaatgcccgacgtttccttcaaactggtgggactttatgtggacaacatctcgggagtgcttgttgctcccatctgcaagctgctctccgctaccctcgagacgttaaacttcagtaatgattggcggacagagaacttcacgaaagagcaggacgaggcgcttcagctcctcacgtctctccaattccttgagttttataactgcagggctctgcagtccctcccccaaggactgcaccgccttccttctctccacggaataactatctatgggcctcaaaacattagatcactgcctaaggagggcctccccgattcactacgaatactacgtataactaactgttgtgctgagatttatgaggcatgccagcaattgaagggaacaaggccagatataaatgtacttgcctccaaagctcgtgtgcaaaattgaatacctgcttctgcatgtcttcacagtcagctctgcttcaacatgcctttcactctacaggtaaatactgtgaaaacatcttcctatacgtgagatagttgatcttcatcgattctacagccaggatgatgtcttattggatgatgtgttggtcatggttggcacaaaattcagtagctatgcttcatcgtaatgttgcacagcgttcaaggcaataaacgagaacaagcatgggatgtggaaaattttagaaagtaaagacaagtgaattcttgacgacgttggcttggcaccttagtttgagtacataatgaaagaacaaccttttagcaaccctggagcatctagaaaatatcagtcatgtaactatcgttaatcatttgaaaaccactggaagacaggagatgtagcaccacaagccattcctttgatcatttgaaaaccattgcggctctttctgattatatcaaccagttgagtggatgaaagaccaaaaaatgctttggaagaagggctcacaattgtggataataaggcatccagtattatagaggaaacaaaggaaattcaaattagacggaaacctgctagtccaagttcttatatgccaaattcatcagtagatacacatacactctacaccctaatcttctttgttatgacatttattgtttttttcatgaactacgtacatcttaattttcaattcatctagaatactgaataggtgatgattcatcaccaaattgataagtgaatattaatacatctgaaacctaaaattaaatatatattatataagttgttgttaatgttcattccatttttgaacacttgcatgaattttagttctctgtttcttttgaaaaattctgtgttgcaaaaatataaatttatatgaaaatatattatatggtgatgagaagtttgagtttagtatatggtttcatattagctatacattgttggtactatcggcttgttctctttttgtttgaaaaaaatactatcggcttgttcttaaggacacataaaggactagttcggaagcaagagaattagaggagagatggctaaaatccccttcctaattaaataggaagggaatttgagcaccctcaatcccctctaattcccttgctttcaaactagcccaaagagtgtcactgcatcctctgaattatgatatattgaacatggtgttataattgtgaaccgatgagtataacttattttctccatattctgaacaacccattacttaaacagatttgcatcctactggagacattgctggcagaggaattgagactggcataggagaactcaatatatgcttgtgaataacgcatccagtgaaagatagtagattttcatcaattcactacccaggatgttgtcgcattggatgagaatgacatggaagacggcgaactagaggaagacaacaacctcatctaagctgaaaatgtgttgcctgtggttgaagaaaatctagcagatgaacaacactgccttccctgtcctctctagacctgaatctctctgatggtttggattcgtccatgattgatcctgtacgatgaaggatcagctcgtccaacgtttttcaaggaacgaactcaatctgaggaattaccttttcattggtcacctggggtactacgaggaatgacttcacgatagacgactcggttttgcgacgcaaaccaaacgccatggttaggctcagatgttggatcagatgattcctcgtggcttcgtgacgcaaaccaaacgacatggctaggctcagatgttggatcgtatgatttctcgtggcttcgtgacgcaaaccaaacagcctgtaagtccgcacaccttatctatcatggtcattgttgagctgatcagtaattggagtcgtgtgataagcttaatggacctcctatttgtcgtgatcttcacagatcaacaagtgagcggcctttgcatgctgcatgagatcaagcaagccgccgactggcaatgctccacctgccattcagttcgttggtgaggtattaatcaccagccatgttggcacttggcggcatgcagatggagcagaacatccaggtgaagcggacagatacatgatcgatcatgagttggcgcagacacaggccagacaaccagaggctatattccaattcatacattccatgataagcaaaggaagatccaagacaacacaaatatacaaatagttagttatacaagcaaaaatcctgttgttttgtgcctcccattttctagtccagaattaatatgacaatttttcactgaaactggttggatcagagaccaggaaaaaaagggaaatgacaactacagctgtgttttttttttcaaagaaggcagctgcccgtcgatgatgtgctcacttgaggatttcctctgccttttcagtgacactgcttcatccttttcagagtcaaatgaatctctacctcatttcactgcacatacttccaaactgatttgctgtaacatacttgagtttcggtatgacattaatttttaactcataagagaacaaaatcagaagaaaaaaaaacaacaaccatgctggactgatcttacaacaacaaccatggatggtggtcttaataaggcctcgtttggcagggctccggcttctctaaaac

SEQ ID NO: 215759 - DNA, 2520 bp, Zea Mays
aagattgtgcctatatcgattgttctagttttgaggcaaataacatcccacggtctatccgttacctatccatttccatgcaagatcattgtgctcagaatttcgaggaacaaatgggaaaactgaaagaaaagatatacattaacaatttgcggagtttgatgatatttggaaaatacattatgttacatctgctcaatattttaagggacacatttaaggaaataagacgtcttcgtgttctatctatattcatatactcccatagttccttgccaaacaacttttcagagcttcttcatctccgctacttaaaacttttgtcaccttattactcagaaatgtcattgccaaacacggtctcaaggttttatcacctgaaatttctagatcttgaacaatggggaagtgatcgttctttgcctaaggacattagccgccttgaaaatctatgccattttgttgtttcggaaaagattgattccaatgttcctgaggtggggaaaatgatcttcttacaagaattgaaagaattccatgttaataaagagagtgttggatttgagctacaagaattgggtaaactagatgagcttggagggaagctcaatatatacgggcttgaaaatgtgagaaccaagaaagaagctaaagaggccaagctgatgtcaaagaggaatttagttgagttgggattaatttggaacatgaaacaagagtccaccgaagatgatatcctagatagtatccaaccacactctaatgttaggagtctttttattgtaaatcatggtggtaccctcggtcctagttggttgtgcagcagcgacaccatatacatgaaaaacttggagactctacatctagagagcgtatcgtgggctaaccttccacctattgggcagttctatcacttaagagagctaaggctgagtaaaattgttggcatatcacagattggacctggcttcttcgatagcacgacagaaaaaagtgtctcacacttgaaggcagttgagtttaatgatatgccagagcttgtcgagtgggttgggggagctaactggaatctgttctcaggaattgaaagaatcaagtgtactaattgtcctaggctgacagggttgctgttgtgccttccacccttgcctcacacttcaaaggtatcccgtattcatatgggagacttttcttatgaaggtcgtaccatgttgaaaattaataacccctctagatttgccttcgaaaatctgggtgacctagagacattggtagcttgggatgcactacccttgtcctttatggatcttaaaaagctacattccttgagacgtataaatgtcactagatgtgaggaaacatttttgagaggactggatgatggtgttgtgctacccacagtccaatctctctaccttggacgatttacacctaccaaaaattatttgtcaaaattattcaaatgttttccagcactttcttctttgcatgtgatggcatcaccatcagatgaggacaacgaggaagtggtactgcattttccaccctctagctcgctgagagatgtcaacttcacagggtgtaagaatctgatcctacccatggaggaaggagctggattctgtggcctctcgtcgctcgagtcagtgaccatacacaaatgtgacagaaatatcacaatggatggattcaatcctcacatcacatccagcctcaagtatctatgcgtgtacaatgagagaaatgatggaactgatccgtattctgtagcagcagatctacttgtagcggtggtgaggaccaaaacaatgcccgacgtttccttcaaactggtgggactttatgtggacaacatctcgggagtgcttgttgctcccatctgcaagctgctctccgctaccctcgagacgttaaacttcagtaatgattggcggacagagaacttcacgaaagagcaggacgaggcgcttcagctcctcacgtctctccaattccttgagttttataactgcagggctctgcagtccctcccccaaggactgcaccgccttccttctctccacggaataactatctatgggcctcaaaacattagatcactgcctaaggagggcctccccgattcactacgaatactacgtataactaactgttgtgctgagatttatgaggcatgccagcaattgaagggaacaaggccagatataaatgtacttgcctccaaagctcgtgtgcaaaattgaatacctgcttctgcatgtcttcacagtcagctctgcttcaacatgcctttcactctacaggtaaatactgtgaaaacatcttcctatacgtgagatagttgatcttcatcgattctacagccaggatgatgtcttattggatgatgtgttggtcatggttggcacaaaattcagtaggacaacggcagactgcgcatggacgcagccatccaatcaggtggttaatgatctttgaaatctacattccctaagacatatagaggtcaatagatgcgag

SEQ ID NO: 215760 - DNA, 2486 bp, Zea Mays
gtctatttcacatatagaagataacgccactatgcttcatcgtaatgttgcacagcgttcaaggcaataaacgagaacaagcatgggatgtggaaaattttagaaagtaaagacaagtgaattcttgacgacgttggcttggcaccttagtttgagtacataatgaaagaacaaccttttagcaaccctggagcatctagaaaatatcagtcatgtaactatcgttaatcatttgaaaaccactggaagacaggagatgtagcaccacaagccattcctttgatcatttgaaaaccattgcggctctttctgattatatcaaccagaagggctcacaattgtggataataaggcatccagtattatagaggaaacaaaggaaattcaaattagacggaaacctgctagtccaagttcttatatgccaaattcatcagtagatacacatacactctacaccctaatcttctttgttatgacatttattgtttttttcatgaactacgtacatcttaattttcaattcatctagaatactgaataggtgatgattcatcaccaaattgataagtgaatattaatacatctgaaacctaaaattaaatatatattatataagttgttgttaatgttcattccatttttgaacacttgcatgaattttagttctctgtttcttttgaaaaattctgtgttgcaaaaatataaatttatatgaaaatatattatatggtgatgagaagtttgagtttagtatatggtttcatattagctatacattgttggtactatcggcttgttctctttttgtttgaaaaaaatactatcggcttgttcttaaggacacataaaggactagttcggaagcaagagaattagaggagagatggctaaaatccccttcctaattaaataggaagggaatttgagcaccctcaatcccctctaattcccttgctttcaaactagcccaaagagtgtcactgcatcctctgaattatgatatattgaacatggtgttataattgtgaaccgatgagtataacttattttctccatattctgaacaacccattacttaaacagatttgcatcctactggagacattgctggcagaggaattgagactggcataggagaactcaatatatgcttgtgaataacgcatccagtgaaagatagtagattttcatcaattcactacccaggatgttgtcgcattggatgagaatgacatggaagacggcgaactagaggaagacaacaacctcatctaagctgaaaatgtgttgcctgtggttgaagaaaatctagcagatgaacaacactgccttccctgtcctctctagacctgaatctctctgatggtttggattcgtccatgattgatcctgtacgatgaaggatcagctcgtccaacgtttttcaaggaacgaactcaatctgaggaattaccttttcattggtcacctggggtactacgaggaatgacttcacgatagacgactcggttttgcgacgcaaaccaaacgccatggttaggctcagatgttggatcagatgattcctcgtggcttcgtgacgcaaaccaaacgacatggctaggctcagatgttggatcgtatgatttctcgtggcttcgtgacgcaaaccaaacagcctgtaagtccgcacaccttatctatcatggtcattgttgagctgatcagtaattggagtcgtgtgataagcttaatggacctcctatttgtcgtgatcttcacagatcaacaagtgagcggcctttgcatgctgcatgagatcaagcaagccgccgactggcaatgctccacctgccattcagttcgttggtgaggtattaatcaccagccatgttggcacttggcggcatgcagatggagcagaacatccaggtgaagcggacagatacatgatcgatcatgagttggcgcagacacaggccagacaaccagaggctatattccaattcatacattccatgataagcaaaggaagatccaagacaacacaaatatacaaatagttagttatacaagcaaaaatcctgttgttttgtgcctcccattttctagtccagaattaatatgacaatttttcactgaaactggttggatcagagaccaggaaaaaaagggaaatgacaactacagctgtgttttttttttcaaagaaggcagctgcccgtcgatgatgtgctcacttgaggatttcctctgccttttcagtgacactgcttcatccttttcagagtcaaatgaatctctacctcatttcactgcacatacttccaaactgatttgctgtaacatacttgagtttcggtatgacattaatttttaactcataagagaacaaaatcagaagaaaaaaaaacaacaaccatgctggactgatcttacaacaacaaccatggatggtggtcttaataaggcctcgtttggcagggctccggcttctctaaaac

SEQ ID NO: 215761 - DNA, 1884 bp, Zea Mays
gagccatccgccgagattagggattgatgatatcagattggtctatttcacatatagaagataacgcccgttcaaggcaataaacgagaacaagcatgggatgtggaaaattttagaaagtaaagacaagtgaattcttgacgacgttggcttggcaccttagtttgagtacataatgaaagaacaaccttttagcaaccctggagcatctagaaaatatcagtcatgtaactatcgttaatcatttgaaaaccactggaagacaggagatgtagcaccacaagccattcctttgatcatttgaaaaccattgcggctctttctgattatatcaaccagttgagtggatgaaagaccaaaaaatgctttggaagaagggctcacaattgtggataataaggcatccagtattatagaggaaacaaaggaaattcaaattagacggaaacctgctagtccaagttcttatatgccaaattcatcaatttgcatcctactggagacattgctggcagaggaattgagactggcataggagaactcaatatatgcttgtgaataacgcatccagtgaaagatagtagattttcatcaattcactacccaggatgttgtcgcattggatgagaatgacatggaagacggcgaactagaggaagacaacaacctcatctaagctgaaaatgtgttgcctgtggttgaagaaaatctagcagatgaacaacactgccttccctgtcctctctagacctgaatctctctgatggtttggattcgtccatgattgatcctgtacgatgaaggatcagctcgtccaacgtttttcaaggaacgaactcaatctgaggaattaccttttcattggtcacctggggtactacgaggaatgacttcacgatagacgactcggttttgcgacgcaaaccaaacgccatggttaggctcagatgttggatcagatgattcctcgtggcttcgtgacgcaaaccaaacgacatggctaggctcagatgttggatcgtatgatttctcgtggcttcgtgacgcaaaccaaacagcctgtaagtccgcacaccttatctatcatggtcattgttgagctgatcagtaattggagtcgtgtgataagcttaatggacctcctatttgtcgtgatcttcacagatcaacaagtgagcggcctttgcatgctgcatgagatcaagcaagccgccgactggcaatgctccacctgccattcagttcgttggtgaggtattaatcaccagccatgttggcacttggcggcatgcagatggagcagaacatccaggtgaagcggacagatacatgatcgatcatgagttggcgcagacacaggccagacaaccagaggctatattccaattcatacattccatgataagcaaaggaagatccaagacaacacaaatatacaaatagttagttatacaagcaaaaatcctgttgttttgtgcctcccattttctagtccagaattaatatgacaatttttcactgaaactggttggatcagagaccaggaaaaaaagggaaatgacaactacagctgtgttttttttttcaaagaaggcagctgcccgtcgatgatgtgctcacttgaggatttcctctgccttttcagtgacactgcttcatccttttcagagtcaaatgaatctctacctcatttcactgcacatacttccaaactgatttgctgtaacatacttgagtttcggtatgacattaatttttaactcataagagaacaaaatcagaagaaaaaaaaacaacaaccatgctggactgatcttacaacaacaaccatggatggtggtcttaataaggcctcgtttggcagggctccggcttctctaaaac

SEQ ID NO: 215762 - DNA, 1415 bp, Zea Mays
gcctcaacagtttctggatgaaaaggaggctgagatacatcagaaaaagacataggatgacaggattgcgcaggagatccaaaagaagccagaaaaggagggaatggactcagaactggaaaagaacaaaacgatggatggggatgttggtaactcaagatcctatggtgatccagttgcctctgctttaaacagtacaaatttcaatatcgaggaagaaaaggacaatgatttcaagcgcacctcaagaccaaaaaataggttgtaaggatgccacaaaaatgatgcttgttgttaaggagatattcacatgccaaattcaggttgtaaggatgccacaaaaatgaagacctttgttgtagtgacataaggagtttcgaaactgcaaggaattttaaatttgaatatttttcagtgagatgttaaggtagataaagttgttgagttagatgaaacaaaaaaagaggcactgatcgttaagacgacaatacatgatatcatgaaccaaatgattcgggcacatcatttggttcctcagctaaaggaactgggcttaaagctcttgaatttgccctctccatctgtgacagttttgatatgtatggcttcaccgtagacccaggttacaaggaatggacaaggtacttctcagaggtaagaaagggacacactccactacatggtagagcatattatcagatgatggaatgtcttggtctggtgaaaatccattcaccgatgcgaggagatcctggcaggacagtgaggtggctgcctaccaaggctaccatcgaggctgctagagttgcttccgagaagttgttgaagagacctggtgctggaagtgatgatcctctggggacttgcaccatgataaagaagcgcaggaaagggaaggcgccaaacagatctggtctatgagatgctgccatgaagcacctcgaggacatgaaagatgccaccaggtatcccttggagcggaatgcagggggtggttacctctgcatgatcaatgatagatacgaccgcgactgattatggcatcagtgccccctcccccctcccctccacttgagtcgaagaaaggaatgcttgtgataaacttgcagtttgagggaacgaaaaggtcgattctttgatttatgcagctggtgtacaacttttgagtgtagtgaaagttaggtgtaatgttttgagtgtagagaaagctatatgttgtggatggatacgaatggtcaaattgtagcacttttggtgcttataatactaataggtgagcgcctgtacgttgcaacgaagacatataatacacacattttatatataagtcactgtgatattatatgtccccgttgcaacgcacgggcacttacctagttatgatatgaagaatgtaagggggtaggctgccaccc

SEQ ID NO: 215763 - DNA, 1438 bp, Zea Mays
aaatttgacagtgatgctaagaacttaggaaggaccgagtttccagcagatgaagatgctcagtgttggtgaatgtgtaaagatccagctgacagggttcatggaaaagaacacagtgaagttcatgaaggagctctggagccttctcctcagtgcgcagcagaatgccagtggtgtgcctcaacagtttctggatgaaaaggaggctgagatacatcagaaaaagacataggatgacaggattgcgcaggagatccaaaagaagccagaaaaggagggaatggactcagaactggaaaagaacaaaacgatggatggggatgttggtaactcaagatcctatggtgatccagttgcctctgctttaaacagtacaaatttcaatatcgaggaagaaaaggacaatgatttcaagcgcacctcaagaccaaaaaataggttgtaaggatgccacaaaaatgatgcttgttgttaaggagatattcacatgccaaattcaggttgaacttccaataaccaatccaatatacctcatgctaggcacatcatttggttcctcagctaaaggaactgggcttaaagctcttgaatttgccctctccatctgtgacagttttgatatgtatggcttcaccgtagacccaggttacaaggaatggacaaggtacttctcagaggtaagaaagggacacactccactacatggtagagcatattatcagatgatggaatgtcttggtctggtgaaaatccattcaccgatgcgaggagatcctggcaggacagtgaggtggctgcctaccaaggctaccatcgaggctgctagagttgcttccgagaagttgttgaagagacctggtgctggaagtgatgatcctctggggacttgcaccatgataaagaagcgcaggaaagggaaggcgccaaacagatctggtctatgagatgctgccatgaagcacctcgaggacatgaaagatgccaccaggtatcccttggagcggaatgcagggggtggttacctctgcatgatcaatgatagatacgaccgcgactgattatggcatcagtgccccctcccccctcccctccacttgagtcgaagaaaggaatgcttgtgataaacttgcagtttgagggaacgaaaaggtcgattctttgatttatgcagctggtgtacaacttttgagtgtagtgaaagttaggtgtaatgttttgagtgtagagaaagctatatgttgtggatggatacgaatggtcaaattgtagcacttttggtgcttataatactaataggtgagcgcctgtacgttgcaacgaagacatataatacacacattttatatataagtcactgtgatattatatgtccccgttgcaacgcacgggcacttacctagttatgatatgaagaatgtaagggggtaggctgccaccc

SEQ ID NO: 215764 - DNA, 565 bp, Zea Mays
tcaaactgtaggttatatttagctttaagaaatttgaaggccttctacttaacacagacataggatgacaggattgcgcaggagatccaaaagaagccagaaaaggagggaatggactcagaactggaaaagaacaaaacgatggatggggatgttggtaactcaagatcctatggtgatccagttgcctctgctttaaacagtacaaatttcaatatcgaggaagaaaaggacaatgatttcaagcgcacctcaagaccaaaaaataggttcgttatcactttcttgcataatcttgtagggttttactacaacttagatgcatgctttgcattagatgttcttactaggtgcccatatttaggttgtaaggatgccacaaaaatgatgcttgttgttaaggagatattcacatgccaaattcaggttgtaaggatgccacaaaaatgaagacctttgttgtagtgacataaggagtttcgaaactgcaaggaattttaaatttgaatatttttcagtgagatgttaaggtagataaagttgttgagttagatgaaacaaaaaa

SEQ ID NO: 215765 - DNA, 1760 bp, Zea Mays
cacttgaaaaactttttagttctattttggttgtttatcatactttttcagcagcaaaactttgttatttgcagcagcaaatagcaaaactttgttatttgcagcagcaaatagcaaaactttgttatttgcagcagcaagctcaagcagttatcttatgttctgaactttgttatgcacatgaaatttgttcatattttagtttgcaagttattttatttatttaccagttactttcacttgtctaagttgtattggctgtagcagttagcatgcatgagtgttgatatgaacattttaaagatggaacaatcctttttagactaccagcaggcacaagaacttagctttggttctgaactttgttatttgcagcagcaagctcaagcagttatcttatgttctgaactttgttatgcacatgaaatttgttcatattttagtttgcaagttattttatttatttaccagttactttcacttgtctaagttgtattggctgtagcagttagcatgcatgagtgttgatatgaacagagtagttcaatactaggtatagtgactactttcagagagttcatagtatgtttcctttattgcaattccagggagatttgagtaatgcaagttcttcaaatttaagcattcatcagtattatgtatcaagatgttgtatattcacctctccggacttgtgtaaatgtttcttagtcctaatgcactaaggttccttttttgctcttttaaatctgcaaggtggtgtctgtttttattcaacaggaggtctacatggtggtgtctataggtctcgatgtcaagcctggttccactgttaagtgtgagcctggatatcgttttatgctgcacctttcccaggctgctcttggggaatcgaagaagagtgataatgcgctattgccttgatgtatgtcaaaattgatgatcagaaacttgccattggaaccctctctgttgacaagaacccacccatacaatttgatctggttttcgataaagagtttgagctgtcgcacacatcaaaaactaccatcgtcttcttcattggctacaaggttgagcaaccattcaaggaagatggaatggatcttgattctgaagatgaagacgaggagctgaatgttccagtagtcaaggaaaatggcaaagctggtgggaagatacagaaaagtcaagaaaaggcagttccttgaatttttcaaaaagaaagatatttttaataatgacctcggtggaccctatgcatttcttgagaaaagtcaagaaaaggcagttcctgcagcttcaaaatctagtccggcttccaagaagagcaaggatgacgatgattctgatgaggacgagactgatgattctaacgaggacgagacagatgattctgatgagggtgagggtttgtctcctaaagaaggcgatgatgatgatttaagtgatgaagatgataccagtgacgatgaggaggaagacacttcaactcctaagaagcatgaggcaggcaagaagagagctgctgaaagttccatgctgaaaactcctctatctgataagaaagcaaaagttgccacaccgtcagctcagaagacagttcaagttgcgttttctacatggccatggggaccatctgccatcattttctttttgtgatttggtgaaaaaggaaaggatgtgcacctttgcaagcgggtatggagatgagctgcgctattttttttacaaaatgtctgctgggattgaactgtcta

SEQ ID NO: 215766 - DNA, 2009 bp, Zea Mays
cacttgaaaaactttttagttctattttggttgtttatcatactttttcagcagcaaaactttgttatttgcagcagcaaatagcaaaactttgttatttgcagcagcaaatagcaaaactttgttatttgcagcagcaagctcaagcagttatcttatgttctgaactttgttatgcacatgaaatttgttcatattttagtttgcaagttattttatttatttaccagttactttcacttgtctaagttgtattggctgtagcagttagcatgcatgagtgttgatatgaacattttaaagatggaacaatcctttttagactaccagcaggcacaagaacttagctttggttctgaactttgttatttgcagcagcaagctcaagcagttatcttatgttctgaactttgttatgcacatgaaatttgttcatattttagtttgcaagttattttatttatttaccagttactttcacttgtctaagttgtattggctgtagcagttagcatgcatgagtgttgatatgaacagagtagttcaatactaggtatagtgactactttcagagagttcatagtatgtttcctttattgcaattccagggagatttgagtaatgcaagttcttcaaatttaagcattcatcagtattatgtatcaagatgttgtatattcacctctccggacttgtgtaaatgtttcttagtcctaatgcactaaggttccttttttgctcttttaaatctgcaaggtggtgtctgtttttattcaacaggaggtctacatggtggtgtctataggtctcgatgtcaagcctggttccactgttaagtgtgagcctggatatcgttttatgctgcacctttcccaggctgctcttggggaatcgaagaagagtgataatgcgctattgccttgatgtatgtcaaaattgatgatcagaaacttgccattggaaccctctctgttgacaagaacccacccatacaatttgatctggttttcgataaagagtttgagctgtcgcacacatcaaaaactaccatcgtcttcttcattggctacaaggttgagcaaccattcaaggaagatggaatggatcttgattctgaagatgaagacgaggagctgaatgttccagtagtcaaggaaaatggcaaagctggtgggaagatacagaaaagtcaagaaaaggcagttccttgaatttttcaaaaagaaagatatttttaataatgacctcggtggaccctatgcatttcttgagaaaagtcaagaaaaggcagttcctgcagcttcaaaatctagtccggcttccaagaagagcaaggatgacgatgattctgatgaggacgagactgatgattctaacgaggacgagacagatgattctgatgagggtgagggtttgtctcctaaagaaggcgatgatgatgatttaagtgatgaagatgataccagtgacgatgaggaggaagacacttcaactcctaagaagcatgaggcaggcaagaagagagctgctgaaagttccatgctgaaaactcctctatctgataagaaagcaaaagttgccacaccgtcagctcagaagacaggtgtgccattgaacggactaagaaaactgtcgtcgaagattgtataggtgtgactctgttcaaggatagtcttgaggttctagaacagaagagtagtggtgtgcatcagtgtatctgtttacgggataatagtggttggttaggtgtgtgaagaaaaagtttagtgttatggtttgtatgtgatacatattaactatgccttggaatgttcatgtgttgtcctgattgcgtgtggtatctcttgttcagttcaagttgcgttttctacatggccatggggaccatctgccatcattttctttttgtgatttggtgaaaaaggaaaggatgtgcacctttgcaagcgggtatggagatgagctgcgctattttttttacaaaatgtctgctgggattgaactgtcta

SEQ ID NO: 215767 - DNA, 1753 bp, Zea Mays
tgttaattgggtaaacgctgcggacggtctcagcccgccacgcgacaaccgacaatccttcgcagtcccgcaccgcaccgccgcaccgcaccaccgcaccgcggccaaggccaatagcctcgcctagcgctcactcgctcgccccactaccaccgcaccacgcgctcccgtttccgccgatccgagcgcgcagatcgcggaagcccagcggctcagagtccagggggagggagctcgcggcggctgaggaaggcgttcaccaccgtcgcggtgagtgctcccagtcaagcgcctcttccttcgtagtgtcaacaattccgccccgcgcccgcgcggatctgattgtctcgatcgtccaatcgagcggatttcattgaggaagagatggggctctcctttgggaagctgttcagccgcctcttcgccaagaaggagatgaggattctcatggtcgggctcgatgccgccggtaagaccaccatcctctataagctcaagctcggcgagatcgtcaccaccatccccaccattggattcaatgttgaaactgttgagtacaagaacattagcttcaccgtttgggatgttggtggccaggacaagatcaggcccctgtggaggcactactttcagaacacgcagggacttatttttgttgtagacagcaatgatagggaacgtgttgttgaggctagagatgagctccacaggatgctgaatgaggatgagctgcgtgatgccgtgctgcttgtatttgcaaacaaacaagatcttcccaatgctatgaatgctgctgaaattactgacaagcttggtctgcattctcttcgccagcggcactggtacatccagagcacttgtgctacatctggtgaagggttgtatgaggggcttgattggctttccaacaacatcgccaacaagtcttgaagcttttcagcagggctcctagcaagaggaagacgtctgaacaacttatggatgcttttttacattttattacaaagatactccctctgtctcgatttactattccttttgggatagtggttgattcatataatatttgatgtatgtgtttaatagatgtgtctagattcaccatcatctattttaatatggacatagatataaagagctaaaacaaatactattttgaaatggagtgagtacaatctatagtagatagtgtgggtgctgtggagagaaaaaaatctgagctttcttttgagtgtttgctagtgtttaccttcggagatgatatggtaaattatattgacatgctttcgcgtaggtcttcaccgatccagtgctgtggcagctacatttcgttcttagatggttaacgtgtgccaacataaatccaatatgttgcttgtggtacgcaccgttttaaaatagctatggacagaccataattgacatcatcttctgtcgaactagcgttgggcttagttaggacttgggatgtcaatgctagatagctagagctgtatagcatctctaaggggtatttggtttgatgttcgatgaatcatctacatattctttatttatttttatttgggttatgatgtggaataggttgatgcatcaccatctcatatctcatatattagaagataactagcaaagtgtccgttgctacagtttttatttatacttgaggataaagtataaaatataaaaatatgtttgttttattggttatttgagtgtgaatgtaagtttaaagcgaataattgtggttcaa

SEQ ID NO: 215768 - DNA, 1985 bp, Zea Mays
aaatgttaattgggtaaacgctgcggacggtctcagcccgccacgcgacaaccgacaatccttcgcagtcccgcaccgcaccgccgcaccgcaccaccgcaccgcggccaaggccaatagcctcgcctagcgctcactcgctcgccccactaccaccgcaccacgcgctcccgtttccgccgatccgagcgcgcagatcgcggaagcccagcggctcagagtccagggggagggagctcgcggcggctgaggaaggcgttcaccaccgtcgcggatttcattgaggaagagatggggctctcctttgggaagctgttcagccgcctcttcgccaagaaggagatgaggattctcatggtcgggctcgatgccgccggtaagaccaccatcctctataagctcaagctcggcgagatcgtcaccaccatccccaccattggattcaatgttgaaactgttgagtacaagaacattagcttcaccgtttgggatgttggtggccaggacaagatcaggcccctgtggaggcactactttcagaacacgcagggacttatttttgttgtagacagcaatgatagggaacgtgttgttgaggctagagatgagctccacaggatgctgaatgaggatgagctgcgtgatgccgtgctgcttgtatttgcaaacaaacaagatcttcccaatgctatgaatgctgctgaaattactgacaagcttggtctgcattctcttcgccagcggcactggtaagaagttttattttcatacacttttatctccctgtatctgaatcatggttgcttgacattctgatatttgttagtgtatctagttatctacactgcacatatttgcgaggagcgtatctttgaaccacttgttttagtcatcaatcttcatgatgtgacagtatgaattatgcattaatctgcaccgctttaaatactgtgattgagctgaatctttatctccattctgcaactgtcttgtcttgaataattgccaacgtcacaattgcctttgatatttagcagatgtatacatgttaatgtgtctgttccctggttgcaggtacatccagagcacttgtgctacatctggtgaagggttgtatgaggggcttgattggctttccaacaacatcgccaacaagtcttgaagcttttcagcagggctcctagcaagaggaagacgtctgaacaacttatggatgcttttttacattttattacaaagatactccctctgtctcgatttactattccttttgggatagtggttgattcatataatatttgatgtatgtgtttaatagatgtgtctagattcaccatcatctattttaatatggacatagatataaagagctaaaacaaatactattttgaaatggagtgagtacaatctatagtagatagtgtgggtgctgtggagagaaaaaaatctgagctttcttttgagtgtttgctagtgtttaccttcggagatgatatggtaaattatattgacatgctttcgcgtaggtcttcaccgatccagtgctgtggcagctacatttcgttcttagatggttaacgtgtgccaacataaatccaatatgttgcttgtggtacgcaccgttttaaaatagctatggacagaccataattgacatcatcttctgtcgaactagcgttgggcttagttaggacttgggatgtcaatgctagatagctagagctgtatagcatctctaaggggtatttggtttgatgttcgatgaatcatctacatattctttatttatttttatttgggttatgatgtggaataggttgatgcatcaccatctcatatctcatatattagaagataactagcaaagtgtccgttgctacagtttttatttatacttgaggataaagtataaaatataaaaatatgtttgttttattggttatttgagtgtgaatgtaagtttaaagcgaataattgtggttcaa

SEQ ID NO: 215769 - DNA, 1855 bp, Zea Mays
gccgtcctcagatcaaggggagcactatagtaccccttgcacagtgcttccatatttaataattgaaaaatagtaataaagatgaatatagttagataatgatattttattgttatattggaatatagggggtatatagagggaaccggagataaaaaaagtagatacgaaatgctggaattcctggacgcaaaaaaatgttaattgggtaaacgctgcggacggtctcagcccgccacgcgacaaccgacaatccttcgcagtcccgcaccgcaccgccgcaccgcaccaccgcaccgcggccaaggccaatagcctcgcctagcgctcactcgctcgccccactaccaccgcaccacgcgctcccgtttccgccgatccgagcgcgcagatcgcggaagcccagcggctcagagtccagggggagggagctcgcggcggctgaggaaggcgttcaccaccgtcgcggatttcattgaggaagagatggggctctcctttgggaagctgttcagccgcctcttcgccaagaaggagatgaggattctcatggtcgggctcgatgccgccggtaagaccaccatcctctataagctcaagctcggcgagatcgtcaccaccatccccaccattggattcaatgttgaaactgttgagtacaagaacattagcttcaccgtttgggatgttggtggccaggacaagatcaggcccctgtggaggcactactttcagaacacgcagggacttatttttgttgtagacagcaatgatagggaacgtgttgttgaggctagagatgagctccacaggatgctgaatgaggatgagctgcgtgatgccgtgctgcttgtatttgcaaacaaacaagatcttcccaatgctatgaatgctgctgaaattactgacaagcttggtctgcattctcttcgccagcggcactggtacatccagagcacttgtgctacatctggtgaagggttgtatgaggggcttgattggctttccaacaacatcgccaacaagtcttgaagcttttcagcagggctcctagcaagaggaagacgtctgaacaacttatggatgcttttttacattttattacaaagatactccctctgtctcgatttactattccttttgggatagtggttgattcatataatatttgatgtatgtgtttaatagatgtgtctagattcaccatcatctattttaatatggacatagatataaagagctaaaacaaatactattttgaaatggagtgagtacaatctatagtagatagtgtgggtgctgtggagagaaaaaaatctgagctttcttttgagtgtttgctagtgtttaccttcggagatgatatggtaaattatattgacatgctttcgcgtaggtcttcaccgatccagtgctgtggcagctacatttcgttcttagatggttaacgtgtgccaacataaatccaatatgttgcttgtggtacgcaccgttttaaaatagctatggacagaccataattgacatcatcttctgtcgaactagcgttgggcttagttaggacttgggatgtcaatgctagatagctagagctgtatagcatctctaaggggtatttggtttgatgttcgatgaatcatctacatattctttatttatttttatttgggttatgatgtggaataggttgatgcatcaccatctcatatctcatatattagaagataactagcaaagtgtccgttgctacagtttttatttatacttgaggataaagtataaaatataaaaatatgtttgttttattggttatttgagtgtgaatgtaagtttaaagcgaataattgtggttcaa

SEQ ID NO: 215770 - DNA, 959 bp, Zea Mays
tgttaattgggtaaacgctgcggacggtctcagcccgccacgcgacaaccgacaatccttcgcagtcccgcaccgcaccgccgcaccgcaccaccgcaccgcggccaaggccaatagcctcgcctagcgctcactcgctcgccccactaccaccgcaccacgcgctcccgtttccgccgatccgagcgcgcagatcgcggaagcccagcggctcagagtccagggggagggagctcgcggcggctgaggaaggcgttcaccaccgtcgcggtgagtgctcccagtcaagcgcctcttccttcgtagtgtcaacaattccgccccgcgcccgcgcggatctgattgtctcgatcgtccaatcgagcggatttcattgaggaagagatggggctctcctttgggaagctgttcagccgcctcttcgccaagaaggagatgaggattctcatggtcgggctcgatgccgccggtaagaccaccatcctctataagctcaagctcggcgagatcgtcaccaccatccccaccattggattcaatgttgaaactgttgagtacaagaacattagcttcaccgtttgggatgttggtggccaggacaagatcaggcccctgtggaggcactactttcagaacacgcagggacttatttttgttgtagacagcaatgatagggaacgtgttgttgaggctagagatgagctccacaggatgctgaatgaggatgagctgcgtgatgccgtgctgcttgtatttgcaaacaaacaagatcttcccaatgctatgaatgctgctgaaattactgacaagcttggtctgcattctcttcgccagcggcactggtacatccagagcacttgtgctacatctggtgaagggttgtatgaggggcttgattggctttccaacaacatcgccaacaagatgttgaagtgacatacacagaagctctattgttg

SEQ ID NO: 215771 - DNA, 2100 bp, Zea Mays
gttccgtgcattctgttctggaacaagcattaccatactatagttatgatcaatggagtattaaattctctagtcactgattctaatttcctatatatgaaacgcggttcaaaacggcctcgatgagaccatccacgtcgcccttcgattcatcagccgtcggatcacgcttcaacggttcggtgaaacctccctgcctgcactactaatcgacctctgcgatgcttccagacgagccgaaagtgcggtaaagaagggaaaactatgcgtcttcctcccaggctgtagctacggcccattctcttctttcccagatccttccatcctccgtccaatctgctcgtctattctttgacttcccaaggccagaaccggtgacaatgtcgtgagccgccccttctcaagaacgagctggacgccaccccatcgctcaagaaggccattacaaggatggccacagcgctgtggcacaggacgagggaggttgccgctctgttggacgaaattcggacgccgaagaagccttccagacgagccgaaagtgcggtaaagaagggaaaactatgcgtcttcctcccaggctgtagctacggcccattctcttcttccccagatccttccatcctccgtccaatctgctcgtctattctttgacttcccaaggccagaaccggtgacaatgtcgtgagccgccccttctcaagaacgagctgccccttctcaagaacgagctggacgccaccccatcgctcaagaaggccattacaaggatggccacagcgctgtggcacaggacgagggaggttgccgctctgttggacgaaattcggacgccgaagaagcccatagaggagctagcgacggacgtgaagctgatcccgacgccggagaagttggaggagacgctgaaagcgcacggccgtagccggcggcgtaggctgaggcggcgacggtggcgacggatgacctcatgtccgttgaacgagagctcaacattggcatcgagccaccgaggctgggcggaaccctgtcaagcgcaaggcggaggtcaagctgccagagagagtgttctgttggggagaaacaacatggatcagaattttggattcgccaaatccggatgtacccaattgcaacttatcatggccatactaatagaagaacataagaaagaaacaactaacttgatgggaacaggtggtcagataaactggattgcagtggtctctattacgcttcatgtacaaccactaaggcattttatcatgacctgcacacagatcacatacagacttcccacaaagaagtatcgcaaaagaaataagatgaacaaaccttatgttctcctctgatggatattgcatcatagcaaggccccgatgtaaatgtctcccttccatgcttcttttcaggttccagcccgtaacttttgtttgttgcattgagggatctcagttggaggcttggagctcaatttcccccacgtgtcagtaagcggtgaatacacaaatgaatgcaacattagtcttgctttagccagacactgcaggtatcctcaacaggtatcctcaaactggacaaacacttacacaagttgaacaacatatttactcagtgttatggtctgaagaacctataagttcaacaactacaggcagaaatacagtaaagaagcgcacagcaaaagatagaagtggtaactgcacactgtgagatgacagcatgcagcaactccaaccataagtagcctaacatacaattcttggcaagataactgttgtaggaaagacaagcagaaacacaatacagcagggtgcaaaatgacatatatgcagcaacaccaagcataagtagtttcaaggtgttcctggcaagatacttctggaggaaagacaaagcgaaaactcaatacagcagggagcaaaaatacaaaatttgctaacgacgactcatactgaaaatcatgaagactgacaggtgacctaactggatgctctgttatttgcaccggtgcattgaagaagacatcctgccatacaaaggtttttattgaaattcaaagtttataatgcgtgagaatacattatccaaaaatatgac

SEQ ID NO: 215772 - DNA, 1498 bp, Zea Mays
cgcggcctgggcgtgcgaccgagactgcgcgaagggagcgatggagaggctggagagctacctgaaggagcacttcgacgtgccgcccaagaacccctctgaggaggcgcagcggcgatggcggtccgccgttggcgcgctcgtcaagaaccgccgccgccgcttccgcatggtgccggacctccaccgccgcagcctggacgaggcccagcggcggtccacccaggtcatggctcgttctttaccgttggacaagcatacccttgtgacgaacttgcgaggtatgtttcgcgaggtggttgctgtgacaggtgacggcacgaatgatgctccagcgttgcatgaagcagatatcggccttgctatgggcatagcaggaacagaggttgccaaggagagtgctgatgtgatagtgcttgatgacaatttcacaactataataaatgtcgcgaggtggggtcgtgcggtttacataaacatccaaaagttcgtgcagttccagctgactgtcaacattgttgctttggtcatcaacttcgtctcagcatgcattacagggagcgctccgctcacagcggtgcaactgttgtgggtgaatatgattatggatacattaggagctctagctctagcaacggagcctccaaacgatgacatgatgaagagaccacctgtcgggcgaggggaaagcttcatcaccaaggtcatgtggagaaatatcattgggcaaagtttgtaccagttggttgtgctcggagccctcatgtttggcggggaacagtttctgaacatcaagggcgcggattccaaatctgttgtcaatactctcatattcaactccttcgtgttctgccaggtgttcaacgaaataaacagcagagaaatggagaagatcaacgtgttccgcggcatggtcaccaactggatcttcatcgcgatcatagccgcgacggtcctgttccaagtggtgatcgtagagctgctcggcacctttgccagcaccgtcccactcgactggcggctttggctgcttagcgtcggcctcggatcggttagcttggtcgtcggtgccgtcctcaagtgcataccagttgccaaatcgaacggagctcctgcgagtcccaacggctacgccccgctccccagcggtcctgacgacatttagctgaagaagaggggatgcatggagaaaagaagttgcatccgatttttgcgtcttgtttggaataagtaatgaaccactggctaggctcagctttagcagattgttctatatatatatatatatatatattgtcctgcaattacacgatcttcctgtttgctgattgttctatatatgaatgaacgcaatgcaaggcaccattatttccacgagccatggccttaaggaaacgaagttcttggccaactctatggtctcattatataccaaattttgatacacatgagtattttattaggtcatttgttatgtcccactggatatagtatattt

SEQ ID NO: 215773 - DNA, 3369 bp, Zea Mays
agacagagtaggacggcgacctccatgggaggaaggaagcttccaggaagcagccttccgaaattgcaggcagcaccagagggtcaaagcagggaaaaaatccggcttgccctctatgtgcagaaggctgccatgaccttcattgatggtgccaagcacaaagactaccggatcacagaggatatcagaaacgctgggttctccataaacccagacgagctggcatcgatcacaagcaagcacgacgcgaaagccttaaagatgcacggcggggtggacggggtgtcgaagaagatccggtcggcgttggaccatggcatatctgccagcgacctagacacgaggcaaagcatctacggcgtcaaccggtacgcggagaagccttcgagaacgttctggatgtttgtgtgggacgcgttgcaggacatgactctgatcatcctgatggtgtgcgctctgctgtctgctgccgtcggtctggcgtctgaaggctggcccaggggcatgtacgatggcctggggatcatgctcagcatcctgctggttgtcatggtcactgctgtcagtgactacaggcagtcgctccagttcaaggagcttgacaatgagaagaagaagatattcatccatgtgaccagagacggatcccggcagaaggtctctatctatgacttggcggtcggtgacatcgtgcatctgtccatcggagaccaggtgcctgccgacgggctgtacgtgcatggatactcccttttgatcgacgagtccagcttgtcaggcgagagcgagccggtctatgtttctcaggacaagccattcatcttggcggggactaaggttcaggatgggtcagctaagatgatggtgaccgccgtcggcatgcgcaccgagtggggaaggttgatgagcacgctgagcgagggaggagaggacgagacgccgctgcaggtcaagctgaacggagttgcaaccatcattggcaagatcggcctgttgtttgccacattgacatttgttgtcctgatggttaggttcctcattgagaaaggtttgacggttggtctgtccaaatggtactctactgatgcgctgactatagtgaactacttcgcgactgctgtcactattatcgtcgtcgctgttcctgaagggctgcctcttgctgttactctgagccttgcatttgcgatgaagaagctaatgaatgataaggcacttgtccggcacctttcagcgtgtgagactatgggatctgccggaaccatctgcacggataaaacgggaactttgactactaaccatatggtggtcgacaagatatgggcatccgaggtctcaaaatcggttaccgatagcagtagtttggaagatctggcttctgccgtttctccagccacattgagcctgcttctgcaaggaatttttgagaacaccagcgcagaggtagtcaatgagaaggatggcaagcagactgtcttgggaactccgacagagagggcaatatttgagtttggcttgaaactggaaggtcttggtgctgaggataggacctgcaccaaggtcaaggtcgagccgttcaattcggttaagaagaagatggcggtgctggtctcgttgcacgatggcggctcgtaccgctggttcaccaaaggcgcgtcggagatcgttgtggagatgtgcgacatgatgatagatggcgatgggaacagcgtccccttgtcagaagctcagagaaagatcgtcttggatactatcaactcctttgcttcagatgctttgaggacactgtgcttggcgtataaggatgtggatggtctcgaggacgacgacgacgatgcagatagcccaacaagtggtttcactctaatctgcatttttggcatcaaggatcccttgcgcccaggagtcaaggacgctgtggaggcctgtaagtctgctggcatcgtcgtgagaatggtgaccggtgacaacatcaatacagccaaagctatagccaaagagtgtgggatactaactgatggtgacctagcaatagaagggccagaattccgcagcaagagcccagaagagatgagggacataatacctaagattcgggtcatggctcgttctttaccgttggacaagcatacccttgtgacgaacttgcgaggtatgtttcgcgaggtggttgctgtgacaggtgacggcacgaatgatgctccagcgttgcatgaagcagatatcggccttgctatgggcatagcaggaacagaggttgccaaggagagtgctgatgtgatagtgcttgatgacaatttcacaactataataaatgtcgcgaggtggggtcgtgcggtttacataaacatccaaaagttcgtgcagttccagctgactgtcaacattgttgctttggtcatcaacttcgtctcagcatgcattacagggagcgctccgctcacagcggtgcaactgttgtgggtgaatatgattatggatacattaggagctctagctctagcaacggagcctccaaacgatgacatgatgaagagaccacctgtcgggcgaggggaaagcttcatcaccaaggtcatgtggagaaatatcattgggcaaagtttgtaccagttggttgtgctcggagccctcatgtttggcggggaacagtttctgaacatcaagggcgcggattccaaatctgttgtcaatactctcatattcaactccttcgtgttctgccaggtgttcaacgaaataaacagcagagaaatggagaagatcaacgtgttccgcggcatggtcaccaactggatcttcatcgcgatcatagccgcgacggtcctgttccaagtggtgatcgtagagctgctcggcacctttgccagcaccgtcccactcgactggcggctttggctgcttagcgtcggcctcggatcggttagcttggtcgtcggtgccgtcctcaagtgcataccagttgccaaatcgaacggagctcctgcgagtcccaacggctacgccccgctccccagcggtcctgacgacatttagctgaagaagaggggatgcatggagaaaagaagttgcatccgatttttgcgtcttgtttggaataagtaatgaaccactggctaggctcagctttagcagattgttctatatatatatatatatatatattgtcctgcaattacacgatcttcctgtttgctgattgttctatatatgaatgaacgcaatgcaaggcaccattatttccacgagccatggccttaaggaaacgaagttcttggccaactctatggtctcattatataccaaattttgatacacatgagtattttattaggtcatttgttatgtcccactggatatagtatattt

SEQ ID NO: 215774 - DNA, 4941 bp, Zea Mays
gcatggggcgacggtccgacggacacgcagatccgtttgccgcccctgtcctgtccgcctgcactgcccgattctgccgcctgtccacgaggcgaggggcggtaaaaggctgggtgtgtgcctgtgtggggtgtgggtaggggaggcagagattgctgcgcgcgccccggagcagagcgagtgcttgccagttgccattactgttcggtgcggtgaggtagtagagggataaagaaagaagggactggaaggaaggaaggagtgagggagatgccggcttcgcctcgtatggggaggggataagggaaggccgatggcaatgccgccgtttctccctcttcgcgaatagctagtacgcgttcaaagcaactgattggctgttgatcagcaagatggatgggaaaggattgtttgcggagatagggatgaaggaggaggacattgccacaatgctgtctgggaagaaagtttccgagctggcagaggatgcgtttgatggttccaaggaagaaagacagatctttgagggtgtcttctgcctaacaaacgttgatggtggattgaatgatcattatcatggaggcattggacatactgttcatgcagggaaagtggtgacaagttctagaaaaccatcaagctctgccgacaattacaaggcagcacactgtcgcatagtagagtccttcactgctggcaacttatcaagctatcgtgtctcctgtcttggtgccgatgagcaggctcatggagcaatgcattctcctgatgctgtccgtttcaagcttgcagtgcagtggacgcctcctcgccctgatcgggtgtacactcgtagggtggtgactcgcaggagcgagagggcaagaatttgcagtgcgatggatttggagagcatcgacatttgcaatttcagtcgtcagagggatggtcgtggccatggacagctttggaaccatcttcggatgcatgcacatcttctgatggtggatgccgggtggaagattgaggccaaggaaagagacaacaggagtaaagttgatcatgtttatgtggcgccagacaatgtgacacgcctgtattctcttcccagagcatggaaatgctttggccagtggttgcttatgacaacaccctgcgtcaatggaaatgagtcaattgactacggaaaggagtggtcgaacatgcatgaatttctgtatgatctgaagaacacactgctatgcctacagtatgaggtccaacgtacgaagccagcactatctttcctctaccagtggcagctccttgatcctttcatggctgttgtttgcatcgataagaaggttgcagctcttaaagatggagtggcactgaaagctgttaacagcaccgtgacttgcctcaatcgcagtgagtgtaagatgttggatgccaagaattcaaataggtcacttggggtcaactccacaagtaaatatatgaatccatatctcagctcctgcaaaaaaagtcttctgccgcttctctctgaatctgattatcagcctgataaggaagggaatactatgcctaatgaagaagcttctctattttgtacaaacaagactagcgaagatgaagctgatcggcggtcattgtgtatgtcagaaatgaatgaaataggcataagaagcacagctcatcacatagttatgggtttacatgatgcaacagcttttcatggctcaagccaaacttgttcggggaggaaaagaaaatttccgtgcatcaagtctaaagaggataatcaaactgaagacaagtctgacccattattctttccacccagctattcatccacattaagtcatctggttgaaaatgttcaaataaatgatgttagccctcatggctatgaaaccacggagattccaaacatgggcaatcgtacagatattcttgataagatgtacctaggagagaatttattgtttgcccccgaaactggtaatatgctacttgaaactacagatgatatcaacaatgaacagcatgatgatgcagctgtctctgagccccaatcggcagataatgatggaagtggaccttctggtgcatcatcactaccaccagagaaagatgcatacatgggatctaaagaggattctattaacgactatcatgatccttcagttgtctctgagttccaaattgctaataatgatgcaaaatgtgaaccttctattgcattcttgccagaaaaggataaagatttggaagctaataaaacgagcttggaaggtccagcaaaaacaggccaattgtcatctgaagctagtggcagcactttgatgatctcagagccacaagtattgtttgtgtccccacaagatgggactctgtctttcatgaacaataatacgaacaaccaagagatgtggaggttcctgaatgtttcccctgataccatggataccgaaatgcagatggactctaattcattggtttacgaggcaagcttgattcagggtttcttgtaccttgacaatgagggttctccaatttgttggacagtgatgaacccggaacctcctaggcgcttgatatgtgctactgctctggaaccaaactcaaagctgtcgaaacagtatgttgaaatgaggttggagaatgatgcatcaacgtctgaacacaagaagggaggaaaattgtctgataaggctgcagatatccaagacaatgttcctgttcctttgaatctagtgcttgagaacaaaaatgacaaggaccaaggtgagcaaagcagtgaaacttcagaacaacttatgtccaaagaaccacaaaaaagggacatcaaaaggcaaaagagaacatggtctcatacatgcaagtttgatgatgatgaccttctgatgacagctgtaatatataagctgacagcacgttacaggaactcttttcatcggaagctcagaaataaattcggtttcaggcgtcttccaacataccactgggagaatgaagataaaggtgacaggaagaagtttcctggagaagcaaggacggtgttgaacaagttacttgaaatgggcattgttgctagagtggatattcttcaatgtcatggtccaggaggcaaaaatgtgttgaaggatgggaacataactgcgagtggcattcaatgccagtgctgtggcaaatcttacagtctttgtcagcttcaagcatggtctatagagcagaaggtgaggaaagagcatgcaaaggatacaatgtcccttcaagcagaccaaaacgatgatacctgtggatcatgtggcgatggtggtgaactgatatgctgtgacaattgtcctgctagttaccatcaagcctgcttgtcttgccaggatattccagatggcaactggtactgctctagctgcctttgcgacatttgtggtgaagtaatcgattcaaaggagcttgtaacttcccttcctgctttagattgctcacagtgcgaacgccaataccatgtaaaatgtgtatctgccaaagttccgtgcaatgaggatggatctggtacctggttttgtggaagaaaatgtcacgagatctatatgaccttccgttctcgtgttggagtgcctgatcacatggacgatgatctgtgtttcaccgttcttcgtaacaacggtgataagaaggttcgcacggcagaggagattgctctcatggctgaatgcaacatgaaactcatgatcgccacgagtatcatggaagagtgtttcctgcctattctagatcccaggacagggatagacattattccctccatattgtataactggaggtctgatttacatttcaattacaaggggttctatacagtagtcttggaaagtgatgatagcatggtatctgttgcctccataaggttgcatggtgcaattttagcagagatgcctctggtagcaacttctaaagagaatcgtcagcaggggatgtgcaggcgcctcatggattacattgaggagatgctgaaatccctgaaggtggagatgctgctcctatcagcaatcccgcacctggcggagacatggacatcgacatttgggttcagagagatagatgagtcggacaagaagaggctgagtaaggtgaggctggccgcagttccggggaccgtcctactgaagaaggacctgctgtgtgaatgttcaggcgcggacgccggtgagccgccgagccctaagcccttccaagtttactcgcgcgtgccgagaggccgcaccggtttggatgcagtgtgccaataaagatgacgcagtggatcgaatgcgccgcggtcagtcgtcgtcgtcggtgacagggggcagctggtggtcgtcacggggcctcgtctccggttgctgaagccgaggccgagcacatcagcacgcgccggtttgtgtggtggaaatggaaagcctcgttgctctggtaggagctctgaagatcgctgtcgtctgcttgtagtctgtaaatagcttctccgtcggcgagaagcccagggtccacggccattgtagaaccgaacctgtatgataaaactagaccgtgttggcgccccaccagcgtttagtagtttccgttgccctttgaactcaaagtttcaggctagtccattgtgttcgtttcagaagcctgcggttttcagggggaggggaggtgccagaaagggaggacataacgcacgtgcagaccgagtattatgtggtggtgtcgtagacacgcacgagttgacgaagctataggagcagctcgtgatgagcaatggttggtgcagatgatgatgtcaatgagctcctcccgcagggaccggacctgtggacacggatggagctgaacttgtttgaaggatgcgtagtactaataatatatgcagtcaagccagcctgaacttatttgaatgaggtgtagtactaataatatatgcagccaagccagcctgacactttc

SEQ ID NO: 215775 - DNA, 5185 bp, Zea Mays
cactgcccgattctgccgcctgtccacgaggcgaggggcggtaaaaggctgggtgtgtgcctgtgtggggtgtgggtaggggaggcagagattgctgcgcgcgccccggagcagagcgagtgcttgccagttgccattactgttcggtgcggtgaggtagtagagggataaagaaagaagggactggaaggaaggaaggagtgagggagatgccggcttcgcctcgtatggggaggggataagggaaggccgatggcaatgccgccgtttctccctcttcgcgaatagctagtacgcgttcaaagcaactgattggctgttgatcagcaagatggatgggaaaggattgtttgcggagatagggatgaaggaggaggacattgccacaatgctgtctgggaagaaagtttccgagctggcagaggatgcgtttgatggttccaaggaagaaagacagatctttgagggtgtcttctgcctaacaaacgttgatggtggattgaatgatcattatcatggaggcattggacatactgttcatgcagggaaagtggtgacaagttctagaaaaccatcaagctctgccgacaattacaaggcagcacactgtcgcatagtagagtccttcactgctggcaacttatcaagctatcgtgtctcctgtcttggtgccgatgagcaggctcatggagcaatgcattctcctgatgctgtccgtttcaagcttgcagtgcagtggacgcctcctcgccctgatcgggtgtacactcgtagggtggtgactcgcaggagcgagagggcaagaatttgcagtgcgatggatttggagagcatcgacatttgcaatttcagtcgtcagagggatggtcgtggccatggacagctttggaaccatcttcggatgcatgcacatcttctgatggtggatgccgggtggaagattgaggccaaggaaagagacaacaggagtaaagttgatcatgtttatgtggcgccagacaatgtgacacgcctgtattctcttcccagagcatggaaatgctttggccagtggttgcttatgacaacaccctgcgtcaatggaaatgagtcaattgactacggaaaggagtggtcgaacatgcatgaatttctgtatgatctgaagaacacactgctatgcctacagtatgaggtccaacgtacgaagccagcactatctttcctctaccagtggcagctccttgatcctttcatggctgttgtttgcatcgataagaaggttgcagctcttaaagatggagtggcactgaaagctgttaacagcaccgtgacttgcctcaatcgcagtgagtgtaagatgttggatgccaagaattcaaataggtcacttggggtcaactccacaagtaaatatatgaatccatatctcagctcctgcaaaaaaagtcttctgccgcttctctctgaatctgattatcagcctgataaggaagggaatactatgcctaatgaagaagcttctctattttgtacaaacaagactagcgaagatgaagctgatcggcggtcattgtgtatgtcagaaatgaatgaaataggcataagaagcacagctcatcacatagttatgggtttacatgatgcaacagcttttcatggctcaagccaaacttgttcggggaggaaaagaaaatttccgtgcatcaagtctaaagaggataatcaaactgaagacaagtctgacccattattctttccacccagctattcatccacattaagtcatctggttgaaaatgttcaaataaatgatgttagccctcatggctatgaaaccacggagattccaaacatgggcaatcgtacagatattcttgataagatgtacctaggagagaatttattgtttgcccccgaaactggtaatatgctacttgaaactacagatgatatcaacaatgaacagcatgatgatgcagctgtctctgagccccaatcggcagataatgatggaagtggaccttctggtgcatcatcactaccaccagagaaagatgcatacatgggatctaaagaggattctattaacgactatcatgatccttcagttgtctctgagttccaaattgctaataatgatgcaaaatgtgaaccttctattgcattcttgccagaaaaggataaagatttggaagctaataaaacgagcttggaaggtccagcaaaaacaggccaattgtcatctgaagctagtggcagcactttgatgatctcagagccacaagtattgtttgtgtccccacaagatgggactctgtctttcatgaacaataatacgaacaaccaagagatgtggaggttcctgaatgtttcccctgataccatggataccgaaatgcagatggactctaattcattggtttacgaggcaagcttgattcagggtttcttgtaccttgacaatgagggttctccaatttgttggacagtgatgaacccggaacctcctaggcgcttgatatgtgctactgctctggaaccaaactcaaagctgtcgaaacagtatgttgaaatgaggttggagaatgatgcatcaacgtctgaacacaagaagggaggaaaattgtctgataaggctgcagatatccaagacaatgtcagtagaaaaaaacagaaagcaaacattgcttctttaaataattgcgtaagtatggacaatttaactgtcaatcctattgatcctgtagttctcaatgagggagagcagacaggtacagcaatcactgagcaggttcctgttcctttgaatctagtgcttgagaacaaaaatgacaaggaccaaggtgagcaaagcagtgaaacttcagaacaacttatgtccaaagaaccacaaaaaagggacatcaaaaggcaaaagagaacatggtctcatacatgcaagtttgatgatgatgaccttctgatgacagctgtaatatataagctgacagcacgttacaggaactcttttcatcggaagctcagaaataaattcggtttcaggcgtcttccaacataccactgggagaatgaagataaaggtgacaggaagaagtttcctggagaagcaaggacggtgttgaacaagttacttgaaatgggcattgttgctagagtggatattcttcaatgtcatggtccaggaggcaaaaatgtgttgaaggatgggaacataactgcgagtggcattcaatgccagtgctgtggtaccacattcacaatgtccaagtttaagtgtcatgcaggtctcaggcaagaagtcccatctctgaatcttttcttggatacaggcaaatcttacagtctttgtcagcttcaagcatggtctatagagcagaaggtgaggaaagagcatgcaaaggatacaatgtcccttcaagcagaccaaaacgatgatacctgtggatcatgtggcgatggtggtgaactgatatgctgtgacaattgtcctgctagttaccatcaagcctgcttgtcttgccagtttgcgcaaagaaagagggactccaagaatgccggtgctgctgcccgcccaccccctcgtggatcgagctttttaaacttcccatggatattccagatggcaactggtactgctctagctgcctttgcgacatttgtggtgaagtaatcgattcaaaggagcttgtaacttcccttcctgctttagattgctcacagtgcgaacgccaataccatgtaaaatgtgtatctgccaaagttccgtgcaatgaggatggatctggtacctggttttgtggaagaaaatgtcacgagatctatatgaccttccgttctcgtgttggagtgcctgatcacatggacgatgatctgtgtttcaccgttcttcgtaacaacggtgataagaaggttcgcacggcagaggagattgctctcatggctgaatgcaacatgaaactcatgatcgccacgagtatcatggaagagtgtttcctgcctattctagatcccaggacagggatagacattattccctccatattgtataactggaggtctgatttacatttcaattacaaggggttctatacagtagtcttggaaagtgatgatagcatggtatctgttgcctccataaggttgcatggtgcaattttagcagagatgcctctggtagcaacttctaaagagaatcgtcagcaggggatgtgcaggcgcctcatggattacattgaggagatgctgaaatccctgaaggtggagatgctgctcctatcagcaatcccgcacctggcggagacatggacatcgacatttgggttcagagagatagatgagtcggacaagaagaggctgagtaaggtgaggctggccgcagttccggggaccgtcctactgaagaaggacctgctgtgtgaatgttcaggcgcggacgccggtgagccgccgagccctaagcccttccaagtttactcgcgcgtgccgagaggccgcaccggtttggatgcagtgtgccaataaagatgacgcagtggatcgaatgcgccgcggtcagtcgtcgtcgtcggtgacagggggcagctggtggtcgtcacggggcctcgtctccggttgctgaagccgaggccgagcacatcagcacgcgccggtttgtgtggtggaaatggaaagcctcgttgctctggtaggagctctgaagatcgctgtcgtctgcttgtagtctgtaaatagcttctccgtcggcgagaagcccagggtccacggccattgtagaaccgaacctgtatgataaaactagaccgtgttggcgccccaccagcgtttagtagtttccgttgccctttgaactcaaagtttcaggctagtccattgtgttcgtttcagaagcctgcggttttcagggggaggggaggtgccagaaagggaggacataacgcacgtgcagaccgagtattatgtggtggtgtcgtagacacgcacgagttgacgaagctataggagcagctcgtgatgagcaatggttggtgcagatgatgatgtcaatgagctcctcccgcagggaccggacctgtggacacggatggagctgaacttgtttgaaggatgcgtagtactaataatatatgcagtcaagccagcctgaacttatttgaatgaggtgtagtactaataatatatgcagccaagccagcctgacactttc

SEQ ID NO: 215776 - DNA, 4922 bp, Zea Mays
tgtgtgcctgtgtggggtgtgggtaggggaggcagagattgctgcgcgcgccccggagcagagcgagtgcttgccagttgccattactgttcggtgcggtgaggtagtagagggataaagaaagaagggactggaaggaaggaaggagtgagggagatgccggcttcgcctcgtatggggaggggataagggaaggccgatggcaatgccgccgtttctccctcttcgcgaatagctagtacgcgttcaaagcaactgattggctgttgatcagcaagatggatgggaaaggattgtttgcggagatagggatgaaggaggaggacattgccacaatgctgtctgggaagaaagtttccgagctggcagaggatgcgtttgatggttccaaggaagaaagacagatctttgagggtgtcttctgcctaacaaacgttgatggtggattgaatgatcattatcatggaggcattggacatactgttcatgcagggaaagtggtgacaagttctagaaaaccatcaagctctgccgacaattacaaggcagcacactgtcgcatagtagagtccttcactgctggcaacttatcaagctatcgtgtctcctgtcttggtgccgatgagcaggctcatggagcaatgcattctcctgatgctgtccgtttcaagcttgcagtgcagtggacgcctcctcgccctgatcgggtgtacactcgtagggtggtgactcgcaggagcgagagggcaagaatttgcagtgcgatggatttggagagcatcgacatttgcaatttcagtcgtcagagggatggtcgtggccatggacagctttggaaccatcttcggatgcatgcacatcttctgatggtggatgccgggtggaagattgaggccaaggaaagagacaacaggagtaaagttgatcatgtttatgtggcgccagacaatgtgacacgcctgtattctcttcccagagcatggaaatgctttggccagtggttgcttatgacaacaccctgcgtcaatggaaatgagtcaattgactacggaaaggagtggtcgaacatgcatgaatttctgtatgatctgaagaacacactgctatgcctacagtatgaggtccaacgtacgaagccagcactatctttcctctaccagtggcagctccttgatcctttcatggctgttgtttgcatcgataagaaggttgcagctcttaaagatggagtggcactgaaagctgttaacagcaccgtgacttgcctcaatcgcagtgagtgtaagatgttggatgccaagaattcaaataggtcacttggggtcaactccacaagtaaatatatgaatccatatctcagctcctgcaaaaaaagtcttctgccgcttctctctgaatctgattatcagcctgataaggaagggaatactatgcctaatgaagaagcttctctattttgtacaaacaagactagcgaagatgaagctgatcggcggtcattgtgtatgtcagaaatgaatgaaataggcataagaagcacagctcatcacatagttatgggtttacatgatgcaacagcttttcatggctcaagccaaacttgttcggggaggaaaagaaaatttccgtgcatcaagtctaaagaggataatcaaactgaagacaagtctgacccattattctttccacccagctattcatccacattaagtcatctggttgaaaatgttcaaataaatgatgttagccctcatggctatgaaaccacggagattccaaacatgggcaatcgtacagatattcttgataagatgtacctaggagagaatttattgtttgcccccgaaactggtaatatgctacttgaaactacagatgatatcaacaatgaacagcatgatgatgcagctgtctctgagccccaatcggcagataatgatggaagtggaccttctggtgcatcatcactaccaccagagaaagatgcatacatgggatctaaagaggattctattaacgactatcatgatccttcagttgtctctgagttccaaattgctaataatgatgcaaaatgtgaaccttctattgcattcttgccagaaaaggataaagatttggaagctaataaaacgagcttggaaggtccagcaaaaacaggccaattgtcatctgaagctagtggcagcactttgatgatctcagagccacaagtattgtttgtgtccccacaagatgggactctgtctttcatgaacaataatacgaacaaccaagagatgtggaggttcctgaatgtttcccctgataccatggataccgaaatgcagatggactctaattcattggtttacgaggcaagcttgattcagggtttcttgtaccttgacaatgagggttctccaatttgttggacagtgatgaacccggaacctcctaggcgcttgatatgtgctactgctctggaaccaaactcaaagctgtcgaaacagtatgttgaaatgaggttggagaatgatgcatcaacgtctgaacacaagaagggaggaaaattgtctgataaggctgcagatatccaagacaatgtcagtagaaaaaaacagaaagcaaacattgcttctttaaataattgcgtaagtatggacaatttaactgtcaatcctattgatcctgtagttctcaatgagggagagcagacaggtacagcaatcactgagcaggttcctgttcctttgaatctagtgcttgagaacaaaaatgacaaggaccaaggtgagcaaagcagtgaaacttcagaacaacttatgtccaaagaaccacaaaaaagggacatcaaaaggcaaaagagaacatggtctcatacatgcaagtttgatgatgatgaccttctgatgacagctgtaatatataagctgacagcacgttacaggaactcttttcatcggaagctcagaaataaattcggtttcaggcgtcttccaacataccactgggagaatgaagataaaggtgacaggaagaagtttcctggagaagcaaggacggtgttgaacaagttacttgaaatgggcattgttgctagagtggatattcttcaatgtcatggtccaggaggcaaaaatgtgttgaaggatgggaacataactgcgagtggcattcaatgccagtgctgtggtaccacattcacaatgtccaagtttaagtgtcatgcaggtctcaggcaagaagtcccatctctgaatcttttcttggatacaggcaaatcttacagtctttgtcagcttcaagcatggtctatagagcagaaggtgaggaaagagcatgcaaaggatacaatgtcccttcaagcagaccaaaacgatgatacctgtggatcatgtggcgatggtggtgaactgatatgctgtgacaattgtcctgctagttaccatcaagcctgcttgtcttgccagaccatgtaaaatgtgtatctgccaaagttccgtgcaatgaggatggatctggtacctggttttgtggaagaaaatgtcacgagatctatatgaccttccgttctcgtgttggagtgcctgatcacatggacgatgatctgtgtttcaccgttcttcgtaacaacggtgataagaaggttcgcacggcagaggagattgctctcatggctgaatgcaacatgaaactcatgatcgccacgagtatcatggaagagtgtttcctgcctattctagatcccaggacagggatagacattattccctccatattgtataactggaggtctgatttacatttcaattacaaggggttctatacagtagtcttggaaagtgatgatagcatggtatctgttgcctccataaggttgcatggtgcaattttagcagagatgcctctggtagcaacttctaaagagaatcgtcagcaggggatgtgcaggcgcctcatggattacattgaggagatgctgaaatccctgaaggtggagatgctgctcctatcagcaatcccgcacctggcggagacatggacatcgacatttgggttcagagagatagatgagtcggacaagaagaggctgagtaaggtgaggctggccgcagttccggggaccgtcctactgaagaaggacctgctgtgtgaatgttcaggcgcggacgccggtgagccgccgagccctaagcccttccaagtttactcgcgcgtgccgagaggccgcaccggtttggatgcagtgtgccaataaagatgacgcagtggatcgaatgcgccgcggtcagtcgtcgtcgtcggtgacagggggcagctggtggtcgtcacggggcctcgtctccggttgctgaagccgaggccgagcacatcagcacgcgccggtttgtgtggtggaaatggaaagcctcgttgctctggtaggagctctgaagatcgctgtcgtctgcttgtagtctgtaaatagcttctccgtcggcgagaagcccagggtccacggccattgtagaaccgaacctgtatgataaaactagaccgtgttggcgccccaccagcgtttagtagtttccgttgccctttgaactcaaagtttcaggctagtccattgtgttcgtttcagaagcctgcggttttcagggggaggggaggtgccagaaagggaggacataacgcacgtgcagaccgagtattatgtggtggtgtcgtagacacgcacgagttgacgaagctataggagcagctcgtgatgagcaatggttggtgcagatgatgatgtcaatgagctcctcccgcagggaccggacctgtggacacggatggagctgaacttgtttgaaggatgcgtagtactaataatatatgcagtcaagccagcctgaacttatttgaatgaggtgtagtactaataatatatgcagccaagccagcctgacactttc

SEQ ID NO: 215777 - DNA, 3902 bp, Zea Mays
ggaggcagagattgctgcgcgcgccccggagcagagcgagtgcttgccagttgccattactgttcggtgcggtgaggtagtagagggataaagaaagaagggactggaaggaaggaaggagtgagggagatgccggcttcgcctcgtatggggaggggataagggaaggccgatggcaatgccgccgtttctccctcttcgcgaatagctagtacgcgttcaaagcaactgattggctgttgatcagcaagatggatgggaaaggattgtttgcggagatagggatgaaggaggaggacattgccacaatgctgtctgggaagaaagtttccgagctggcagaggatgcgtttgatggttccaaggaagaaagacagatctttgagggtgtcttctgcctaacaaacgttgatggtggattgaatgatcattatcatggaggcattggacatactgttcatgcagggaaagtggtgacaagttctagaaaaccatcaagctctgccgacaattacaaggcagcacactgtcgcatagtagagtccttcactgctggcaacttatcaagctatcgtgtctcctgtcttggtgccgatgagcaggctcatggagcaatgcattctcctgatgctgtccgtttcaagcttgcagtgcagtggacgcctcctcgccctgatcgggtgtacactcgtagggtggtgactcgcaggagcgagagggcaagaatttgcagtgcgatggatttggagagcatcgacatttgcaatttcagtcgtcagagggatggtcgtggccatggacagctttggaaccatcttcggatgcatgcacatcttctgatggtggatgccgggtggaagattgaggccaaggaaagagacaacaggagtaaagttgatcatgtttatgtggcgccagacaatgtgacacgcctgtattctcttcccagagcatggaaatgctttggccagtggttgcttatgacaacaccctgcgtcaatggaaatgagtcaattgactacggaaaggagtggtcgaacatgcatgaatttctgtatgatctgaagaacacactgctatgcctacagtatgaggtccaacgtacgaagccagcactatctttcctctaccagtggcagctccttgatcctttcatggctgttgtttgcatcgataagaaggttgcagctcttaaagatggagtggcactgaaagctgttaacagcaccgtgacttgcctcaatcgcagtgagtgtaagatgttggatgccaagaattcaaataggtcacttggggtcaactccacaagtaaatatatgaatccatatctcagctcctgcaaaaaaagtcttctgccgcttctctctgaatctgattatcagcctgataaggaagggaatactatgcctaatgaagaagcttctctattttgtacaaacaagactagcgaagatgaagctgatcggcggtcattgtgtatgtcagaaatgaatgaaataggcataagaagcacagctcatcacatagttatgggtttacatgatgcaacagcttttcatggctcaagccaaacttgttcggggaggaaaagaaaatttccgtgcatcaagtctaaagaggataatcaaactgaagacaagtctgacccattattctttccacccagctattcatccacattaagtcatctggttgaaaatgttcaaataaatgatgttagccctcatggctatgaaaccacggagattccaaacatgggcaatcgtacagatattcttgataagatgtacctaggagagaatttattgtttgcccccgaaactggtaatatgctacttgaaactacagatgatatcaacaatgaacagcatgatgatgcagctgtctctgagccccaatcggcagataatgatggaagtggaccttctggtgcatcatcactaccaccagagaaagatgcatacatgggatctaaagaggattctattaacgactatcatgatccttcagttgtctctgagttccaaattgctaataatgatgcaaaatgtgaaccttctattgcattcttgccagaaaaggataaagatttggaagctaataaaacgagcttggaaggtccagcaaaaacaggccaattgtcatctgaagctagtggcagcactttgatgatctcagagccacaagtattgtttgtgtccccacaagatgggactctgtctttcatgaacaataatacgaacaaccaagagatgtggaggttcctgaatgtttcccctgataccatggataccgaaatgcagatggactctaattcattggtttacgaggcaagcttgattcagggtttcttgtaccttgacaatgagggttctccaatttgttggacagtgatgaacccggaacctcctaggcgcttgatatgtgctactgctctggaaccaaactcaaagctgtcgaaacagtatgttgaaatgaggttggagaatgatgcatcaacgtctgaacacaagaagggaggaaaattgtctgataaggctgcagatatccaagacaatgtcagtagaaaaaaacagaaagcaaacattgcttctttaaataattgcgtaagtatggacaatttaactgtcaatcctattgatcctgtagttctcaatgagggagagcagacaggtacagcaatcactgagcaggttcctgttcctttgaatctagtgcttgagaacaaaaatgacaaggaccaaggtgagcaaagcagtgaaacttcagaacaacttatgtccaaagaaccacaaaaaagggacatcaaaaggcaaaagagaacatggtctcatacatgcaagtttgatgatgatgaccttctgatgacagctgtaatatataagctgacagcacgttacaggaactcttttcatcggaagctcagaaataaattcggtttcaggcgtcttccaacataccactgggagaatgaagataaaggtgacaggaagaagtttcctggagaagcaaggacggtgttgaacaagttacttgaaatgggcattgttgctagagtggatattcttcaatgtcatggtccaggaggcaaaaatgtgttgaaggatgggaacataactgcgagtggcattcaatgccagtgctgtggtaccacattcacaatgtccaagtttaagtgtcatgcaggtctcaggcaagaagtcccatctctgaatcttttcttggatacaggcaaatcttacagtctttgtcagcttcaagcatggtctatagagcagaaggtgaggaaagagcatgcaaaggatacaatgtcccttcaagcagaccaaaacgatgatacctgtggatcatgtggcgatggtggtgaactgatatgctgtgacaattgtcctgctagttaccatcaagcctgcttgtcttgccaggatattccagatggcaactggtactgctctagctgcctttgcgacatttgtggtgaagtaatcgattcaaaggagcttgtaacttcccttcctgctttagattgctcacagtgcgaacgccaataccatgtaaaatgtgtatctgccaaagttccgtgcaatgaggatggatctggtacctggttttgtggaagaaaatgtcacgagatctatatgaccttccgttctcgtgttggagtgcctgatcacatggacgatgatctgtgtttcaccgttcttcgtaacaacggtgataagaaggttcgcacggcagaggagattgctctcatggctgaatgcaacatgaaactcatgatcgccacgagtatcatggaagagtgtttcctgcctattctagatcccaggacagggatagacattattccctccatattgtataactggaggttggttttcttttgtcgttttggccattcg

SEQ ID NO: 215778 - DNA, 5021 bp, Zea Mays
ggaggcagagattgctgcgcgcgccccggagcagagcgagtgcttgccagttgccattactgttcggtgcggtgaggtagtagagggataaagaaagaagggactggaaggaaggaaggagtgagggagatgccggcttcgcctcgtatggggaggggataagggaaggccgatggcaatgccgccgtttctccctcttcgcgagaatagctagtacgcgttcaaagcaactgattggctgttgatcagcaagatggatgggaaaggattgtttgcggagatagggatgaaggaggaggacattgccacaatgctgtctgggaagaaagtttccgagctggcagaggatgcgtttgatggttccaaggaagaaagacagatctttgagggtgtcttctgcctaacaaacgttgatggtggattgaatgatcattatcatggaggcattggacatactgttcatgcagggaaagtggtgacaagttctagaaaaccatcaagctctgccgacaattacaaggcagcacactgtcgcatagtagagtccttcactgctggcaacttatcaagctatcgtgtctcctgtcttggtgccgatgagcaggctcatggagcaatgcattctcctgatgctgtccgtttcaagcttgcagtgcagtggacgcctcctcgccctgatcgggtgtacactcgtagggtggtgactcgcaggagcgagagggcaagaatttgcagtgcgatggatttggagagcatcgacatttgcaatttcagtcgtcagagggatggtcgtggccatggacagctttggaaccatcttcggatgcatgcacatcttctgatggtggatgccgggtggaagattgaggccaaggaaagagacaacaggagtaaagttgatcatgtttatgtggcgccagacaatgtgacacgcctgtattctcttcccagagcatggaaatgctttggccagtggttgcttatgacaacaccctgcgtcaatggaaatgagtcaattgactacggaaaggagtggtcgaacatgcatgaatttctgtatgatctgaagaacacactgctatgcctacagtatgaggtccaacgtacgaagccagcactatctttcctctaccagtggcagctccttgatcctttcatggctgttgtttgcatcgataagaaggttgcagctcttaaagatggagtggcactgaaagctgttaacagcaccgtgacttgcctcaatcgcagtgagtgtaagatgttggatgccaagaattcaaataggtcacttggggtcaactccacaagtaaatatatgaatccatatctcagctcctgcaaaaaaagtcttctgccgcttctctctgaatctgattatcagcctgataaggaagggaatactatgcctaatgaagaagcttctctattttgtacaaacaagactagcgaagatgaagctgatcggcggtcattgtgtatgtcagaaatgaatgaaataggcataagaagcacagctcatcacatagttatgggtttacatgatgcaacagcttttcatggctcaagccaaacttgttcggggaggaaaagaaaatttccgtgcatcaagtctaaagaggataatcaaactgaagacaagtctgacccattattctttccacccagctattcatccacattaagtcatctggttgaaaatgttcaaataaatgatgttagccctcatggctatgaaaccacggagattccaaacatgggcaatcgtacagatattcttgataagatgtacctaggagagaatttattgtttgcccccgaaactggtaatatgctacttgaaactacagatgatatcaacaatgaacagcatgatgatgcagctgtctctgagccccaatcggcagataatgatggaagtggaccttctggtgcatcatcactaccaccagagaaagatgcatacatgggatctaaagaggattctattaacgactatcatgatccttcagttgtctctgagttccaaattgctaataatgatgcaaaatgtgaaccttctattgcattcttgccagaaaaggataaagatttggaagctaataaaacgagcttggaaggtccagcaaaaacaggccaattgtcatctgaagctagtggcagcactttgatgatctcagagccacaagtattgtttgtgtccccacaagatgggactctgtctttcatgaacaataatacgaacaaccaagagatgtggaggttcctgaatgtttcccctgataccatggataccgaaatgcagatggactctaattcattggtttacgaggcaagcttgattcagggtttcttgtaccttgacaatgagggttctccaatttgttggacagtgatgaacccggaacctcctaggcgcttgatatgtgctactgctctggaaccaaactcaaagctgtcgaaacagtatgttgaaatgaggttggagaatgatgcatcaacgtctgaacacaagaagggaggaaaattgtctgataaggctgcagatatccaagacaatgtcagtagaaaaaaacagaaagcaaacattgcttctttaaataattgcgtaagtatggacaatttaactgtcaatcctattgatcctgtagttctcaatgagggagagcagacaggtacagcaatcactgagcaggttcctgttcctttgaatctagtgcttgagaacaaaaatgacaaggaccaaggtgagcaaagcagtgaaacttcagaacaacttatgtccaaagaaccacaaaaaagggacatcaaaaggcaaaagagaacatggtctcatacatgcaagtttgatgatgatgaccttctgatgacagctgtaatatataagctgacagcacgttacaggaactcttttcatcggaagctcagaaataaattcggtttcaggcgtcttccaacataccactgggagaatgaagataaaggtgacaggaagaagtttcctggagaagcaaggacggtgttgaacaagttacttgaaatgggcattgttgctagagtggatattcttcaatgtcatggtccaggaggcaaaaatgtgttgaaggatgggaacataactgcgagtggcattcaatgccagtgctgtggtaccacattcacaatgtccaagtttaagtgtcatgcaggtctcaggcaagaagtcccatctctgaatcttttcttggatacaggcaaatcttacagtctttgtcagcttcaagcatggtctatagagcagaaggtgaggaaagagcatgcaaaggatacaatgtcccttcaagcagaccaaaacgatgatacctgtggatcatgtggcgatggtggtgaactgatatgctgtgacaattgtcctgctagttaccatcaagcctgcttgtcttgccaggatattccagatggcaactggtactgctctagctgcctttgcgacatttgtggtgaagtaatcgattcaaaggagcttgtaacttcccttcctgctttagattgctcacagtgcgaacgccaataccatgtaaaatgtgtatctgccaaagttccgtgcaatgaggatggatctggtacctggttttgtggaagaaaatgtcacgagatctatatgaccttccgttctcgtgttggagtgcctgatcacatggacgatgatctgtgtttcaccgttcttcgtaacaacggtgataagaaggttcgcacggcagaggagattgctctcatggctgaatgcaacatgaaactcatgatcgccacgagtatcatggaagagtgtttcctgcctattctagatcccaggacagggatagacattattccctccatattgtataactggaggtctgatttacatttcaattacaaggggttctatacagtagtcttggaaagtgatgatagcatggtatctgttgcctccataaggttgcatggtgcaattttagcagagatgcctctggtagcaacttctaaagagaatcgtcagcaggggatgtgcaggcgcctcatggattacattgaggagatgctgaaatccctgaaggtggagatgctgctcctatcagcaatcccgcacctggcggagacatggacatcgacatttgggttcagagagatagatgagtcggacaagaagaggctgagtaaggtgaggctggccgcagttccggggaccgtcctactgaagaaggacctgctgtgtgaatgttcaggcgcggacgccggtgagccgccgagccctaagcccttccaagtttactcgcgcgtgccgagaggccgcaccggtttggatgcagtgtgccaataaagatgacgcagtggatcgaatgcgccgcggtcagtcgtcgtcgtcggtgacagggggcagctggtggtcgtcacggggcctcgtctccggttgctgaagccgaggccgagcacatcagcacgcgccggtttgtgtggtggaaatggaaagcctcgttgctctggtaggagctctgaagatcgctgtcgtctgcttgtagtctgtaaatagcttctccgtcggcgagaagcccagggtccacggccattgtagaaccgaacctgtatgataaaactagaccgtgttggcgccccaccagcgtttagtagtttccgttgccctttgaactcaaagtttcaggctagtccattgtgttcgtttcagaagcctgcggttttcagggggaggggaggtgccagaaagggaggacataacgcacgtgcagaccgagtattatgtggtggtgtcgtagacacgcacgagttgacgaagctataggagcagctcgtgatgagcaatggttggtgcagatgatgatgtcaatgagctcctcccgcagggaccggacctgtggacacggatggagctgaacttgtttgaaggatgcgtagtactaataatatatgcagtcaagccagcctgaacttatttgaatgaggtgtagtactaataatatatgcagccaagccagcctgacactttc

SEQ ID NO: 215779 - DNA, 5093 bp, Zea Mays
ggaggcagagattgctgcgcgcgccccggagcagagcgagtgcttgccagttgccattactgttcggtgcggtgaggtagtagagggataaagaaagaagggactggaaggaaggaaggagtgagggagatgccggcttcgcctcgtatggggaggggataagggaaggccgatggcaatgccgccgtttctccctcttcgcgaatagctagtacgcgttcaaagcaactgattggctgttgatcagcaagatggatgggaaaggattgtttgcggagatagggatgaaggaggaggacattgccacaatgctgtctgggaagaaagtttccgagctggcagaggatgcgtttgatggttccaaggaagaaagacagatctttgagggtgtcttctgcctaacaaacgttgatggtggattgaatgatcattatcatggaggcattggacatactgttcatgcagggaaagtggtgacaagttctagaaaaccatcaagctctgccgacaattacaaggcagcacactgtcgcatagtagagtccttcactgctggcaacttatcaagctatcgtgtctcctgtcttggtgccgatgagcaggctcatggagcaatgcattctcctgatgctgtccgtttcaagcttgcagtgcagtggacgcctcctcgccctgatcgggtgtacactcgtagggtggtgactcgcaggagcgagagggcaagaatttgcagtgcgatggatttggagagcatcgacatttgcaatttcagtcgtcagagggatggtcgtggccatggacagctttggaaccatcttcggatgcatgcacatcttctgatggtggatgccgggtggaagattgaggccaaggaaagagacaacaggagtaaagttgatcatgtttatgtggcgccagacaatgtgacacgcctgtattctcttcccagagcatggaaatgctttggccagtggttgcttatgacaacaccctgcgtcaatggaaatgagtcaattgactacggaaaggagtggtcgaacatgcatgaatttctgtatgatctgaagaacacactgctatgcctacagtatgaggtccaacgtacgaagccagcactatctttcctctaccagtggcagctccttgatcctttcatggctgttgtttgcatcgataagaaggttgcagctcttaaagatggagtggcactgaaagctgttaacagcaccgtgacttgcctcaatcgcagtgagtgtaagatgttggatgccaagaattcaaataggtcacttggggtcaactccacaagtaaatatatgaatccatatctcagctcctgcaaaaaaagtcttctgccgcttctctctgaatctgattatcagcctgataaggaagggaatactatgcctaatgaagaagcttctctattttgtacaaacaagactagcgaagatgaagctgatcggcggtcattgtgtatgtcagaaatgaatgaaataggcataagaagcacagctcatcacatagttatgggtttacatgatgcaacagcttttcatggctcaagccaaacttgttcggggaggaaaagaaaatttccgtgcatcaagtctaaagaggataatcaaactgaagacaagtctgacccattattctttccacccagctattcatccacattaagtcatctggttgaaaatgttcaaataaatgatgttagccctcatggctatgaaaccacggagattccaaacatgggcaatcgtacagatattcttgataagatgtacctaggagagaatttattgtttgcccccgaaactggtaatatgctacttgaaactacagatgatatcaacaatgaacagcatgatgatgcagctgtctctgagccccaatcggcagataatgatggaagtggaccttctggtgcatcatcactaccaccagagaaagatgcatacatgggatctaaagaggattctattaacgactatcatgatccttcagttgtctctgagttccaaattgctaataatgatgcaaaatgtgaaccttctattgcattcttgccagaaaaggataaagatttggaagctaataaaacgagcttggaaggtccagcaaaaacaggccaattgtcatctgaagctagtggcagcactttgatgatctcagagccacaagtattgtttgtgtccccacaagatgggactctgtctttcatgaacaataatacgaacaaccaagagatgtggaggttcctgaatgtttcccctgataccatggataccgaaatgcagatggactctaattcattggtttacgaggcaagcttgattcagggtttcttgtaccttgacaatgagggttctccaatttgttggacagtgatgaacccggaacctcctaggcgcttgatatgtgctactgctctggaaccaaactcaaagctgtcgaaacagtatgttgaaatgaggttggagaatgatgcatcaacgtctgaacacaagaagggaggaaaattgtctgataaggctgcagatatccaagacaatgtcagtagaaaaaaacagaaagcaaacattgcttctttaaataattgcgtaagtatggacaatttaactgtcaatcctattgatcctgtagttctcaatgagggagagcagacaggtacagcaatcactgagcaggttcctgttcctttgaatctagtgcttgagaacaaaaatgacaaggaccaaggtgagcaaagcagtgaaacttcagaacaacttatgtccaaagaaccacaaaaaagggacatcaaaaggcaaaagagaacatggtctcatacatgcaagtttgatgatgatgaccttctgatgacagctgtaatatataagctgacagcacgttacaggaactcttttcatcggaagctcagaaataaattcggtttcaggcgtcttccaacataccactgggagaatgaagataaaggtgacaggaagaagtttcctggagaagcaaggacggtgttgaacaagttacttgaaatgggcattgttgctagagtggatattcttcaatgtcatggtccaggaggcaaaaatgtgttgaaggatgggaacataactgcgagtggcattcaatgccagtgctgtggtaccacattcacaatgtccaagtttaagtgtcatgcaggtctcaggcaagaagtcccatctctgaatcttttcttggatacaggcaaatcttacagtctttgtcagcttcaagcatggtctatagagcagaaggtgaggaaagagcatgcaaaggatacaatgtcccttcaagcagaccaaaacgatgatacctgtggatcatgtggcgatggtggtgaactgatatgctgtgacaattgtcctgctagttaccatcaagcctgcttgtcttgccagatggcaactggtactgctctagctgcctttgcgacatttgtggtgaagtaatcgattcaaaggagcttgtaacttcccttcctgctttagattgctcacagtgcgaacgccaatatcatcaacacacacacacacgggcagggcagactgctttttaaccaagcctagatcaagatttgaatgacctaaaactttttgaccatgtaaaatgtgtatctgccaaagttccgtgcaatgaggatggatctggtacctggttttgtggaagaaaatgtcacgagatctatatgaccttccgttctcgtgttggagtgcctgatcacatggacgatgatctgtgtttcaccgttcttcgtaacaacggtgataagaaggttcgcacggcagaggagattgctctcatggctgaatgcaacatgaaactcatgatcgccacgagtatcatggaagagtgtttcctgcctattctagatcccaggacagggatagacattattccctccatattgtataactggaggtctgatttacatttcaattacaaggggttctatacagtagtcttggaaagtgatgatagcatggtatctgttgcctccataaggttgcatggtgcaattttagcagagatgcctctggtagcaacttctaaagagaatcgtcagcaggggatgtgcaggcgcctcatggattacattgaggagatgctgaaatccctgaaggtggagatgctgctcctatcagcaatcccgcacctggcggagacatggacatcgacatttgggttcagagagatagatgagtcggacaagaagaggctgagtaaggtgaggctggccgcagttccggggaccgtcctactgaagaaggacctgctgtgtgaatgttcaggcgcggacgccggtgagccgccgagccctaagcccttccaagtttactcgcgcgtgccgagaggccgcaccggtttggatgcagtgtgccaataaagatgacgcagtggatcgaatgcgccgcggtcagtcgtcgtcgtcggtgacagggggcagctggtggtcgtcacggggcctcgtctccggttgctgaagccgaggccgagcacatcagcacgcgccggtttgtgtggtggaaatggaaagcctcgttgctctggtaggagctctgaagatcgctgtcgtctgcttgtagtctgtaaatagcttctccgtcggcgagaagcccagggtccacggccattgtagaaccgaacctgtatgataaaactagaccgtgttggcgccccaccagcgtttagtagtttccgttgccctttgaactcaaagtttcaggctagtccattgtgttcgtttcagaagcctgcggttttcagggggaggggaggtgccagaaagggaggacataacgcacgtgcagaccgagtattatgtggtggtgtcgtagacacgcacgagttgacgaagctataggagcagctcgtgatgagcaatggttggtgcagatgatgatgtcaatgagctcctcccgcagggaccggacctgtggacacggatggagctgaacttgtttgaaggatgcgtagtactaataatatatgcagtcaagccagcctgaacttatttgaatgaggtgtagtactaataatatatgcagccaagccagcctgacactttc

SEQ ID NO: 215780 - DNA, 5009 bp, Zea Mays
ggaggcagagattgctgcgcgcgccccggagcagagcgagtgcttgccagttgccattactgttcggtgcggtgaggtagtagagggataaagaaagaagggactggaaggaaggaaggagtgagggagatgccggcttcgcctcgtatggggaggggataagggaaggccgatggcaatgccgccgtttctccctcttcgcgaatagctagtacgcgttcaaagcaactgattggctgttgatcagcaagatggatgggaaaggattgtttgcggagatagggatgaaggaggaggacattgccacaatgctgtctgggaagaaagtttccgagctggcagaggatgcgtttgatggttccaaggaagaaagacagatctttgagggtgtcttctgcctaacaaacgttgatggtggattgaatgatcattatcatggaggcattggacatactgttcatgcagggaaagtggtgacaagttctagaaaaccatcaagctctgccgacaattacaaggcagcacactgtcgcatagtagagtccttcactgctggcaacttatcaagctatcgtgtctcctgtcttggtgccgatgagcaggctcatggagcaatgcattctcctgatgctgtccgtttcaagcttgcagtgcagtggacgcctcctcgccctgatcgggtgtacactcgtagggtggtgactcgcaggagcgagagggcaagaatttgcagtgcgatggatttggagagcatcgacatttgcaatttcagtcgtcagagggatggtcgtggccatggacagctttggaaccatcttcggatgcatgcacatcttctgatggtggatgccgggtggaagattgaggccaaggaaagagacaacaggagtaaagttgatcatgtttatgtggcgccagacaatgtgacacgcctgtattctcttcccagagcatggaaatgctttggccagtggttgcttatgacaacaccctgcgtcaatggaaatgagtcaattgactacggaaaggagtggtcgaacatgcatgaatttctgtatgatctgaagaacacactgctatgcctacagtatgaggtccaacgtacgaagccagcactatctttcctctaccagtggcagctccttgatcctttcatggctgttgtttgcatcgataagaaggttgcagctcttaaagatggagtggcactgaaagctgttaacagcaccgtgacttgcctcaatcgcagtgagtgtaagatgttggatgccaagaattcaaataggtcacttggggtcaactccacaagtaaatatatgaatccatatctcagctcctgcaaaaaaagtcttctgccgcttctctctgaatctgattatcagcctgataaggaagggaatactatgcctaatgaagaagcttctctattttgtacaaacaagactagcgaagatgaagctgatcggcggtcattgtgtatgtcagaaatgaatgaaataggcataagaagcacagctcatcacatagttatgggtttacatgatgcaacagcttttcatggctcaagccaaacttgttcggggaggaaaagaaaatttccgtgcatcaagtctaaagaggataatcaaactgaagacaagtctgacccattattctttccacccagctattcatccacattaagtcatctggttgaaaatgttcaaataaatgatgttagccctcatggctatgaaaccacggagattccaaacatgggcaatcgtacagatattcttgataagatgtacctaggagagaatttattgtttgcccccgaaactggtaatatgctacttgaaactacagatgatatcaacaatgaacagcatgatgatgcagctgtctctgagccccaatcggcagataatgatggaagtggaccttctggtgcatcatcactaccaccagagaaagatgcatacatgggatctaaagaggattctattaacgactatcatgatccttcagttgtctctgagttccaaattgctaataatgatgcaaaatgtgaaccttctattgcattcttgccagaaaaggataaagatttggaagctaataaaacgagcttggaaggtccagcaaaaacaggccaattgtcatctgaagctagtggcagcactttgatgatctcagagccacaagtattgtttgtgtccccacaagatgggactctgtctttcatgaacaataatacgaacaaccaagagatgtggaggttcctgaatgtttcccctgataccatggataccgaaatgcagatggactctaattcattggtttacgaggcaagcttgattcagggtttcttgtaccttgacaatgagggttctccaatttgttggacagtgatgaacccggaacctcctaggcgcttgatatgtgctactgctctggaaccaaactcaaagctgtcgaaacagtatgttgaaatgaggttggagaatgatgcatcaacgtctgaacacaagaagggaggaaaattgtctgataaggctgcagatatccaagacaatgtcagtagaaaaaaacagaaagcaaacattgcttctttaaataattgcgtaagtatggacaatttaactgtcaatcctattgatcctgtagttctcaatgagggagagcagacaggtacagcaatcactgagcaggttcctgttcctttgaatctagtgcttgagaacaaaaatgacaaggaccaaggtgagcaaagcagtgaaacttcagaacaacttatgtccaaagaaccacaaaaaagggacatcaaaaggcaaaagagaacatggtctcatacatgcaagtttgatgatgatgaccttctgatgacagctgtaatatataagctgacagcacgttacaggaactcttttcatcggaagctcagaaataaattcggtttcaggcgtcttccaacataccactgggagaatgaagataaaggtgacaggaagaagtttcctggagaagcaaggacggtgttgaacaagttacttgaaatgggcattgttgctagagtggatattcttcaatgtcatggtccaggaggcaaaaatgtgttgaaggatgggaacataactgcgagtggcattcaatgccagtgctgtggtaccacattcacaatgtccaagtttaagtgtcatgcaggtctcaggcaagaagtcccatctctgaatcttttcttggatacaggcaaatcttacagtctttgtcagcttcaagcatggtctatagagcagaaggtgaggaaagagcatgcaaaggatacaatgtcccttcaagcagaccaaaacgatgatacctgtggatcatgtggcgatggtggtgaactgatatgctgtgacaattgtcctgctagttaccatcaagcctgcttgtcttgccagatggcaactggtactgctctagctgcctttgcgacatttgtggtgaagtaatcgattcaaaggagcttgtaacttcccttcctgctttagattgctcacagtgcgaacgccaataccatgtaaaatgtgtatctgccaaagttccgtgcaatgaggatggatctggtacctggttttgtggaagaaaatgtcacgagatctatatgaccttccgttctcgtgttggagtgcctgatcacatggacgatgatctgtgtttcaccgttcttcgtaacaacggtgataagaaggttcgcacggcagaggagattgctctcatggctgaatgcaacatgaaactcatgatcgccacgagtatcatggaagagtgtttcctgcctattctagatcccaggacagggatagacattattccctccatattgtataactggaggtctgatttacatttcaattacaaggggttctatacagtagtcttggaaagtgatgatagcatggtatctgttgcctccataaggttgcatggtgcaattttagcagagatgcctctggtagcaacttctaaagagaatcgtcagcaggggatgtgcaggcgcctcatggattacattgaggagatgctgaaatccctgaaggtggagatgctgctcctatcagcaatcccgcacctggcggagacatggacatcgacatttgggttcagagagatagatgagtcggacaagaagaggctgagtaaggtgaggctggccgcagttccggggaccgtcctactgaagaaggacctgctgtgtgaatgttcaggcgcggacgccggtgagccgccgagccctaagcccttccaagtttactcgcgcgtgccgagaggccgcaccggtttggatgcagtgtgccaataaagatgacgcagtggatcgaatgcgccgcggtcagtcgtcgtcgtcggtgacagggggcagctggtggtcgtcacggggcctcgtctccggttgctgaagccgaggccgagcacatcagcacgcgccggtttgtgtggtggaaatggaaagcctcgttgctctggtaggagctctgaagatcgctgtcgtctgcttgtagtctgtaaatagcttctccgtcggcgagaagcccagggtccacggccattgtagaaccgaacctgtatgataaaactagaccgtgttggcgccccaccagcgtttagtagtttccgttgccctttgaactcaaagtttcaggctagtccattgtgttcgtttcagaagcctgcggttttcagggggaggggaggtgccagaaagggaggacataacgcacgtgcagaccgagtattatgtggtggtgtcgtagacacgcacgagttgacgaagctataggagcagctcgtgatgagcaatggttggtgcagatgatgatgtcaatgagctcctcccgcagggaccggacctgtggacacggatggagctgaacttgtttgaaggatgcgtagtactaataatatatgcagtcaagccagcctgaacttatttgaatgaggtgtagtactaataatatatgcagccaagccagcctgacactttc

SEQ ID NO: 215781 - DNA, 4907 bp, Zea Mays
caattattttagggaacttgttccctgcgtttgtcgactgataagttggataccggatggctactcctgttggcacagagccatggaatgtgaatagctagtacgcgttcaaagcaactgattggctgttgatcagcaagatggatgggaaaggattgtttgcggagatagggatgaaggaggaggacattgccacaatgctgtctgggaagaaagtttccgagctggcagaggatgcgtttgatggttccaaggaagaaagacagatctttgagggtgtcttctgcctaacaaacgttgatggtggattgaatgatcattatcatggaggcattggacatactgttcatgcagggaaagtggtgacaagttctagaaaaccatcaagctctgccgacaattacaaggcagcacactgtcgcatagtagagtccttcactgctggcaacttatcaagctatcgtgtctcctgtcttggtgccgatgagcaggctcatggagcaatgcattctcctgatgctgtccgtttcaagcttgcagtgcagtggacgcctcctcgccctgatcgggtgtacactcgtagggtggtgactcgcaggagcgagagggcaagaatttgcagtgcgatggatttggagagcatcgacatttgcaatttcagtcgtcagagggatggtcgtggccatggacagctttggaaccatcttcggatgcatgcacatcttctgatggtggatgccgggtggaagattgaggccaaggaaagagacaacaggagtaaagttgatcatgtttatgtggcgccagacaatgtgacacgcctgtattctcttcccagagcatggaaatgctttggccagtggttgcttatgacaacaccctgcgtcaatggaaatgagtcaattgactacggaaaggagtggtcgaacatgcatgaatttctgtatgatctgaagaacacactgctatgcctacagtatgaggtccaacgtacgaagccagcactatctttcctctaccagtggcagctccttgatcctttcatggctgttgtttgcatcgataagaaggttgcagctcttaaagatggagtggcactgaaagctgttaacagcaccgtgacttgcctcaatcgcagtgagtgtaagatgttggatgccaagaattcaaataggtcacttggggtcaactccacaagtaaatatatgaatccatatctcagctcctgcaaaaaaagtcttctgccgcttctctctgaatctgattatcagcctgataaggaagggaatactatgcctaatgaagaagcttctctattttgtacaaacaagactagcgaagatgaagctgatcggcggtcattgtgtatgtcagaaatgaatgaaataggcataagaagcacagctcatcacatagttatgggtttacatgatgcaacagcttttcatggctcaagccaaacttgttcggggaggaaaagaaaatttccgtgcatcaagtctaaagaggataatcaaactgaagacaagtctgacccattattctttccacccagctattcatccacattaagtcatctggttgaaaatgttcaaataaatgatgttagccctcatggctatgaaaccacggagattccaaacatgggcaatcgtacagatattcttgataagatgtacctaggagagaatttattgtttgcccccgaaactggtaatatgctacttgaaactacagatgatatcaacaatgaacagcatgatgatgcagctgtctctgagccccaatcggcagataatgatggaagtggaccttctggtgcatcatcactaccaccagagaaagatgcatacatgggatctaaagaggattctattaacgactatcatgatccttcagttgtctctgagttccaaattgctaataatgatgcaaaatgtgaaccttctattgcattcttgccagaaaaggataaagatttggaagctaataaaacgagcttggaaggtccagcaaaaacaggccaattgtcatctgaagctagtggcagcactttgatgatctcagagccacaagtattgtttgtgtccccacaagatgggactctgtctttcatgaacaataatacgaacaaccaagagatgtggaggttcctgaatgtttcccctgataccatggataccgaaatgcagatggactctaattcattggtttacgaggcaagcttgattcagggtttcttgtaccttgacaatgagggttctccaatttgttggacagtgatgaacccggaacctcctaggcgcttgatatgtgctactgctctggaaccaaactcaaagctgtcgaaacagtatgttgaaatgaggttggagaatgatgcatcaacgtctgaacacaagaagggaggaaaattgtctgataaggctgcagatatccaagacaatgtcagtagaaaaaaacagaaagcaaacattgcttctttaaataattgcgtaagtatggacaatttaactgtcaatcctattgatcctgtagttctcaatgagggagagcagacaggtacagcaatcactgagcaggttcctgttcctttgaatctagtgcttgagaacaaaaatgacaaggaccaaggtgagcaaagcagtgaaacttcagaacaacttatgtccaaagaaccacaaaaaagggacatcaaaaggcaaaagagaacatggtctcatacatgcaagtttgatgatgatgaccttctgatgacagctgtaatatataagctgacagcacgttacaggaactcttttcatcggaagctcagaaataaattcggtttcaggcgtcttccaacataccactgggagaatgaagataaaggtgacaggaagaagtttcctggagaagcaaggacggtgttgaacaagttacttgaaatgggcattgttgctagagtggatattcttcaatgtcatggtccaggaggcaaaaatgtgttgaaggatgggaacataactgcgagtggcattcaatgccagtgctgtggtaccacattcacaatgtccaagtttaagtgtcatgcaggtctcaggcaagaagtcccatctctgaatcttttcttggatacaggcaaatcttacagtctttgtcagcttcaagcatggtctatagagcagaaggtgaggaaagagcatgcaaaggatacaatgtcccttcaagcagaccaaaacgatgatacctgtggatcatgtggcgatggtggtgaactgatatgctgtgacaattgtcctgctagttaccatcaagcctgcttgtcttgccaggatattccagatggcaactggtactgctctagctgcctttgcgacatttgtggtgaagtaatcgattcaaaggagcttgtaacttcccttcctgctttagattgctcacagtgcgaacgccaatccatgtaaaatgtgtatctgccaaagttccgtgcaatgaggatggatctggtacctggttttgtggaagaaaatgtcacgagatctatatgaccttccgttctcgtgttggagtgcctgatcacatggacgatgatctgtgtttcaccgttcttcgtaacaacggtgataagaaggttcgcacggcagaggagattgctctcatggctgaatgcaacatgaaactcatgatcgccacgagtatcatggaagagtgtttcctgcctattctagatcccaggacagggatagacattattccctccatattgtataactggaggtctgatttacatttcaattacaaggggttctatacagtagtcttggaaagtgatgatagcatggtatctgttgcctccataaggttgcatggtgcaattttagcagagatgcctctggtagcaacttctaaagagaatcgtcagcaggggatgtgcaggcgcctcatggattacattgaggagatgctgaaatccctgaaggtggagatgctgctcctatcagcaatcccgcacctggcggagacatggacatcgacatttgggttcagagagatagatgagtcggacaagaagaggctgagtaaggtgaggctggccgcagttccggggaccgtcctactgaagaaggacctgctgtgtgaatgttcaggcgcggacgccggtgagccgccgagccctaagcccttccaagtttactcgcgcgtgccgagaggccgcaccggtttggatgcagtgtgccaataaagatgacgcagtggatcgaatgcgccgcggtcagtcgtcgtcgtcggtgacagggggcagctggtggtcgtcacggggcctcgtctccggttgctgaagccgaggccgagcacatcagcacgcgccggtttgtgtggtggaaatggaaagcctcgttgctctggtaggagctctgaagatcgctgtcgtctgcttgtagtctgtaaatagcttctccgtcggcgagaagcccagggtccacggccattgtagaaccgaacctgtatgataaaactagaccgtgttggcgccccaccagcgtttagtagtttccgttgccctttgaactcaaagtttcaggctagtccattgtgttcgtttcagaagcctgcggttttcagggggaggggaggtgccagaaagggaggacataacgcacgtgcagaccgagtattatgtggtggtgtcgtagacacgcacgagttgacgaagctataggagcagctcgtgatgagcaatggttggtgcagatgatgatgtcaatgagctcctcccgcagggaccggacctgtggacacggatggagctgaacttgtttgaaggatgcgtagtactaataatatatgcagtcaagccagcctgaacttatttgaatgaggtgtagtactaataatatatgcagccaagccagcctgacactttc

SEQ ID NO: 215782 - DNA, 578 bp, Zea Mays
aagactatattccttcctgttgttgggctagtggaccctgacaagctaaagcctggtgatcttgttggagtcaataaagatagctatcttatactagatacattgccatcagagtatgattcacgagtgaaggcaatggaggtggatgaaaagcccactaaagattataatgacattggaggtcttgaaaagcagaagttgggtattcgtcctccaaaaggagttcttctgtatggaccgccaggaactggcaagacactcatggctcgtgcatgtgctgcacagacgaatgcaacatttctgaaattagctggtccacaacttgtgcaaatgtttattggtgatggagcaaagcttgtccgggatgcattccagcttgccaaagagaaagctccttgtattatatttattgatgagatagatgccatcggcaccaaacgttttgatagtgaagttcgtggtgatagagaagttcagcgaacaatgttggaattactgaatcaactggatggattcagcagtgatgagagaataaaggtcatagctgcaacgaaccgtgccgactgttgagaaaccct

SEQ ID NO: 215783 - DNA, 2897 bp, Zea Mays
ctccctccgccagcgccttggtccgcaggattccagataccttcatgctgctgaatgcctacttggactcatttaccggccctctgattgaagaagtacactgtgacgtctttttgtcactgagcggttatgctcatgccaacttcatagagatagtccgactggataagcttaatcatgagaaatcaatatatggtttcgtggtttccatgccttccaaggacgcaaagtcgagggagatttatgcccccaaagaaggcgatatagtggttgtgtccttgcagaaaccgaagcatgtgtctgatctgacaaagaacaggtcatcttacaatctaggctccattctgaaatctggaaaagaagaagaagaagatagcgatttgccgccaaatttctgcattgttaggtttctgtcagctattcctgtggaagtagatcctgaaacaagcaagcctagagggccatgttttgctgtctttctcataaacaccacgacatatgaccacatatggacgtgccttcacttggtagcaaatgatcataatcttgcaccactccagaagagagggtctaataccgctattgtcaatctagtgtggcaatacaagcgtcgggcagctgaagatggtagcttgtcattctcccagctctcccaaagtgtcactcagtcagttgatgaccttggcctcgagaagttcggcctaaatgattcacagttgcatgcagtagctgactgtgtcttgtcagcaatagacaaccggttgccttccctaaaactaatatggggcccccctgggacaggcaaaacgaaaaccatctgcactatcctctgggcaatgctcatgaagggcttaaggacacttacctgtgcccctaccaacaccgctgtattggaagttgcatctcgaattgtcaggctcgttgagcatctccatggcagtgtctgctttctcaatgacattgtcctgtttggaagcaaagaaaagatgaaaatcggccgtgaggacgccctttccatggtattccttgactctcgcgctaaacgactgctgccgtgtttcatgccaaccacaggctggatgcattgtttgcgctcactaatggaccaccttgagagtcctattacccagtacaggttgcatcttgagaaattactcaaaaatgaaaagaaaaaggagagcaataagggaggttctagagcaacgcagggtacgatcattagaataccgccattcaaagatttcttcaaaggttatttcaacaaggtgtcaaatttgctgagaaagtgcgttgagacaatgtacaatgatcatccacgaagtccagaaacaggacacagctttcagtgcatgctggaggtgcttgagttgattggaattcttcaggagctgataaactgcaaaaacgatgacatatggtcagatgaatttcatgattgcaagatagaagatgacggtgaccccattctgtggtctgagcagctagcccatgtgcggagtaacactagcaaaaagcacaaactaaagctagctagatccttgtgtgtgcgagaattgagatatcttcacaaaaatctggagcttcctggttactccagcaagcgatcagttgagacttacttgctgcagagagcaaaatgcattctctgtacagtttctagttctttcaggttgtacaacgtgcccatggatagttcttgtacagacattcacagtttgctcaaagggcctgaaacgttcaagcttttggatatgctgatcgtggatgaggctgcacagctgaaagagtgcgagaccttaatccctttgcagctgccaggcataaggcaggccgtgtttgttggagatgagtatcagctgcctgctttggtgagaagcaaaatatctgatggcgcaaacttcggccgaagtgttttcgaaaggctaagctcgctgggttacgggaagtaccttctgaatgtgcaatacaggatgcatccagagatcagcaggtttcctgttgccacattttacgatggcaagttatctgatggccccaacgtcactagtatgagctatgagaggacgtttttggcgagcaaagtatttggaccgtattcctttatcaatgtggatggggggcgtgagacaactgagaagcatggcacgagccttaagaacacagtagaagttgctgcggtcttgcggatagtgcagagattgttcaaagagtcagtatctacaggttgcaagctctctgtcggtgttgtgtcgccgtacaatgctcaagtcagagctatctgtcaaaaagtgggggaatcctataatgcacacgatggtttctctgtgaaagtgaaatctgtggatggtttccaaggcgcggaggaagatgtcctcatcatatctacagtgaggagcaatggagctggttctgttgggttcctcacaaacctgcagaggaccaacgtggcattgacaagggctaagcattgtttatggatagtaggaaatggagcgactttgtccagcagcaagtcagtttggcagaaaatagtgaaggacgcacgtgatcgaggctgctacttcgaagccagcgacgatggggatctgtcgaatgcagtcgtcaaggccatcattgagcaggacgatgccgataatttggtgaggatggagtcgctgcacataagcaggccgaggtctcagcttcagaaatcaggacctaagaacttttcatgagaggccacaagatgtctacaaagggcttgttgaatttgaacatttggatagtagaaaaagagaaagcactccctctgtctttccccaaaagatttgcacttcgaatggtttatgtttcaccaagttcttaacagatcaatcttatcgaggccggtcaaaaaaagaaaaggaaaaaaaaaaaag

SEQ ID NO: 215784 - DNA, 2722 bp, Zea Mays
cctatatacaaaaagatcaccactactgtactacggcaccccttcctcccccgctcccccacctccgctcccgaaaccctcgccgccgccgccgccgccgccgacgccgaaatcctcgtcgcggcggcgatcactgctcccctctatgatagcggcgcgtgagggcggcggagcgcggcctgtcgctccccggtccgcgtgcccggggcggctctgagagcccagagctcgtctcggttccctgccaagcgcagccgagcaccgcgccggcgccgcgtggcagttcaggccgtagtctgggcgctgttctgctctgggtctactggagtgcgtttgggattttttcggttcctactacattcgggggcgctgccagggatggattctgttccagggaaggagaacaacggcattgcccctaacctcaatggggtcgtgtctccagcgaagcagcagctggaggggaaggaagcgatgcggtatgcaaacatcctccggtcgcgcaataagtttgctgacgcgatcaacctgtacaccattgttctcgagaaggatggcaccaatgtggaggcccttatcgggaaagggatttgcctccaggcgcagaacctaccaagacaggccattgagtgctttacagaagctgtcaaaatcgagccaggaaatgcgtctgctcttacacattgtgggatgatttacaaagatgagggtcacttggttgaagcagctgaggcatatcaaaaagctaggatggctgatccttcctacaaacctgcttcggaatttcttgctattgtgttgactgatcttggaactagcttgaagcttgcgggtaatacagaggaggggattcaaaaatattgtgaagctctggaagtagacaaccactatgcgccggcttactacaaccttggagttgtttattcggagatgatgcaatttgatatggctcttagttgttacgagaaagctgcactggagagaccattgtatgctgaggcctattgcaacatgggagttatctataagaatcggggagatctagatgcagcaattatctgctacgagaggtgcttgaccatttctcccaactttgagattgctaagaataatatggcaatagcactaactgacttgggaacaaaggtaaaaattgaaggtgacatcaatagaggtgtagcatattacaagaaagctctatactacaattggcactatgctgatgccatgtataatcttggcgttgcatatggtgaaatgttgaattttgagatggcaattgtcttttacgagcttgcgctgcacttcaatcctcgctgtgcggaagcatgcaacaatttaggagtcatatacaaagacagggataaccttgacaaagctgttgaatgttatcaaatggcactgtcaattaagccacttttcgctcagtcgctaaataaccttggagttgtctatactgttcaaggtaagatggattctgctgctagcatgattgagaaggctatacatgcaaatcccacatatgctgaagcatataataatctaggtgttctttacagagacgctggtagtattactttagcaattcatgcttacgagagatgccttcagatcgatcctgattcacgaaatgctggccagaaccgtttgcttgcaatgaactatattgacgagggctcagatgacaagctttatgaagctcacagggagtggggaaaacgctttatgaaattgtatccacaatatacaagttgggataactcaaaagttgctgaccgcccattgatcatcggttatttgtctcctgattactttactcattccgtgtcctacttcattgaagctccccttacacaccatgattccacagtttgcaaggtggttgtctactccggtgttgtgaaggcagatgccaagacacttagattcaaggataaggtgttgaaaaagggtgggttgtggagagatatatatggtattgatgaaaagagggttgctagcttggtaagggaggataaagtggacatacttgtggaacttactggtcacacagcaaataataagttagggacaatggcatgccgacctgctcctattcaggttacctggattggctaccccaacacaacaggtttgccaacaatagactaccgaatctcagactcattgactgatccacctatgacaaagcaaaagcatgttgaggagttggtgcgccttcctgaaagctttctttgttatactccttccccagaagctggtcctgtttgtccaacaccagcaatttcaaatggtttcgtcacttttgggagctttaacaatctagcaaagattacaccgaaagtgttgcaagtttgggccagaatattatgttcagtccctaactccaggcttgtggttaagtgcaagccattctgctgtgagaacataaggcagaaatttttggccacactggaggagttgggtttggagtcattacgggttgatctgttgccactcatccatctgaatcatgatcacatgcaggcgtattctttgatggacatcagcctggatacatttccctatgctggtactacgactacatgtgaatctttatacatgggggttccatgtgttacaatggctggtgctgttcatgctcataacgttggtgtcagcttgctcagcaaagtcgggttggggaggctggttgccaaaactgaggatgagtatggagcaa

SEQ ID NO: 215785 - DNA, 2853 bp, Zea Mays
gagccaaagcgtaaaggcaaagcaccgttaatttcccgcaaaagggaggggcctatatacaaaaagatcaccactactgtactacggcaccccttcctcccccgctcccccacctccgctcccgaaaccctcgccgccgccgccgccgccgccgacgccgaaatcctcgtcgcggcggcgatcactgctcccctctatgatagcggcgcgtgagggcggcggagcgcggcctgtcgctccccggtccgcgtgcccggggcggctctgagagcccagagctcgtctcggttccctgccaagcgcagccgagcaccgcgccggcgccgcgtggcagttcaggccgtagtctgggcgctgttctgctctgggtctactggagtgcgtttgggattttttcggttcctactacattcgggggcgctgaacgacattgcttcacacaataaggcttctgactgggtgcagtttggtttccatgtgaacccccacatgtcccacgccagccagggatggattctgttccagggaaggagaacaacggcattgcccctaacctcaatggggtcgtgtctccagcgaagcagcagctggaggggaaggaagcgatgcggtatgcaaacatcctccggtcgcgcaataagtttgctgacgcgatcaacctgtacaccattgttctcgagaaggatggcaccaatgtggaggcccttatcgggaaagggatttgcctccaggcgcagaacctaccaagacaggccattgagtgctttacagaagctgtcaaaatcgagccaggaaatgcgtctgctcttacacattgtgggatgatttacaaagatgagggtcacttggttgaagcagctgaggcatatcaaaaagctaggatggctgatccttcctacaaacctgcttcggaatttcttgctattgtgttgactgatcttggaactagcttgaagcttgcgggtaatacagaggaggggattcaaaaatattgtgaagctctggaagtagacaaccactatgcgccggcttactacaaccttggagttgtttattcggagatgatgcaatttgatatggctcttagttgttacgagaaagctgcactggagagaccattgtatgctgaggcctattgcaacatgggagttatctataagaatcggggagatctagatgcagcaattatctgctacgagaggtgcttgaccatttctcccaactttgagattgctaagaataatatggcaatagcactaactgacttgggaacaaaggtaaaaattgaaggtgacatcaatagaggtgtagcatattacaagaaagctctatactacaattggcactatgctgatgccatgtataatcttggcgttgcatatggtgaaatgttgaattttgagatggcaattgtcttttacgagcttgcgctgcacttcaatcctcgctgtgcggaagcatgcaacaatttaggagtcatatacaaagacagggataaccttgacaaagctgttgaatgttatcaaatggcactgtcaattaagccacttttcgctcagtcgctaaataaccttggagttgtctatactgttcaaggtaagatggattctgctgctagcatgattgagaaggctatacatgcaaatcccacatatgctgaagcatataataatctaggtgttctttacagagacgctggtagtattactttagcaattcatgcttacgagagatgccttcagatcgatcctgattcacgaaatgctggccagaaccgtttgcttgcaatgaactatattgacgagggctcagatgacaagctttatgaagctcacagggagtggggaaaacgctttatgaaattgtatccacaatatacaagttgggataactcaaaagttgctgaccgcccattgatcatcggttatttgtctcctgattactttactcattccgtgtcctacttcattgaagctccccttacacaccatgattccacagtttgcaaggtggttgtctactccggtgttgtgaaggcagatgccaagacacttagattcaaggataaggtgttgaaaaagggtgggttgtggagagatatatatggtattgatgaaaagagggttgctagcttggtaagggaggataaagtggacatacttgtggaacttactggtcacacagcaaataataagttagggacaatggcatgccgacctgctcctattcaggttacctggattggctaccccaacacaacaggtttgccaacaatagactaccgaatctcagactcattgactgatccacctatgacaaagcaaaagcatgttgaggagttggtgcgccttcctgaaagctttctttgttatactccttccccagaagctggtcctgtttgtccaacaccagcaatttcaaatggtttcgtcacttttgggagctttaacaatctagcaaagattacaccgaaagtgttgcaagtttgggccagaatattatgttcagtccctaactccaggcttgtggttaagtgcaagccattctgctgtgagaacataaggcagaaatttttggccacactggaggagttgggtttggagtcattacgggttgatctgttgccactcatccatctgaatcatgatcacatgcaggcgtattctttgatggacatcagcctggatacatttccctatgctggtactacgactacatgtgaatctttatacatgggggttccatgtgttacaatggctggtgctgttcatgctcataacgttggtgtcagcttgctcagcaaagtcgggttggggaggctggttgccaaaactgaggatgagtatggagcaa

SEQ ID NO: 215786 - DNA, 4838 bp, Zea Mays
gacgttttatgctattgggcctctcaaaggcccgaaaaaacacaggtcaccgtcctctcctctagcgccgcccatccatccagccgtccaacgcctactaccgccgccacccgcctcccgcctctcctctagccccagccgttcagcgccgcccgcctccctcctctcctcctctcctccctcctccagtgccgccacgacgctcgccactagcgccgttcgcctcctccaacgcccgagcaccgcctccctcctccctcctccagcgccgactgcccctaacaccgccctctagctcctctagcagccagcgtcgcttacagccatcaagttccagggcaggagtcaagacagtgaatcacccagctgctctattcggttcaaatcctgtgtcggccactgcccatatggtttcaggccggctgtgctcgtttcgtcccttgtgcgggagctttgtttgagatttgagtcgttgcagctaaatcatggaagatagtaatgccctgattttgccctgcaaaaggaagaacaaggcgcaagtgaaagccaaggatggtaagaaagccaagaaggaagacccaaagatgagcaagacgaagctcaaaaagctgcaaaaattggaggaggaaaagaaaaagaagctgctacaagctaaaagcatcgaggttttgcagaagcacaagatctcagaggatgcatattcactgcttcatgcttcagggactattggtcaagctgagactttgaaagaaaaacggaggcgtgctgtgcaattctcaaaggctggcctggatgttcctgaagaactctcactgttcaagaaaagcggtggtacgaaagttcctgaaaacagtgatgttggggagcaagtttccccattaaagtttgttgagccagcaccaattgtggattctggtagagaatgtaataacaaaatgaaggatctagtgaaagctattgaatgccaaccgattatgggttttggagctggcattccagagccagaaactgaagagcctagtgatgatgctcatatgttgacaaatcagaaaattcagttgtcaattccaagttgttctggagcagaattagatttgcagggtaaagaactaggacaagggcagcattctgtacaggagtgcataaatcctccaattgttgtacctgtgtcaagactgcatgaagttgagaaggcaaggagggatctcccaataataatgatggagcaagaaataatggaagctatctatgaaaattctgtagtaattctgtgcggagagactggctgcggtaaaactacccaggttccccagttcctatacgaagctggcttcggcactagtgaccgagctgatagaaaagggatgattggtatcacacaaccacggcgcgtagctgttcatgccacagctaagagggtttcctatgagttaggacttaagctgggaagagaagttggttttcaagttaggcatgatagaaaggtaggaagtgaatgctccatcaagttcatgacagatggtattttgctgcgagaaatccagggtgattttctgttgaagcgctattcagtgatcatattggatgaggcacacgaaaggagcttgaacacagatatacttattgggatgctttctagaattataaagattcgcaaggatttgtatgcaaagcagcaggaaaaattacggtctggatttaagatcaaaccagaggataagatcagtcagttaaaggtggtgctcatgagtgctactctgcagttaaaggactttatttcaaatagaaggttgtttggcgtgatcccaccagctgttaaggtacctgtgcggcagtttccagtatcagttcacttctcaaagaggacacatgatgattatttagggctagcttataaaaaggttatgtcaatccacaagaggcttccaccaggtggaatcctcgtatttgtcactggacaacgggaagtggagtacttgtgtaagaaactgcgaagagcatccaaggtgcaaactgctaagaatcctgggaaaactgatggtgaagacaatggtccatgcccaaaagtagatgaaaaggaaatttttgaagcatatgatattgacagagatgaacccgagcaccgatatgacatgttttcctcgtatgatgacgatggtatgtatgatgacgatggtatgaatgttgagacaaatattgattcttctgacaacgaaacggagagcgaaatggatactgaaaccgatgacgaagagtctgttactattgaaactacagaagaggatgttccagtattagcatttttgaaagatgctgagagctcatctgcgttgaaggcatcatttggagctttgtcgggaataccaaatgtgctggaaagtgtcgaggaattaagtgatgctaaatgtgaagaaaagaccagcacttcacttcgttgttttagtaaatgcacagaacataagcctgtttcacatggtagacttcgtgtcttgccactttatgcaaagttatcagcttcacaacagcttcaagtgtttgaagatgtcccagagggggaaagattagttgtggtggcaactaatgttgccgaaacctctctaacaattccaggcataaaatatgtagttgatactggaaaagaaaaggttaagaattatgatcatgctactgggatgtcaagttatgatgtccaatggataagcaaggcatcagcatcccagcgtgctggaagagcaggaagaacagggcctggccactgttaccgtctctactcagctgcagcatatggtaaagatgatttattccctgaattcgctgaacctcagattaagaaaattccagttgaaggtgttgtcctgatgctcaagttcatgtctattgataaggttgagaactttcctttcccaacaccaccaaacaaggaaagtttggttgaagctgagcgttgcttaaagacattggaagcacttcatagtgatggaaaacttacacctatgggcaaggcaatggcacagtaccccatgagcccaagacattctcgtcttcttcttacagtgattaagaatttgaagaataagcagcaaggctttgctagatctaacttcatattaggatatgctgctgctgctgcatcaggtttgaattttactaatccttttctcaagcaattggatgaatgtgacacttatggtgaatcagtagaaaacactaatctggaagctaatggtccatgggaaaggaagagacagaagaagctcaaggctgtggttagagaggcacgggaaaagttttctaaccctagcagtgatgctttaaccatcgctcgtgccctgcagttctttgagttgtcagaaaacccagtggaattctgcagagccaattcacttcatcttaaaaccatggaagagatgtcaaagttgagaaagcagcttctgcagttaatatttcgccatagcaaatggtgcgaggagtttgcttggaattcgggtgactctgctgaggttgaacgggcctggaggaacgagcccagtatattgcagttgaatgaagaggaacttcttgggcaaggaatttgcgctggatgggctgatagagttgcaaggaggattcacacctatttgaaaccatcagaagacgatcgaaaggttcgagccgttcgttatcagtcttgtgcacttgatgatacaatatatctgcaccgatcatcatctgtcgcccaagttgccccagagcttgtagtttactcggagctacttagtacaaagaggctatacatgcacggtgtaacgaccgtaaagccagggtggcttttgaagtatgctagttccctctgcaccttctctgcaccgttggaagatccgaagccgtactatgacccactgaacgaccaagtctactgctacgttagcccggtcttctctcgtcataactggcagcttccgttgcacagtttacctatcaaagacggtgcgagccggctgcaggtgtttgcatgcgcgttgcttaaaggggacgtcctgccatgtctacgggacgccaaggatttcctcgcgctgtcaccatccgctgtgttggggcctgccaggcaacggagagtgggagatcttcttagcaggatgaagatcggtccgaagttagtcgacagcagggcagcactgagaggcgtgtggaattttgatcctggttttctctatcctgagctcaagttgtggtaccaggatagattccatgaccagtttgacttggtgtgggagcagatgcaccaacaggttctccttgaggggcgcaagcttttcccaaagaggtccaagaaagttaaaggctaggccaaaatttttggtgcagttggttggctggcagaagcttttttgtgtgtgtggttttaaggaatagatacgagagatgcagtgagacatcatgcacaagcagttttgtctagacattttgccttgatctggatttgttccattgcatctccgtgttgaactgttgatgtacaccgttcctctgcaagcaaccttcaccctgccatctgtgtcagaaatgttttctgatccaaccatttgctcaaaaccttgaacctgaaaaatatcctgatatccaaccatcgccatggcccatggggattggagggaattggcttcgagtgagggccaggggtaggattcgccagaaacaaacaggggatggtcgtgcgcagattgattacatttctctcctttccgtctctcgctctatttgcttttagcatatgaagtgtccgattccaggggtaaaaacagcggtagagtcgatataaaaatgtagcactaaactatattaccctcagttcaagaaaa

SEQ ID NO: 215787 - DNA, 4964 bp, Zea Mays
gacgttttatgctattgggcctctcaaaggcccgaaaaaacacaggtcaccgtcctctcctctagcgccgcccatccatccagccgtccaacgcctactaccgccgccacccgcctcccgcctctcctctagccccagccgttcagcgccgcccgcctccctcctctcctcctctcctccctcctccagtgccgccacgacgctcgccactagcgccgttcgcctcctccaacgcccgagcaccgcctccctcctccctcctccagcgccgactgcccctaacaccgccctctagctcctctagcagccagcgtcgcttacagccatcaagttccagggcaggagtcaagacagtgaatcacccagctgctctattcggttcaaatcctgtgtcggccactgcccatatggtttcaggccggctgtgctcgtttcgtcccttgtgcgggagctttgtttgagatttgagtcgttgcagctaaatcatggaagatagtaatgccctgattttgccctgcaaaaggaagaacaaggcgcaagtgaaagccaaggatggtaagaaagccaagaaggaagacccaaagatgagcaagacgaagctcaaaaagctgcaaaaattggaggaggaaaagaaaaagaagctgctacaagctaaaagcatcgaggttttgcagaagcacaagatctcagaggatgcatattcactgcttcatgcttcagggactattggtcaagtatggcagatcaaccctaccacactaagaatttagttattttctgaatatatactagtgcatcatgcttcagggactattggtcaagtatggcagatcaaccctaccgcactaagaatttagttattttctgaatatatactagtgcagtagtgcatttggccaaatagctctattctactgcaggctgagactttgaaagaaaaacggaggcgtgctgtgcaattctcaaaggctggcctggatgttcctgaagaactctcactgttcaagaaaagcggtggtacgaaagttcctgaaaacagtgatgttggggagcaagtttccccattaaagtttgttgagccagcaccaattgtggattctggtagagaatgtaataacaaaatgaaggatctagtgaaagctattgaatgccaaccgattatgggttttggagctggcattccagagccagaaactgaagagcctagtgatgatgctcatatgttgacaaatcagaaaattcagttgtcaattccaagttgttctggagcagaattagatttgcagggtaaagaactaggacaagggcagcattctgtacaggagtgcataaatcctccaattgttgtacctgtgtcaagactgcatgaagttgagaaggcaaggagggatctcccaataataatgatggagcaagaaataatggaagctatctatgaaaattctgtagtaattctgtgcggagagactggctgcggtaaaactacccaggttccccagttcctatacgaagctggcttcggcactagtgaccgagctgatagaaaagggatgattggtatcacacaaccacggcgcgtagctgttcatgccacagctaagagggtttcctatgagttaggacttaagctgggaagagaagttggttttcaagttaggcatgatagaaagggtgattttctgttgaagcgctattcagtgatcatattggatgaggcacacgaaaggagcttgaacacagatatacttattgggatgctttctagaattataaagattcgcaaggatttgtatgcaaagcagcaggaaaaattacggtctggatttaagatcaaaccagaggataagatcagtcagttaaaggtggtgctcatgagtgctactctgcagttaaaggactttatttcaaatagaaggttgtttggcgtgatcccaccagctgttaaggtacctgtgcggcagtttccagtatcagttcacttctcaaagaggacacatgatgattatttagggctagcttataaaaaggttatgtcaatccacaagaggcttccaccaggtggaatcctcgtatttgtcactggacaacgggaagtggagtacttgtgtaagaaactgcgaagagcatccaaggtgcaaactgctaagaatcctgggaaaactgatggtgaagacaatggtccatgcccaaaagtagatgaaaaggaaatttttgaagcatatgatattgacagagatgaacccgagcaccgatatgacatgttttcctcgtatgatgacgatggtatgtatgatgacgatggtatgaatgttgagacaaatattgattcttctgacaacgaaacggagagcgaaatggatactgaaaccgatgacgaagagtctgttactattgaaactacagaagaggatgttccagtattagcatttttgaaagatgctgagagctcatctgcgttgaaggcatcatttggagctttgtcgggaataccaaatgtgctggaaagtgtcgaggaattaagtgatgctaaatgtgaagaaaagaccagcacttcacttcgttgttttagtaaatgcacagaacataagcctgtttcacatggtagacttcgtgtcttgccactttatgcaaagttatcagcttcacaacagcttcaagtgtttgaagatgtcccagagggggaaagattagttgtggtggcaactaatgttgccgaaacctctctaacaattccaggcataaaatatgtagttgatactggaaaagaaaaggttaagaattatgatcatgctactgggatgtcaagttatgatgtccaatggataagcaaggcatcagcatcccagcgtgctggaagagcaggaagaacagggcctggccactgttaccgtctctactcagctgcagcatatggtaaagatgatttattccctgaattcgctgaacctcagattaagaaaattccagttgaaggtgttgtcctgatgctcaagttcatgtctattgataaggttgagaactttcctttcccaacaccaccaaacaaggaaagtttggttgaagctgagcgttgcttaaagacattggaagcacttcatagtgatggaaaacttacacctatgggcaaggcaatggcacagtaccccatgagcccaagacattctcgtcttcttcttacagtgattaagaatttgaagaataagcagcaaggctttgctagatctaacttcatattaggatatgctgctgctgctgcatcaggtttgaattttactaatccttttctcaagcaattggatgaatgtgacacttatggtgaatcagtagaaaacactaatctggaagctaatggtccatgggaaaggaagagacagaagaagctcaaggctgtggttagagaggcacgggaaaagttttctaaccctagcagtgatgctttaaccatcgctcgtgccctgcagttctttgagttgtcagaaaacccagtggaattctgcagagccaattcacttcatcttaaaaccatggaagagatgtcaaagttgagaaagcagcttctgcagttaatatttcgccatagcaaatggtgcgaggagtttgcttggaattcgggtgactctgctgaggttgaacgggcctggaggaacgagcccagtatattgcagttgaatgaagaggaacttcttgggcaaggaatttgcgctggatgggctgatagagttgcaaggaggattcacacctatttgaaaccatcagaagacgatcgaaaggttcgagccgttcgttatcagtcttgtgcacttgatgatacaatatatctgcaccgatcatcatctgtcgcccaagttgccccagagcttgtagtttactcggagctacttagtacaaagaggctatacatgcacggtgtaacgaccgtaaagccagggtggcttttgaagtatgctagttccctctgcaccttctctgcaccgttggaagatccgaagccgtactatgacccactgaacgaccaagtctactgctacgttagcccggtcttctctcgtcataactggcagcttccgttgcacagtttacctatcaaagacggtgcgagccggctgcaggtgtttgcatgcgcgttgcttaaaggggacgtcctgccatgtctacgggacgccaaggatttcctcgcgctgtcaccatccgctgtgttggggcctgccaggcaacggagagtgggagatcttcttagcaggatgaagatcggtccgaagttagtcgacagcagggcagcactgagaggcgtgtggaattttgatcctggttttctctatcctgagctcaagttgtggtaccaggatagattccatgaccagtttgacttggtgtgggagcagatgcaccaacaggttctccttgaggggcgcaagcttttcccaaagaggtccaagaaagttaaaggctaggccaaaatttttggtgcagttggttggctggcagaagcttttttgtgtgtgtggttttaaggaatagatacgagagatgcagtgagacatcatgcacaagcagttttgtctagacattttgccttgatctggatttgttccattgcatctccgtgttgaactgttgatgtacaccgttcctctgcaagcaaccttcaccctgccatctgtgtcagaaatgttttctgatccaaccatttgctcaaaaccttgaacctgaaaaatatcctgatatccaaccatcgccatggcccatggggattggagggaattggcttcgagtgagggccaggggtaggattcgccagaaacaaacaggggatggtcgtgcgcagattgattacatttctctcctttccgtctctcgctctatttgcttttagcatatgaagtgtccgattccaggggtaaaaacagcggtagagtcgatataaaaatgtagcactaaactatattaccctcagttcaagaaaa

SEQ ID NO: 215788 - DNA, 4799 bp, Zea Mays
gacgttttatgctattgggcctctcaaaggcccgaaaaaacacaggtcaccgtcctctcctctagcgccgcccatccatccagccgtccaacgcctactaccgccgccacccgcctcccgcctctcctctagccccagccgttcagcgccgcccgcctccctcctctcctcctctcctccctcctccagtgccgccacgacgctcgccactagcgccgttcgcctcctccaacgcccgagcaccgcctccctcctccctcctccagcgccgactgcccctaacaccgccctctagctcctctagcagccagcgtcgcttacagccatcaagttccagggcaggagtcaagacagtgaatcacccagctgctctattcggccggctgtgctcgtttcgtcccttgtgcgggagctttgtttgagatttgagtcgttgcagctaaatcatggaagatagtaatgccctgattttgccctgcaaaaggaagaacaaggcgcaagtgaaagccaaggatggtaagaaagccaagaaggaagacccaaagatgagcaagacgaagctcaaaaagctgcaaaaattggaggaggaaaagaaaaagaagctgctacaagctaaaagcatcgaggttttgcagaagcacaagatctcagaggatgcatattcactgcttcatgcttcagggactattggtcaagctgagactttgaaagaaaaacggaggcgtgctgtgcaattctcaaaggctggcctggatgttcctgaagaactctcactgttcaagaaaagcggtggtacgaaagttcctgaaaacagtgatgttggggagcaagtttccccattaaagtttgttgagccagcaccaattgtggattctggtagagaatgtaataacaaaatgaaggatctagtgaaagctattgaatgccaaccgattatgggttttggagctggcattccagagccagaaactgaagagcctagtgatgatgctcatatgttgacaaatcagaaaattcagttgtcaattccaagttgttctggagcagaattagatttgcagggtaaagaactaggacaagggcagcattctgtacaggagtgcataaatcctccaattgttgtacctgtgtcaagactgcatgaagttgagaaggcaaggagggatctcccaataataatgatggagcaagaaataatggaagctatctatgaaaattctgtagtaattctgtgcggagagactggctgcggtaaaactacccaggttccccagttcctatacgaagctggcttcggcactagtgaccgagctgatagaaaagggatgattggtatcacacaaccacggcgcgtagctgttcatgccacagctaagagggtttcctatgagttaggacttaagctgggaagagaagttggttttcaagttaggcatgatagaaaggtaggaagtgaatgctccatcaagttcatgacagatggtattttgctgcgagaaatccagggtgattttctgttgaagcgctattcagtgatcatattggatgaggcacacgaaaggagcttgaacacagatatacttattgggatgctttctagaattataaagattcgcaaggatttgtatgcaaagcagcaggaaaaattacggtctggatttaagatcaaaccagaggataagatcagtcagttaaaggtggtgctcatgagtgctactctgcagttaaaggactttatttcaaatagaaggttgtttggcgtgatcccaccagctgttaaggtacctgtgcggcagtttccagtatcagttcacttctcaaagaggacacatgatgattatttagggctagcttataaaaaggttatgtcaatccacaagaggcttccaccaggtggaatcctcgtatttgtcactggacaacgggaagtggagtacttgtgtaagaaactgcgaagagcatccaaggtgcaaactgctaagaatcctgggaaaactgatggtgaagacaatggtccatgcccaaaagtagatgaaaaggaaatttttgaagcatatgatattgacagagatgaacccgagcaccgatatgacatgttttcctcgtatgatgacgatggtatgtatgatgacgatggtatgaatgttgagacaaatattgattcttctgacaacgaaacggagagcgaaatggatactgaaaccgatgacgaagagtctgttactattgaaactacagaagaggatgttccagtattagcatttttgaaagatgctgagagctcatctgcgttgaaggcatcatttggagctttgtcgggaataccaaatgtgctggaaagtgtcgaggaattaagtgatgctaaatgtgaagaaaagaccagcacttcacttcgttgttttagtaaatgcacagaacataagcctgtttcacatggtagacttcgtgtcttgccactttatgcaaagttatcagcttcacaacagcttcaagtgtttgaagatgtcccagagggggaaagattagttgtggtggcaactaatgttgccgaaacctctctaacaattccaggcataaaatatgtagttgatactggaaaagaaaaggttaagaattatgatcatgctactgggatgtcaagttatgatgtccaatggataagcaaggcatcagcatcccagcgtgctggaagagcaggaagaacagggcctggccactgttaccgtctctactcagctgcagcatatggtaaagatgatttattccctgaattcgctgaacctcagattaagaaaattccagttgaaggtgttgtcctgatgctcaagttcatgtctattgataaggttgagaactttcctttcccaacaccaccaaacaaggaaagtttggttgaagctgagcgttgcttaaagacattggaagcacttcatagtgatggaaaacttacacctatgggcaaggcaatggcacagtaccccatgagcccaagacattctcgtcttcttcttacagtgattaagaatttgaagaataagcagcaaggctttgctagatctaacttcatattaggatatgctgctgctgctgcatcaggtttgaattttactaatccttttctcaagcaattggatgaatgtgacacttatggtgaatcagtagaaaacactaatctggaagctaatggtccatgggaaaggaagagacagaagaagctcaaggctgtggttagagaggcacgggaaaagttttctaaccctagcagtgatgctttaaccatcgctcgtgccctgcagttctttgagttgtcagaaaacccagtggaattctgcagagccaattcacttcatcttaaaaccatggaagagatgtcaaagttgagaaagcagcttctgcagttaatatttcgccatagcaaatggtgcgaggagtttgcttggaattcgggtgactctgctgaggttgaacgggcctggaggaacgagcccagtatattgcagttgaatgaagaggaacttcttgggcaaggaatttgcgctggatgggctgatagagttgcaaggaggattcacacctatttgaaaccatcagaagacgatcgaaaggttcgagccgttcgttatcagtcttgtgcacttgatgatacaatatatctgcaccgatcatcatctgtcgcccaagttgccccagagcttgtagtttactcggagctacttagtacaaagaggctatacatgcacggtgtaacgaccgtaaagccagggtggcttttgaagtatgctagttccctctgcaccttctctgcaccgttggaagatccgaagccgtactatgacccactgaacgaccaagtctactgctacgttagcccggtcttctctcgtcataactggcagcttccgttgcacagtttacctatcaaagacggtgcgagccggctgcaggtgtttgcatgcgcgttgcttaaaggggacgtcctgccatgtctacgggacgccaaggatttcctcgcgctgtcaccatccgctgtgttggggcctgccaggcaacggagagtgggagatcttcttagcaggatgaagatcggtccgaagttagtcgacagcagggcagcactgagaggcgtgtggaattttgatcctggttttctctatcctgagctcaagttgtggtaccaggatagattccatgaccagtttgacttggtgtgggagcagatgcaccaacaggttctccttgaggggcgcaagcttttcccaaagaggtccaagaaagttaaaggctaggccaaaatttttggtgcagttggttggctggcagaagcttttttgtgtgtgtggttttaaggaatagatacgagagatgcagtgagacatcatgcacaagcagttttgtctagacattttgccttgatctggatttgttccattgcatctccgtgttgaactgttgatgtacaccgttcctctgcaagcaaccttcaccctgccatctgtgtcagaaatgttttctgatccaaccatttgctcaaaaccttgaacctgaaaaatatcctgatatccaaccatcgccatggcccatggggattggagggaattggcttcgagtgagggccaggggtaggattcgccagaaacaaacaggggatggtcgtgcgcagattgattacatttctctcctttccgtctctcgctctatttgcttttagcatatgaagtgtccgattccaggggtaaaaacagcggtagagtcgatataaaaatgtagcactaaactatattaccctcagttcaagaaaa

SEQ ID NO: 215789 - DNA, 4825 bp, Zea Mays
gacgttttatgctattgggcctctcaaaggcccgaaaaaacacaggtcaccgtcctctcctctagcgccgcccatccatccagccgtccaacgcctactaccgccgccacccgcctcccgcctctcctctagccccagccgttcagcgccgcccgcctccctcctctcctcctctcctccctcctccagtgccgccacgacgctcgccactagcgccgttcgcctcctccaacgcccgagcaccgcctccctcctccctcctccagcgccgactgcccctaacaccgccctctagctcctctagcagccagcgtcgcttacagccatcaagttccagggcaggagtcaagacagtgaatcacccagctgctctattcgctaaatcatggaagatagtaatgccctgattttgccctgcaaaaggaagaacaaggcgcaagtgaaagccaaggatggtaagaaagccaagaaggaagacccaaagatgagcaagacgaagctcaaaaagctgcaaaaattggaggaggaaaagaaaaagaagctgctacaagctaaaagcatcgaggttttgcagaagcacaagatctcagaggatgcatattcactgcttcatgcttcagggactattggtcaagtatggcagatcaaccctaccacactaagaatttagttattttctgaatatatactagtgcatcatgcttcagggactattggtcaagctgagactttgaaagaaaaacggaggcgtgctgtgcaattctcaaaggctggcctggatgttcctgaagaactctcactgttcaagaaaagcggtggtacgaaagttcctgaaaacagtgatgttggggagcaagtttccccattaaagtttgttgagccagcaccaattgtggattctggtagagaatgtaataacaaaatgaaggatctagtgaaagctattgaatgccaaccgattatgggttttggagctggcattccagagccagaaactgaagagcctagtgatgatgctcatatgttgacaaatcagaaaattcagttgtcaattccaagttgttctggagcagaattagatttgcagggtaaagaactaggacaagggcagcattctgtacaggagtgcataaatcctccaattgttgtacctgtgtcaagactgcatgaagttgagaaggcaaggagggatctcccaataataatgatggagcaagaaataatggaagctatctatgaaaattctgtagtaattctgtgcggagagactggctgcggtaaaactacccaggttccccagttcctatacgaagctggcttcggcactagtgaccgagctgatagaaaagggatgattggtatcacacaaccacggcgcgtagctgttcatgccacagctaagagggtttcctatgagttaggacttaagctgggaagagaagttggttttcaagttaggcatgatagaaaggtaggaagtgaatgctccatcaagttcatgacagatggtattttgctgcgagaaatccagggtgattttctgttgaagcgctattcagtgatcatattggatgaggcacacgaaaggagcttgaacacagatatacttattgggatgctttctagaattataaagattcgcaaggatttgtatgcaaagcagcaggaaaaattacggtctggatttaagatcaaaccagaggataagatcagtcagttaaaggtggtgctcatgagtgctactctgcagttaaaggactttatttcaaatagaaggttgtttggcgtgatcccaccagctgttaaggtacctgtgcggcagtttccagtatcagttcacttctcaaagaggacacatgatgattatttagggctagcttataaaaaggttatgtcaatccacaagaggcttccaccaggtggaatcctcgtatttgtcactggacaacgggaagtggagtacttgtgtaagaaactgcgaagagcatccaaggtgcaaactgctaagaatcctgggaaaactgatggtgaagacaatggtccatgcccaaaagtagatgaaaaggaaatttttgaagcatatgatattgacagagatgaacccgagcaccgatatgacatgttttcctcgtatgatgacgatggtatgtatgatgacgatggtatgaatgttgagacaaatattgattcttctgacaacgaaacggagagcgaaatggatactgaaaccgatgacgaagagtctgttactattgaaactacagaagaggatgttccagtattagcatttttgaaagatgctgagagctcatctgcgttgaaggcatcatttggagctttgtcgggaataccaaatgtgctggaaagtgtcgaggaattaagtgatgctaaatgtgaagaaaagaccagcacttcacttcgttgttttagtaaatgcacagaacataagcctgtttcacatggtagacttcgtgtcttgccactttatgcaaagttatcagcttcacaacagcttcaagtgtttgaagatgtcccagagggggaaagattagttgtggtggcaactaatgttgccgaaacctctctaacaattccaggcataaaatatgtagttgatactggaaaagaaaaggttaagaattatgatcatgctactgggatgtcaagttatgatgtccaatggataagcaaggcatcagcatcccagcgtgctggaagagcaggaagaacagggcctggccactgttaccgtctctactcagctgcagcatatggtaaagatgatttattccctgaattcgctgaacctcagattaagaaaattccagttgaaggtgttgtcctgatgctcaagttcatgtctattgataaggttgagaactttcctttcccaacaccaccaaacaaggaaagtttggttgaagctgagcgttgcttaaagacattggaagcacttcatagtgatggaaaacttacacctatgggcaaggcaatggcacagtaccccatgagcccaagacattctcgtcttcttcttacagtgattaagaatttgaagaataagcagcaaggctttgctagatctaacttcatattaggatatgctgctgctgctgcatcaggtttgaattttactaatccttttctcaagcaattggatgaatgtgacacttatggtgaatcagtagaaaacactaatctggaagctaatggtccatgggaaaggaagagacagaagaagctcaaggctgtggttagagaggcacgggaaaagttttctaaccctagcagtgatgctttaaccatcgctcgtgccctgcagttctttgagttgtcagaaaacccagtggaattctgcagagccaattcacttcatcttaaaaccatggaagagatgtcaaagttgagaaagcagcttctgcagttaatatttcgccatagcaaatggtgcgaggagtttgcttggaattcgggtgactctgctgaggttgaacgggcctggaggaacgagcccagtatattgcagttgaatgaagaggaacttcttgggcaaggaatttgcgctggatgggctgatagagttgcaaggaggattcacacctatttgaaaccatcagaagacgatcgaaaggttcgagccgttcgttatcagtcttgtgcacttgatgatacaatatatctgcaccgatcatcatctgtcgcccaagttgccccagagcttgtagtttactcggagctacttagtacaaagaggctatacatgcacggtgtaacgaccgtaaagccagggtggcttttgaagtatgctagttccctctgcaccttctctgcaccgttggaagatccgaagccgtactatgacccactgaacgaccaagtctactgctacgttagcccggtcttctctcgtcataactggcagcttccgttgcacagtttacctatcaaagacggtgcgagccggctgcaggtgtttgcatgcgcgttgcttaaaggggacgtcctgccatgtctacgggacgccaaggatttcctcgcgctgtcaccatccgctgtgttggggcctgccaggcaacggagagtgggagatcttcttagcaggatgaagatcggtccgaagttagtcgacagcagggcagcactgagaggcgtgtggaattttgatcctggttttctctatcctgagctcaagttgtggtaccaggatagattccatgaccagtttgacttggtgtgggagcagatgcaccaacaggttctccttgaggggcgcaagcttttcccaaagaggtccaagaaagttaaaggctaggccaaaatttttggtgcagttggttggctggcagaagcttttttgtgtgtgtggttttaaggaatagatacgagagatgcagtgagacatcatgcacaagcagttttgtctagacattttgccttgatctggatttgttccattgcatctccgtgttgaactgttgatgtacaccgttcctctgcaagcaaccttcaccctgccatctgtgtcagaaatgttttctgatccaaccatttgctcaaaaccttgaacctgaaaaatatcctgatatccaaccatcgccatggcccatggggattggagggaattggcttcgagtgagggccaggggtaggattcgccagaaacaaacaggggatggtcgtgcgcagattgattacatttctctcctttccgtctctcgctctatttgcttttagcatatgaagtgtccgattccaggggtaaaaacagcggtagagtcgatataaaaatgtagcactaaactatattaccctcagttcaagaaaa

SEQ ID NO: 215790 - DNA, 4738 bp, Zea Mays
gacgttttatgctattgggcctctcaaaggcccgaaaaaacacaggtcaccgtcctctcctctagcgccgcccatccatccagccgtccaacgcctactaccgccgccacccgcctcccgcctctcctctagccccagccgttcagcgccgcccgcctccctcctctcctcctctcctccctcctccagtgccgccacgacgctcgccactagcgccgttcgcctcctccaacgcccgagcaccgcctccctcctccctcctccagcgccgactgcccctaacaccgccctctagctcctctagcagccagcgtcgcttacagccatcaagttccagggcaggagtcaagacagtgaatcacccagctgctctattcgctaaatcatggaagatagtaatgccctgattttgccctgcaaaaggaagaacaaggcgcaagtgaaagccaaggatggtaagaaagccaagaaggaagacccaaagatgagcaagacgaagctcaaaaagctgcaaaaattggaggaggaaaagaaaaagaagctgctacaagctaaaagcatcgaggttttgcagaagcacaagatctcagaggatgcatattcactgcttcatgcttcagggactattggtcaagctgagactttgaaagaaaaacggaggcgtgctgtgcaattctcaaaggctggcctggatgttcctgaagaactctcactgttcaagaaaagcggtggtacgaaagttcctgaaaacagtgatgttggggagcaagtttccccattaaagtttgttgagccagcaccaattgtggattctggtagagaatgtaataacaaaatgaaggatctagtgaaagctattgaatgccaaccgattatgggttttggagctggcattccagagccagaaactgaagagcctagtgatgatgctcatatgttgacaaatcagaaaattcagttgtcaattccaagttgttctggagcagaattagatttgcagggtaaagaactaggacaagggcagcattctgtacaggagtgcataaatcctccaattgttgtacctgtgtcaagactgcatgaagttgagaaggcaaggagggatctcccaataataatgatggagcaagaaataatggaagctatctatgaaaattctgtagtaattctgtgcggagagactggctgcggtaaaactacccaggttccccagttcctatacgaagctggcttcggcactagtgaccgagctgatagaaaagggatgattggtatcacacaaccacggcgcgtagctgttcatgccacagctaagagggtttcctatgagttaggacttaagctgggaagagaagttggttttcaagttaggcatgatagaaaggtaggaagtgaatgctccatcaagttcatgacagatggtattttgctgcgagaaatccagggtgattttctgttgaagcgctattcagtgatcatattggatgaggcacacgaaaggagcttgaacacagatatacttattgggatgctttctagaattataaagattcgcaaggatttgtatgcaaagcagcaggaaaaattacggtctggatttaagatcaaaccagaggataagatcagtcagttaaaggtggtgctcatgagtgctactctgcagttaaaggactttatttcaaatagaaggttgtttggcgtgatcccaccagctgttaaggtacctgtgcggcagtttccagtatcagttcacttctcaaagaggacacatgatgattatttagggctagcttataaaaaggttatgtcaatccacaagaggcttccaccaggtggaatcctcgtatttgtcactggacaacgggaagtggagtacttgtgtaagaaactgcgaagagcatccaaggtgcaaactgctaagaatcctgggaaaactgatggtgaagacaatggtccatgcccaaaagtagatgaaaaggaaatttttgaagcatatgatattgacagagatgaacccgagcaccgatatgacatgttttcctcgtatgatgacgatggtatgtatgatgacgatggtatgaatgttgagacaaatattgattcttctgacaacgaaacggagagcgaaatggatactgaaaccgatgacgaagagtctgttactattgaaactacagaagaggatgttccagtattagcatttttgaaagatgctgagagctcatctgcgttgaaggcatcatttggagctttgtcgggaataccaaatgtgctggaaagtgtcgaggaattaagtgatgctaaatgtgaagaaaagaccagcacttcacttcgttgttttagtaaatgcacagaacataagcctgtttcacatggtagacttcgtgtcttgccactttatgcaaagttatcagcttcacaacagcttcaagtgtttgaagatgtcccagagggggaaagattagttgtggtggcaactaatgttgccgaaacctctctaacaattccaggcataaaatatgtagttgatactggaaaagaaaaggttaagaattatgatcatgctactgggatgtcaagttatgatgtccaatggataagcaaggcatcagcatcccagcgtgctggaagagcaggaagaacagggcctggccactgttaccgtctctactcagctgcagcatatggtaaagatgatttattccctgaattcgctgaacctcagattaagaaaattccagttgaaggtgttgtcctgatgctcaagttcatgtctattgataaggttgagaactttcctttcccaacaccaccaaacaaggaaagtttggttgaagctgagcgttgcttaaagacattggaagcacttcatagtgatggaaaacttacacctatgggcaaggcaatggcacagtaccccatgagcccaagacattctcgtcttcttcttacagtgattaagaatttgaagaataagcagcaaggctttgctagatctaacttcatattaggatatgctgctgctgctgcatcaggtttgaattttactaatccttttctcaagcaattggatgaatgtgacacttatggtgaatcagtagaaaacactaatctggaagctaatggtccatgggaaaggaagagacagaagaagctcaaggctgtggttagagaggcacgggaaaagttttctaaccctagcagtgatgctttaaccatcgctcgtgccctgcagttctttgagttgtcagaaaacccagtggaattctgcagagccaattcacttcatcttaaaaccatggaagagatgtcaaagttgagaaagcagcttctgcagttaatatttcgccatagcaaatggtgcgaggagtttgcttggaattcgggtgactctgctgaggttgaacgggcctggaggaacgagcccagtatattgcagttgaatgaagaggaacttcttgggcaaggaatttgcgctggatgggctgatagagttgcaaggaggattcacacctatttgaaaccatcagaagacgatcgaaaggttcgagccgttcgttatcagtcttgtgcacttgatgatacaatatatctgcaccgatcatcatctgtcgcccaagttgccccagagcttgtagtttactcggagctacttagtacaaagaggctatacatgcacggtgtaacgaccgtaaagccagggtggcttttgaagtatgctagttccctctgcaccttctctgcaccgttggaagatccgaagccgtactatgacccactgaacgaccaagtctactgctacgttagcccggtcttctctcgtcataactggcagcttccgttgcacagtttacctatcaaagacggtgcgagccggctgcaggtgtttgcatgcgcgttgcttaaaggggacgtcctgccatgtctacgggacgccaaggatttcctcgcgctgtcaccatccgctgtgttggggcctgccaggcaacggagagtgggagatcttcttagcaggatgaagatcggtccgaagttagtcgacagcagggcagcactgagaggcgtgtggaattttgatcctggttttctctatcctgagctcaagttgtggtaccaggatagattccatgaccagtttgacttggtgtgggagcagatgcaccaacaggttctccttgaggggcgcaagcttttcccaaagaggtccaagaaagttaaaggctaggccaaaatttttggtgcagttggttggctggcagaagcttttttgtgtgtgtggttttaaggaatagatacgagagatgcagtgagacatcatgcacaagcagttttgtctagacattttgccttgatctggatttgttccattgcatctccgtgttgaactgttgatgtacaccgttcctctgcaagcaaccttcaccctgccatctgtgtcagaaatgttttctgatccaaccatttgctcaaaaccttgaacctgaaaaatatcctgatatccaaccatcgccatggcccatggggattggagggaattggcttcgagtgagggccaggggtaggattcgccagaaacaaacaggggatggtcgtgcgcagattgattacatttctctcctttccgtctctcgctctatttgcttttagcatatgaagtgtccgattccaggggtaaaaacagcggtagagtcgatataaaaatgtagcactaaactatattaccctcagttcaagaaaa

SEQ ID NO: 215791 - DNA, 3135 bp, Zea Mays
gtatgctgctcttttattttttttgaacgcaaatattgctcttttatttgtattcatattcactaacaagtgtctttctttttttatgggattctctttgcaaactactgttcccatgcaaagataatcccataaaacagatacgccttgtaactactatctgtaaacagtccagtgtttggcagtccaagcctaaatggaataaaatcatgtggggaacaatccccccctgttgagcttttaaaaaatgattaatgtgcatgggtttcttcaactgaattttgtttcaaggatctgggaaatgattttttttggcctgcaacactgaagataggtcatgctgtcatgcttgatttcctcataaaatgcgtattcatgcaggtcttcatagccatttcgattatacttggagatggcctatacaacttggttaagatatttattgtcattgctagagaattatgcagcatgcaatcgaaacaacatgagctgcctgttcaagctctggaagccttcgacatcggcgaccctgacggggagtacaaggccccctttgccatcatgttccgggagatggccatcctcgggatggagggcttctccgcgctgccactgcactgccttgacatctgctatgccgccttcttcctcgccttggccaccagtctcctcaaggacgtggcgcccgcaaacgtgtccaggttcatccccataccgatcgctatggctgcgccgttctacgttggcgcctactttggcgtggacatgttcataggcacggcgatcttgtacgcctggcagaagctgaaccgggagcaggctgatggttacgcggtggctgtggcgtccgggctgatctgtggagatgggatctggagcatcccttctgctcttctgtccatcctgggagctgttccacccatctgcatgtcgttcgaggcttcctctgctcccaggtgagagatgaacaatacgcagaagtttttattactggccatatgtttgcgccattgatgaaaccatatggattgtaacacaaaggaggtgttagttgttcgtaatttgtacctccgatgattttatatgaaacaaaaacacgtctttgcatgtaatgtaaatacatacattctctggtttgaaacttcgaatacacatcgtagatttttcattttaaacaactatacaacataagcatcaactgtaatgttgtgttctatacacgtgctctgttgtgatacatcgattgcctgtaatgatcactggctctaagacctgtatggagcattgcttcaacttgttttttttttacaaggcaatgacgaatggaccagcagaggccacctgccctgcttagaagctcacaggtagagctctgcatccccaggacaacactccacgtgccctgcagcctgtgacgtgtcaagctgtgaggacaccacgcagtcatgcttctccttcccgcgtctctcacatcatatggagcacaggggcgagcggcagcagcagaaggtcggcagcagccatggagatgctgagcatgctgaaggtggggtacaccatcctgcgcagcgagacgcccgcgacagacctcgtcaacaccttcatggactgggcggcgcgcaggtcccttatgctcctggccatcttcctcccgccgtactacatctacaagctcaccacgtctgcgttcgctgctgccgtgccagaggacgtcgcagggaaggttgtgctcatcaccggcgccgcctccggcatcggccaggtagcgagactggcgctagtggcgaggatggtgggaagcctgcatgatgtcgcggcgagagccagggatggcggctcgccagacgttctggttgttgccggggacgttgcgaaaccagaggattgccggaggtttgtgcaggccacagttgaacatttcggccgattggatcatcttgtgaacaacgctggtgtagcaaatgtctgctggtttgaggacgtaccggatgttgctgctttgaagcgagtcctggccgtgaacttctggggcgcagttcatgcgacccactgcgctcttccccatctgaagaagagcggcggtgggaaggtcttcgtcaactcctcggctgcggcggcgctggcaatgccaggaatgagcctctacaatgtactgcgcatttcttgacagaaaaccagatcgtccctgctgtctccggcgcgtgtgcgctcgatgcccaaacaaatttgagtggatgcatgctattgcaggccagcgaggctgctgttctcaacttcttcgagaccctgcgggtcgagctccgcgacgaggtcggcatcaccatcgcgacttccgggtggatcgtgtcggagatgaccggagggaagcagctgtccaaggaagggacggtggaggtcgatccatagacacactgacgatgacaatatgctgaccgaatgaatggtgtgtcttgaatcttgatcgttttgttcgtcctcaggtcgccgtgcggtgcgccgaggccaccgtggacgccatctgccgcggccggcgccacctcaccgtcccgctgtggtaccgggcgctgttcctgtggcgggcgctcgcgcccgaggtggtggagttcagccagagactgttgtgccgacggaccgcgggcggccgcggtcatcaggcgaagggcaagaggttgcaggaggtcaccggcgccgtccagccggcgccgctgcacagctcggacatcaaacgggagtagtcgtaggcttcggtaaggcagctggcagtgacatggtgctagctgctgcttgtctgttcggtcaaatgtggacgagttgtaaatcagctgtcaccttcgttcgttgtgtgactttaaacttcgtgcatacagtatgttgttgtcccgatttttcttcgtgtgggcggagttattgcattgcatagatagattgctctaaaatccgtagtacgctaggccaatcactaggctaggtgcaacaaaacaaatatacgtgtgagctgctaaaagtcacttgtttttttagttttgctacaactctttttttttaaaaaaaagagacgacgagtatactaaaaatagagattcgttgcagtttatatattttggtttcaagaataaagaaacggttggaaaatca

SEQ ID NO: 215792 - DNA, 3601 bp, Zea Mays
aagagataggctagagattaacagagggtgctccgcctcctacatctttgctatggacaggaagacttatgagctcgtgggaccagactatcccggtaatcgagccgaagatgttaaggatccttcacttggctggatgatcagtttcttgttcctcattgctctcgttgggccatttagcattgtcttgcttcgaaaggtaatggtgattgattacaagcttgcattccctggtggaacagctacagctttgatgatcaatagcttgcatgggaaaacggatggtgatcttgcagggaaaaagctgcactgccttgtaaaatacatgggcattagttttgtttggagcttctttaaatggttctttagtggtgttggtgactcttgtggttttgacaatttcccaacatttgggcttgaagcttttaaaagcacgttttatttcgacttcagtcctagttatgtcgggtttggttttatttcccctcatattgtaaactgctcagttttccttggatctgtcatatcttggggctttctttggccatttattagtgcacaagctggtcattggtacccagataaccttggtaacagtgatttcagaggcctatatggttataaggtcttcatagccatttcgattatacttggagatggcctatacaacttggttaagatatttattgtcattgctagagaattatgcagcatgcaatcgaaacaacatgagctgcctgttcaagctctggaagatgacgggagttgtgaacaactagcagatgagaaactacaaacagagatattcctcaaagatagtatatctccttggtttgctgcttctggttacattgtcctggcagcaatatccaccgccagtgtgcccgccatatttccccagctcaagtggtaccttgtcctcctgtgctacttcttcgctcccgtggttgcgttctgcaactcctacggaatgggcctcaccaacctgaaccttgccccgacctacggcaagatcgccctcttcgcgttggcctcgctcgtcggcagtgatggcggtggagtcatcgccggccttgcagcctgtggcatcgtaatgtccgttgcctgttccacagccgatctaatgcaggacttgaagagcgggtacctgaccctctcgtcgccgcggtcgatgttcactgcccagctgatcggcatcgcgctcgggtgcgtcatagctccgctcacgctgtggctcttctggacagccttcgacatcggcgaccctgacggggagtacaaggccccctttgccatcatgttccgggagatggccatcctcgggatggagggcttctccgcgctgccactgcactgccttgacatctgctatgccgccttcttcctcgccttggccaccagtctcctcaaggacgtggcgcccgcaaacgtgtccaggttcatccccataccgatcgctatggctgcgccgttctacgttggcgcctactttggcgtggacatgttcataggcacggcgatcttgtacgcctggcagaagctgaaccgggagcaggctgatggttacgcggtggctgtggcgtccgggctgatctgtggagatgggatctggagcatcccttctgctcttctgtccatcctgggagctgttccacccatctgcatgtcgttcgaggcttcctctgctcccaggtgagagatgaacaatacgcagaagtttttattactggccatatgtttgcgccattgatgaaaccatatggattgtaacacaaaggaggtgttagttgttcgtaatttgtacctccgatgattttatatgaaacaaaaacacgtctttgcatgtaatgtaaatacatacattctctggtttgaaacttcgaatacacatcgtagatttttcattttaaacaactatacaacataagcatcaactgtaatgttgtgttctatacacgtgctctgttgtgatacatcgattgcctgtaatgatcactggctctaagacctgtatggagcattgcttcaacttgttttttttttacaaggcaatgacgaatggaccagcagaggccacctgccctgcttagaagctcacaggtagagctctgcatccccaggacaacactccacgtgccctgcagcctgtgacgtgtcaagctgtgaggacaccacgcagtcatgcttctccttcccgcgtctctcacatcatatggagcacaggggcgagcggcagcagcagaaggtcggcagcagccatggagatgctgagcatgctgaaggtggggtacaccatcctgcgcagcgagacgcccgcgacagacctcgtcaacaccttcatggactgggcggcgcgcagaggacgtcgcagggaaggttgtgctcatcaccggcgccgcctccggcatcggccaggtagcgagactggcgctagtggcgaggatggtgggaagcctgcatgatgtcgcggcgagagccagggatggcggctcgccagacgttctggttgttgccggggacgttgcgaaaccagaggattgccggaggtttgtgcaggccacagttgaacatttcggccgattggatcatcttgtgaacaacgctggtgtagcaaatgtctgctggtttgaggacgtaccggatgttgctgctttgaagcgagtcctggccgtgaacttctggggcgcagttcatgcgacccactgcgctcttccccatctgaagaagagcggcggtgggaaggtcttcgtcaactcctcggctgcggcggcgctggcaatgccaggaatgagcctctacaatgccagcgaggctgctgttctcaacttcttcgagaccctgcgggtcgagctccgcgacgaggtcggcatcaccatcgcgacttccgggtggatcgtgtcggagatgaccggagggaagcagctgtccaaggaagggacggtggaggtcgccgtgcggtgcgccgaggccaccgtggacgccatctgccgcggccggcgccacctcaccgtcccgctgtggtaccgggcgctgttcctgtggcgggcgctcgcgcccgaggtggtggagttcagccagagactgttgtgccgacggaccgcgggcggccgcggtcatcaggcgaagggcaagaggttgcaggaggtcaccggcgccgtccagccggcgccgctgcacagctcggacatcaaacgggagtagtcgtaggcttcggtaaggcagctggcagtgacatggtgctagctgctgcttgtctgttcggtcaaatgtggacgagttgtaaatcagctgtcaccttcgttcgttgtgtgactttaaacttcgtgcatacagtatgttgttgtcccgatttttcttcgtgtgggcggagttattgcattgcatagatagattgctctaaaatccgtagtacgctaggccaatcactaggctaggtgcaacaaaacaaatatacgtgtgagctgctaaaagtcacttgtttttttagttttgctacaactctttttttttaaaaaaaagagacgacgagtatactaaaaatagagattcgttgcagtttatatattttggtttcaagaataaagaaacggttggaaaatca

SEQ ID NO: 215793 - DNA, 3820 bp, Zea Mays
ctgacacctcgatatcgagacgagggtgctccgcctcctacatctttgctatggacaggaagacttatgagctcgtgggaccagactatcccggtaatcgagccgaagatgttaaggatccttcacttggctggatgatcagtttcttgttcctcattgctctcgttgggccatttagcattgtcttgcttcgaaaggtaatggtgattgattacaagcttgcattccctggtggaacagctacagctttgatgatcaatagcttgcatgggaaaacggatggtgatcttgcagggtaaggcaacaggaaaaagctgcactgccttgtaaaatacatgggcattagttttgtttggagcttctttaaatggttctttagtggtgttggtgactcttgtggttttgacaatttcccaacatttgggcttgaagcttttaaaagcacgttttatttcgacttcagtcctagttatgtcgggtttggttttatttcccctcatattgtaaactgctcagttttccttggatctgtcatatcttggggctttctttggccatttattagtgcacaagctggtcattggtacccagataaccttggtaacagtgatttcagaggcctatatggttataaggtcttcatagccatttcgattatacttggagatggcctatacaacttggttaagatatttattgtcattgctagagaattatgcagcatgcaatcgaaacaacatgagctgcctgttcaagctctggaaggtaaacatgttacttcttagttgtagtgcaatgcgttggccacatgctgtgagattaattttgtggcttgtgagttgcgaacattagttgcacaatatatagctcatctaatatgccgtcttacgaaaagctgacatgcccatagtatttgtccaatgcatgtttcgtcatctcatctgcagatgacgggagttgtgaacaactagcagatgagaaactacaaacagagatattcctcaaagatagtatatctccttggtttgctgcttctggttacattgtcctggcagcaatatccaccgccagtgtgcccgccatatttccccagctcaagtggtaccttgtcctcctgtgctacttcttcgctcccgtggttgcgttctgcaactcctacggaatgggcctcaccaacctgaaccttgccccgacctacggcaagatcgccctcttcgcgttggcctcgctcgtcggcagtgatggcggtggagtcatcgccggccttgcagcctgtggcatcgtaatgtccgttgcctgttccacagccgatctaatgcaggacttgaagagcgggtacctgaccctctcgtcgccgcggtcgatgttcactgcccagctgatcggcatcgcgctcgggtgcgtcatagctccgctcacgctgtggctcttctggacagccttcgacatcggcgaccctgacggggagtacaaggccccctttgccatcatgttccgggagatggccatcctcgggatggagggcttctccgcgctgccactgcactgccttgacatctgctatgccgccttcttcctcgccttggccaccagtctcctcaaggacgtggcgcccgcaaacgtgtccaggttcatccccataccgatcgctatggctgcgccgttctacgttggcgcctactttggcgtggacatgttcataggcacggcgatcttgtacgcctggcagaagctgaaccgggagcaggctgatggttacgcggtggctgtggcgtccgggctgatctgtggagatgggatctggagcatcccttctgctcttctgtccatcctgggagctgttccacccatctgcatgtcgttcgaggcttcctctgctcccaggtgagagatgaacaatacgcagaagtttttattactggccatatgtttgcgccattgatgaaaccatatggattgtaacacaaaggaggtgttagttgttcgtaatttgtacctccgatgattttatatgaaacaaaaacacgtctttgcatgtaatgtaaatacatacattctctggtttgaaacttcgaatacacatcgtagatttttcattttaaacaactatacaacataagcatcaactgtaatgttgtgttctatacacgtgctctgttgtgatacatcgattgcctgtaatgatcactggctctaagacctgtatggagcattgcttcaacttgttttttttttacaaggcaatgacgaatggaccagcagaggccacctgccctgcttagaagctcacaggtagagctctgcatccccaggacaacactccacgtgccctgcagcctgtgacgtgtcaagctgtgaggacaccacgcagtcatgcttctccttcccgcgtctctcacatcatatggagcacaggggcgagcggcagcagcagaaggtcggcagcagccatggagatgctgagcatgctgaaggtggggtacaccatcctgcgcagcgagacgcccgcgacagacctcgtcaacaccttcatggactgggcggcgcgcagaggacgtcgcagggaaggttgtgctcatcaccggcgccgcctccggcatcggccagcaaatagcttaccagtacgcaaagaaggtagcgagactggcgctagtggcgaggatggtgggaagcctgcatgatgtcgcggcgagagccagggatggcggctcgccagacgttctggttgttgccggggacgttgcgaaaccagaggattgccggaggtttgtgcaggccacagttgaacatttcggccgattggatcatcttgtgaacaacgctggtgtagcaaatgtctgctggtttgaggacgtaccggatgttgctgctttgaagcgagtcctggccgtgaacttctggggcgcagttcatgcgacccactgcgctcttccccatctgaagaagagcggcggtgggaaggtcttcgtcaactcctcggctgcggcggcgctggcaatgccaggaatgagcctctacaatgccagcgaggctgctgttctcaacttcttcgagaccctgcgggtcgagctccgcgacgaggtcggcatcaccatcgcgacttccgggtggatcgtgtcggagatgaccggagggaagcagctgtccaaggaagggacggtggaggtcgccgtgcggtgcgccgaggccaccgtggacgccatctgccgcggccggcgccacctcaccgtcccgctgtggtaccgggcgctgttcctgtggcgggcgctcgcgcccgaggtggtggagttcagccagagactgttgtgccgacggaccgcgggcggccgcggtcatcaggcgaagggcaagaggttgcaggaggtcaccggcgccgtccagccggcgccgctgcacagctcggacatcaaacgggagtagtcgtaggcttcggtaaggcagctggcagtgacatggtgctagctgctgcttgtctgttcggtcaaatgtggacgagttgtaaatcagctgtcaccttcgttcgttgtgtgactttaaacttcgtgcatacagtatgttgttgtcccgatttttcttcgtgtgggcggagttattgcattgcatagatagattgctctaaaatccgtagtacgctaggccaatcactaggctaggtgcaacaaaacaaatatacgtgtgagctgctaaaagtcacttgtttttttagttttgctacaactctttttttttaaaaaaaagagacgacgagtatactaaaaatagagattcgttgcagtttatatattttggtttcaagaataaagaaacggttggaaaatca

SEQ ID NO: 215794 - DNA, 4919 bp, Zea Mays
tttactcacactagtctgctcctcaggttttgcagatttaacacttcttatcatggatggcaagtgcaaagtcaataaggaaatagatggcccccttggaccacctcctcggtaagggggacttaaattctcaccaaaagtacctcagaagaaacttgtcaaggttgtctttgatagggaaccagttgaggagagcaaggaagaagatgtggataaggagtaattgatgaaacttaagatgtcacagcttgcctcattttgcagaacaagtattcctctacaagaattaagtctgaggaaaaagcaaaaagcggtacaaaggttgcatttggacaaggaaactcttcttatgcaagatattttcccatgcccaaaaaggattcttcagcaggtggaacttcgaagttaccaaaagaatatgcagaaccatgggattatacccatgattatcatgttactctcccactactctggaaatcctggtatattttttttagtctttagtcgaaattgcaagacattttcttcaactaaccccaccattcctacatcactgacacagaagttctggatgaggaagagtttggagaatcctctgccagcaggactgaagatgacaaattgccctatgcagtactaaggaagtcacattaactaactgtgcaggtttcatttggctcgaactgcatgtttccccaggaggttgcagcaaccaacaccagagaaaaacattgctgtacggtggggggagagcagcaagcgtgcctgtcgtcgccccggatattgactccatgttgggttctgttgacaagatgaaagaatagtccattttgtattatgccattacaagagagttttgctcccttatagagatgtgcagctacatgctggatacccagtcaaacaagggacaccaacgaaaggatgtctccttggacaactacagcactcagagatggaataggcattctgatcgtagtagtcatcttggatgcgacgttgcaaaggatgggatagaagaatcgcacatctgacgggagaaaacgcgagcaagcccttgcttgaccagtctcaagaaagctcgtctacggctctgctcctcgccggcgatgacgcccgcggagacctccccgccggcgccacctccacgtgcttctcaccctgtctcctccccgctcctcctacaagaccccacaacccaggccacgtgcccttggagggagcagctcaccgtccgtggcgtcgccgtggctgcggcgctgggcgcgctgctctgcgtggtaatccaccgcctcaacctcaccgtcggggttataccggcgcttaacgtcgcgtcgggcctcctcgccttcttcctcgccgcggcgtggcgtgctgccgccgggtggctagggtttggccgcgggccgcccttcacgaggcaggagaacaccgtcatccagacgtgcgccatagcatgcgccggcctcgcgtttagcgggtgctccgcctcctacatctttgctatggacaggaagacttatgagctcgtgggaccagactatcccggtaatcgagccgaagatgttaaggatccttcacttggctggatgatcagtttcttgttcctcattgctctcgttgggccatttagcattgtcttgcttcgaaaggtaatggtgattgattacaagcttgcattccctggtggaacagctacagctttgatgatcaatagcttgcatgggaaaacggatggtgatcttgcagggaaaaagctgcactgccttgtaaaatacatgggcattagttttgtttggagcttctttaaatggttctttagtggtgttggtgactcttgtggttttgacaatttcccaacatttgggcttgaagcttttaaaagcacgttttatttcgacttcagtcctagttatgtcgggtttggttttatttcccctcatattgtaaactgctcagttttccttggatctgtcatatcttggggctttctttggccatttattagtgcacaagctggtcattggtacccagataaccttggtaacagtgatttcagaggcctatatggttataaggtcttcatagccatttcgattatacttggagatggcctatacaacttggttaagatatttattgtcattgctagagaattatgcagcatgcaatcgaaacaacatgagctgcctgttcaagctctggaagccttcgacatcggcgaccctgacggggagtacaaggccccctttgccatcatgttccgggagatggccatcctcgggatggagggcttctccgcgctgccactgcactgccttgacatctgctatgccgccttcttcctcgccttggccaccagtctcctcaaggacgtggcgcccgcaaacgtgtccaggttcatccccataccgatcgctatggctgcgccgttctacgttggcgcctactttggcgtggacatgttcataggcacggcgatcttgtacgcctggcagaagctgaaccgggagcaggctgatggttacgcggtggctgtggcgtccgggctgatctgtggagatgggatctggagcatcccttctgctcttctgtccatcctgggagctgttccacccatctgcatgtcgttcgaggcttcctctgctcccaggtgagagatgaacaatacgcagaagtttttattactggccatatgtttgcgccattgatgaaaccatatggattgtaacacaaaggaggtgttagttgttcgtaatttgtacctccgatgattttatatgaaacaaaaacacgtctttgcatgtaatgtaaatacatacattctctggtttgaaacttcgaatacacatcgtagatttttcattttaaacaactatacaacataagcatcaactgtaatgttgtgttctatacacgtgctctgttgtgatacatcgattgcctgtaatgatcactggctctaagacctgtatggagcattgcttcaacttgttttttttttacaaggcaatgacgaatggaccagcagaggccacctgccctgcttagaagctcacaggtagagctctgcatccccaggacaacactccacgtgccctgcagcctgtgacgtgtcaagctgtgaggacaccacgcagtcatgcttctccttcccgcgtctctcacatcatatggagcacaggggcgagcggcagcagcagaaggtcggcagcagccatggagatgctgagcatgctgaaggtggggtacaccatcctgcgcagcgagacgcccgcgacagacctcgtcaacaccttcatggactgggcggcgcgcaggtcccttatgctcctggccatcttcctcccgccgtactacatctacaagctcaccacgtctgcgttcgctgctgccgtgccagaggacgtcgcagggaaggttgtgctcatcaccggcgccgcctccggcatcggccaggtatgccaaccagtaactcctttgtgtacgcgtatttttgctgaaacaaactaaaccatggattcccatagatcttttcatgtcattttccttaataacaataacaacatcaccgacgacttcgattgcaaaaagggggattttgacttgcactaattgtgatgcgtaactcatggctaaacaaacgccaacatgctattgtgctttgccatgagctcgtagtcgtatctgtatgactgtatcccagcaaatagcttaccagtacgcaaagaaggtagcgagactggcgctagtggcgaggatggtgggaagcctgcatgatgtcgcggcgagagccagggatggcggctcgccagacgttctggttgttgccggggacgttgcgaaaccagaggattgccggaggtttgtgcaggccacagttgaacatttcggccgattggatcatcttgtgaacaacgctggtgtagcaaatgtctgctggtttgaggacgtaccggatgttgctgctttgaagcgagtcctggccgtgaacttctggggcgcagttcatgcgacccactgcgctcttccccatctgaagaagagcggcggtgggaaggtcttcgtcaactcctcggctgcggcggcgctggcaatgccaggaatgagcctctacaatgccagcgaggctgctgttctcaacttcttcgagaccctgcgggtcgagctccgcgacgaggtcggcatcaccatcgcgacttccgggtggatcgtgtcggagatgaccggagggaagcagctgtccaaggaagggacggtggaggtcgccgtgcggtgcgccgaggccaccgtggacgccatctgccgcggccggcgccacctcaccgtcccgctgtggtaccgggcgctgttcctgtggcgggcgctcgcgcccgaggtggtggagttcagccagagactgttgtgccgacggaccgcgggcggccgcggtcatcaggcgaagggcaagaggttgcaggaggtcaccggcgccgtccagccggcgccgctgcacagctcggacatcaaacgggagtagtcgtaggcttcggtaaggcagctggcagtgacatggtgctagctgctgcttgtctgttcggtcaaatgtggacgagttgtaaatcagctgtcaccttcgttcgttgtgtgactttaaacttcgtgcatacagtatgttgttgtcccgatttttcttcgtgtgggcggagttattgcattgcatagatagattgctctaaaatccgtagtacgctaggccaatcactaggctaggtgcaacaaaacaaatatacgtgtgagctgctaaaagtcacttgtttttttagttttgctacaactctttttttttaaaaaaaagagacgacgagtatactaaaaatagagattcgttgcagtttatatattttggtttcaagaataaagaaacggttggaaaatca

SEQ ID NO: 215795 - DNA, 1756 bp, Zea Mays
ccgtaaacccacccacaccccctgctccttttaagcagccccgctcgctctccgcagtgaccgatagaacacgacctggggggttcagatcggatcggaagcttccataagtttccatcgggcttcgccggtatggcgatccgcaaggggtcttcgtacgccgtcgcggcacttctcgcgctcgcctctgtcgccgccgttgcaggggaggtcttcttccaggagaagttcgaagatggctgggaaagtcggtgggtcaagtccgagtggaagaaggatgagaacatggctggtgaatggaaccacacctcgggaaaatggaatggagatgccgaggacaaaggtattcaaacctccgaggattacaggttctatgccatttcagccgaataccctgagttcagcaacaaggataagaccctggtgctgcagttctctgtgaagcacgagcagaagcttgactgcggtggtggctacgtcaagttgctgggtggtggtgatgtagaccagaagaaatttggtggagacacatcttacagcattatgtttggaccagatatctgtgggtacagcaccaagaaggttcacactatcctgaccaaggatggcaagaaccacttgatcaagaaggatgtgccttgtgagactgatcagttgactcatgtttacactttgatcatccgtcctgatgcaacatacagcattctcattgataatgaagataagcaaactggcagcatctacgagcactgggatattcttccccctaagaaaatcaaggacccagaggctaagaagcctgaggactgggacgatgaggaagatggtgaatggactgcccctaccattcccaacccagaatacaagggaccatggaaacaaaagaaaatcaagaacccgaactaccagggtaaatggaaggcacctatgattgacaacccagattttaaggatgatccatacatttacgccttcgacagcttgaagtacattggcattgagctgtggcaggttaaatcgggcactctgtttgacaacatcatcatcactgatgaccctgccttggccaagacttttgcagaggagacctggggcaagcacaaggaggcagaaaaggctgcttttgatgaggccgagaaaaaaaaggaagaagaggatgccgccaagggtggggatgatgaggatgatgacctagaggatgaggaagacgatgagaaggcagacgaggacaaggccgactctgatgccgaggatggcaaggattctgatgatgagaagcacgacgagctctagatggcgaggatgatgttgcggccgctggcctagatttatcagctctgccactatgaagttctttttttttcccgtgaccaccaagaatgtagaacactgctaataagcagatggacagtttgggtcgccgtagcgctttgtagtcatttttcccattaaagccgataacactgaacaaggaggaaggatcttttgcccacgattgttatctccctttctgatgttaaatgtgagcctttgcgaaagcactggttccgtcacgcgtgtggactttgcatgtgcggcgtgtttaggttgaggatcgtcgtgccgttttcgcgtagggaaacgttcgtgcctgatcactgttctagctatcgatatggtctcttttcaggcaaactcgctccgtttcctcctctcagtgttactgattttgcctggtataagatttgttattttttttattgggcccgtccatata

SEQ ID NO: 215796 - DNA, 1865 bp, Zea Mays
ctcaccttcattggacccagccgtcagggagacaagcacttgcggtgagcccaccatgcagtgaccgatagaacacgacctggggggttcagatcggatcggaagcttccataagtttccatcgggcttcgccggtatggcgatccgcaaggggtcttcgtacgccgtcgcggcacttctcgcgctcgcctctgtcgccgccgttgcaggggaggtcttcttccaggagaagttcgaagatggctgggaaagtcggtgggtcaagtccgagtggaagaaggatgagaacatggctggtgaatggaaccacacctcgggaaaatggaatggagatgccgaggacaaaggtattcaaacctccgaggattacaggttctatgccatttcagccgaataccctgagttcagcaacaaggataagaccctggtgctgcagttctctgtgaagcacgagcagaagcttgactgcggtggtggctacgtcaagttgctgggtggtggtgatgtagaccagaagaaatttggtggagacacatcttacagcattatgtttggaccagatatctgtgggtacagcaccaagaaggttcacactatcctgaccaaggatggcaagaaccacttgatcaagaaggatgtgccttgtgagactgatcagttgactcatgtttacactttgatcatccgtcctgatgcaacatacagcattctcattgataatgaagataagcaaactggcagcatctacgagcactgggatattcttccccctaagaaaatcaaggacccagaggctaagaagcctgaggactgggatgacaaggagtacattcctgaccctgaggacaagaagccagagggctatgatgatattcccaaggaaattcctgaccctgatgctaagaagcctgaggactgggacgatgaggaagatggtgaatggactgcccctaccattcccaacccagaatacaagggaccatggaaacaaaagaaaatcaagaacccgaactaccagggtaaatggaaggcacctatgattgacaacccagattttaaggatgatccatacatttacgccttcgacagcttgaagtacattggcattgagctgtggcaggttaaatcgggcactctgtttgacaacatcatcatcactgatgaccctgccttggccaagacttttgcagaggagacctggggcaagcacaaggaggcagaaaaggctgcttttgatgaggccgagaaaaaaaaggaagaagaggatgccgccaagggtggggatgatgaggatgatgacctagaggatgaggaagacgatgagaaggcagacgaggacaaggccgactctgatgccgaggatggcaaggattctgatgatgagaagcacgacgagctctagatggcgaggatgatgttgcggccgctggcctagatttatcagctctgccactatgaagttctttttttttcccgtgaccaccaagaatgtagaacactgctaataagcagatggacagtttgggtcgccgtagcgctttgtagtcatttttcccattaaagccgataacactgaacaaggaggaaggatcttttgcccacgattgttatctccctttctgatgttaaatgtgagcctttgcgaaagcactggttccgtcacgcgtgtggactttgcatgtgcggcgtgtttaggttgaggatcgtcgtgccgttttcgcgtagggaaacgttcgtgcctgatcactgttctagctatcgatatggtctcttttcaggcaaactcgctccgtttcctcctctcagtgttactgattttgcctggtataagatttgttattttttttattgggcccgtccatata

SEQ ID NO: 215797 - DNA, 2346 bp, Zea Mays
ctggaatggggtttcagctgttcctattaatgttagcatgaggagcatcttactgaagcggctccatgtttggtcgtctacaccaggcagcagagcagattcgcccctgctgaaaacgcactcgatggcgtccgcgacgggggtttcctcctcggagatggcggtggaccacgcgacggggccgggcgccgtggagaagccgcggttcgatgctctgacgccgaatgagatgagcggcgggaggccccaattccggaaagtgcccatgccgcagcaccggttcgcgccgctcaagcgatgctggatggaaatctacaaacccgtatacgagcacatgaagatcgatatacgcatgaacctcaaggtactggactggagtctacccatattgggctttcttgttttatgtgaatgagcttttcgtgctctattccttgcaagaaccatagattgtatacttcagatcgccgtcaagaagctcaacccggagagcgtccagggcctgcagagtggcaggataacatggagaacttcaaccctttcggtgagaatggagagtagggtacagggtcaccatagaatgttctgggctcttcagtactcctgtactaacaacgggtacatacctaacagctgccctgcccttagtgacgcaagagaaaatgattgcttgagggtccaactttagggagcttcaatgtgagttttgtggaatgttcgctagcacacagggttctgagatagtatgttatttgcttcaaagttttgctgctgattagacatatggagcttcttctttggacgggatagagtgtattttgtagtcaccctatgcttacaattgtcttcggtccatcacattgaattgtcgttcaagattctgccaggataaacagtggccctgcattttttaactataataataatgttggtagggataccaatggtgctcctctgttaatggtgcttattgccatattgtcatattggaggaagggcttattgtcatattgaaggaagggcttgaagctcaatggaagtgataatagattctgcaaatgctcctcaataggttccagttagtcatctggtattcatagttcatggcattagacagaggctggagaaagctaatcttgttgatgttgtcaattttccatcgtgtaaccgtgttcaagggcatattatcaggcggggtcgagatcggcattgtctccactgtcatatcgtcgagcaaagactggtccaggagcgcagaaacatgcttcaagaaaaaggtttatggctagcaacatcttgttcgattacttcctgtgatgttttaatccataaaatacagataggggttacactgttcagtttggttacttcgattttgggactgcttgcgatcttctgtagtgtttattcttgttcgattacttcgattctaggactgtgattttagttcgattacttcgattctgggattaccaaaatacagataggggttacactgtttacttcgattctaggactgccaaatgtctctactgtttgaaggcggtgtttattcttgtttattatttactagatgtctctgtatgcttgattatgcaagtagattattcaggtagtacatacatttttagttgtatttattcttgtttctattcggtgcttcattcaagtctgcaactttccaatgtctctgtgtgcttgatagcatattatcctatattcttgcgcaagaatctttttggacgcacaagtagttctatagagtttactacatcctttgatgttttaatccatgaaatacaaacttgtatctatctgttttggactgcgttccagagaaagaaatgtagtttagttatgtggttttacagacctatatctatttgtgtaatgcatttgcctgtatatgtgcagcttatgtccataattcttcaagtctgcatatgactgcatcattcttcagccttctagactccttccacttctgccccctcggatacaaggacttcccagacttaggtaacacaacctcttctcttctttcaacatgttgtcatgtggtgctcgagttatggtacaactggagttgggtgaaagcgacatggagccttgaagtggagagttgagctcatgaagcaggacaagagagccaaggtgttgtgccttcatggcttctgcacgagtgagagttttttgaagagtagatcaacaactggcactcttccactcgttatggatatgggtattgcgatgaggcctcatgagctatttgaaaacatttatgtatagttgtatactaatttatgttttatagttgaggctatctaatatattgaaatgtctgaa

SEQ ID NO: 215798 - DNA, 493 bp, Zea Mays
atcttactgaagcggctccatgtttggtcgtctacaccaggcagcagagcagattcgcccctgctgaaaacgcactcgatggcgtccgcgacgggggtttcctcctcggagatggcggtggaccacgcgacggggccgggcgccgtggagaagccgcggttcgatgctctgacgccgaatgagatgagcggcgggaggccccaattccggaaagtgcccatgccgcagcaccggttcgcgccgctcaagcgatgctggatggaaatctacaaacccgtatacgagcacatgaagatcgatatacgcatgaacctcaaggtactggactggagtctacccatattgggctttcttgttttatgtgaatgagcttttcgtgctctattccttgcaagaaccatagattgtatacttcagatcgccgtcaagaagctcaacccggagagcgtccagggcctgcagagtggcagtttgacttgagattagaaaaggg

SEQ ID NO: 215799 - DNA, 376 bp, Zea Mays
cttgtataatctttggtcacatgtcccttaatgttctgcagatacaatggtgcgccaaactgctatggttgtcaaatgtttactgctgatgtactataagaacagcagaggccgtagctatcgtaggcagggtcaaatgttgacgattgtggaatattttctacttttgtaccgtgcattattgcctacacctgtgtggtaccgttttttcctgaacaaggagtatggaagcctattttcgtctctaaccactggcttgtatctcactttcaagttgacatctgttgtggaaaagattggaaaaggatggtgcgtagctgcaaaagagaggacatcttgcttttgtgctcgcaagaaggatgcaaaggacctatga

SEQ ID NO: 215800 - DNA, 1547 bp, Zea Mays
aaaccagtagagttcagccttgggtccaatgttcataataaatcaacgatgaccaaacaagagatcccaagctctttgtgcagtcaacagctaaccaaagagatacatgttaaaaacagcggtgaccttcctctacaagtgacaaaggttaaagtttcaggagctgattgtggtgtggatggatttaccgtggacaactgcaaaggatttagcttagcaccgagtgaatcaataagaatgctcatttcttttcaagctgacttctcttcagctatggttcagagagatcttgagttggtcatgactactggcatctttccgatccctatgactgcaacaattccggtctgcatgcttaaccagtgcagaaaatcttatctcagatctgcccactggaagctgttggtaatcttgtttggagctttagcactgcttattctggtctttgtccgttatgccccagattctttgacagtgggctctcaagactatatcaagattgatgacaaaaaaagtgccattttcgaggagaacaagaaaagtaccattaacaagacccttttccttaaccaaagcagcaaaaagtccaggacaaataaggaacacaaaagaactgaagaagctgttgctgagaagtaccctgccagtgttgttgatagctcaaagagagcagatgacaagaataaacctgatgaacaactgcacacaacttcgacggtatccgtgtcccgaggtaatccagtggaagataaggcctcaagagaagctccgcagaccagtgaaaacctcacgatcaggattgctcgagacaaagggaaacgaaggaagcggaaagttggtgcaggactggcagggaagtttgaggtttctagcagccacagcgggaactcaacaccgtcttcgccattgtcgcagagctcaaccccgaaacatggctggtctttttctggggcgccatcagagccgaagcatgaaaacaaagtcgagagcagattcgatgtcgaggcaacggcatcaccaactcgcgctaatcatgagaagaagaaaacttggtcgcaagtcgctaaggagcagcctcgctctcgttcagcctcaccaggaatcacatcaccacctccaagccctgcagtgaccgcccccgtcgcatggcgctctccgtcattggcccccacgtcttcaccgacagctccacagtctcgtgctcctggctccaatctggtgaaagacaaggctgtgaagagagacgtgggtgctgctgcggctgcggctgcgccttccccgaagaaagagttcacctacgacatatggggagaccatttcccaggaaacctgctggtggtcgcaagggaggccgcgccacgcaagatgcctgacgcttctgaaggcgcctcctatagcttgtttgctagagagccccagaccctcatgatgaagccatcatcatctgcaccgccgcccatgtctcgcggccgcggttcgccgccgtctcatgtagcatctggttacggaataaaatgaccctgaaagcttaaaataatttgaccctg

SEQ ID NO: 215801 - DNA, 3841 bp, Zea Mays
tgcggcgctgcctgcctctgcccctccccacctcgccttttttttccatttcttttttcgttttcccattttccgccgtggattcccatggtcaccaccacagtgaagtcccgaccgccgcatgcttccttcgccatgagcggcggccgccgccgctcttcgccggtggcgccttcctgctcctccgtccccgggcgttcgttggttccgctatgctgcttgatcttggtgctcctttctttctccatgtcgtcgtccgcggtggcggcggaggattgcgttgaggatagtgacggcgctgatggcgacggttgctgtctcagcttccgggatgtgtgtgccgaccggagctccttctgcttctcgtcctcggtggctcagatgttgcttgcaagcgaggacgccgccgaggcgccggatttggagctgccaaggggctgggaaccgtcgtctctgccattgtccttcccgatgtccggcggcggaggcatggtaacttgctcttctgttgactcgtcgctcacacgggcgcgcgatggattgggacgaggtgacgacgctagagcgaggtatgacgtcgcgtcatgccaggcgccgcttgtgcctgacaattggatgcgggcatctgctggggtgcccatggaggtggagggccctgccacagatgccgacccgagtggtcttcaaagccccttgtcgatgaatgtggaaattaaccccccggtgctggattggggcaggagcgacttgtatgctgcaaccaaggccaacttgaccgtggtgaatttgaacaagaacagtgccctgcgtctgtatgaacccttcagcactgacccccagttttatgtgtatggttatgaggatctggagctgcagcctggggagaacgccacagtcaccttcgttttcttgccaaagttgttaggctcttcatcagctcatctagttgtgcagacaaattttggcggatttattatacatgcaaagggcatggctgtcagttcaccctatcagatactgccattgacagggatagatgttcttataggtggacagctagagaggaacttatcgatatacaacccatatgacgatactctctatgttgaggaagtgtctgtttggatgtcttcattggagagcacaaggtattcttctcaccttgtctgccagctgggcccctttgatggagcattggagctatcctcttcacgtagcaactggtatacagcaagcagtgaagaatttagatggccagtggtcaatatcaggcctagtgaacaatgggaggtgcttccttcaaagaggaacactgtgattgagttaaagctgcaagctgtttctgaaggcaaggtgtttggtgctatctgcttgaaactgcgcaattgcactcttagtacgactcatgcttttgtgatacctattgagctagaggtgcatacacgaacttactatgattccagtggcttaattgctgtcacatttgagcatgtatggacttgtgatgaaactgggccgatcttttcgctttccttacggaatgatggaccaaagttactgaggattatagatattactgagcatgccataaagggcccaatgatttttcaggttaaatacctgaatggattaatactctaccctgatactgtaacagatatagctttagtaagatatacttcttcagttacagaggacatttcatctgacagctgcaatatagttgtagaaacaaatagtacccttggtagttcaatcataataccatgcaaagatttagtgcgcgcatctgaatccgttggaccgtttgccagacaagtatatgaggaagatatctctgctaatgcaagaacaagaacattgggcagcatgctgcaagtaaaacactcgcatcatgtgaagccaatggtcaggaaagcagtcaaagctgatgatagaatgcttaaacaatggaaatctcatggaacaagtgatgggatttctgttcttatggatcatgaaatgatgtttcccgttgtgcaaattggttcacagttttctaaatggataaaagtccataacccaagcctggagcgtgcagccatgcagctgatagtgaactccgaggagatcattgaccaatgcaaaactgtaactgatgtatgtgaactcacattctcaagcaaatctccagaggttaactcaactgagactagatttggtttctcgttaggtgatgcagcaatcaccgaggcctatgtcgatccttcagagactgctttgcttggtcctattgtcttccgtccctcgaatcactgtatgtggtcaagcatggttttgatcagaaacaacctgtcgggtgtggagatgctgcctctccgggcatatggtgggcgacaatctattgtccttctagaggaatctgagcctgcttggaagctagagttcagccttgggtccaatgttcataataaatcaacgatgaccaaacaagagatcccaagctctttgtgcagtcaacagctaaccaaagagatacatgttaaaaacagcggtgaccttcctctacaagtgacaaaggttaaagtttcaggagctgattgtggtgtggatggatttaccgtggacaactgcaaaggatttagcttagcaccgagtgaatcaataagaatgctcatttcttttcaagctgacttctcttcagctatggttcagagagatcttgagttggtcatgactactggcatctttccgatccctatgactgcaacaattccgattctttgacagtgggctctcaagactatatcaagattgatgacaaaaaaagtgccattttcgaggagaacaagaaaagtaccattaacaagacccttttccttaaccaaagcagcaaaaagtccaggacaaataaggaacacaaaagaactgaagaagctgttgctgagaagtaccctgccagtgttgttgatagctcaaagagagcagatgacaagaataaacctgatgaacaactgcacacaacttcgacggtatccgtgtcccgaggtaatccagtggaagataaggcctcaagagaagctccgcagaccagtgaaaacctcacgatcaggattgctcgagacaaagggaaacgaaggaagcggaaagttggtgcaggactggcagggaagtttgaggtttctagcagccacagcgggaactcaacaccgtcttcgccattgtcgcagagctcaaccccgaaacatggctggtctttttctggggcgccatcagagccgaagcatgaaaacaaagtcgagagcagattcgatgtcgaggcaacggcatcaccaactcgcgctaatcatgagaagaagaaaacttggtcgcaagtcgctaaggagcagcctcgctctcgttcagcctcaccaggaatcacatcaccacctccaagccctgcagtgaccgcccccgtcgcatggcgctctccgtcattggcccccacgtcttcaccgacagctccacagtctcgtgctcctggctccaatctggtgaaagacaaggctgtgaagagagacgtgggtgctgctgcggctgcggctgcgccttccccgaagaaagagttcacctacgacatatggggagaccatttcccaggaaacctgctggtggtcgcaagggaggccgcgccacgcaagatgcctgacgcttctgaaggcgcctcctatagcttgtttgctagagagccccagaccctcatgatgaagccatcatcatctgcaccgccgcccatgtctcgcggccgcggttcgccgccgtctcatgtagcatctggttacggaataaaatgaccctgaaagcttaaaataatttgaccctg

SEQ ID NO: 215802 - DNA, 6083 bp, Zea Mays
gtcgacgcgacgccactctcttacgcacacggcggcgcatcccttccacgcaggcggccacgccccagcccggcagcaagccctcctgcccctgtcgacccacggctcaccatttccttccccgggcgatggtgaatgtgcaggagcaagtttcttcgttaaccacctcgcccttcgccttcattccttcacccggacgcagcggtggccaaacaaataacacgcctcgacgacgcggcgcgctccgtcttcctccctccccgccaccttccctccaaatcaaaaccagccagatcgccgcctcgtcctctccctctgccatcctcccgggatcgccgtcgggctcgccgcgccggaaccctagcggattgtcattcgttcgcgcgcgccccgcctcgccatggaggacttcgcgcgcgcggtggaggacgggctcaagctctcgaagcggctcgtgctcccgggaggggtgccgccgccgcgcccgccggcggggatggagcgcaccatgtcgtccgcctcggcgtcgggtcccgacccgcggctgctccccacggcgccgatggcctacgcggtggtcaccgacccggccgccatcgacacccccgacgtgcccagctaccaaccctacgtctacggccacctcgacccgcccgcgctcatcccgctgcagatgaaggaggtcgacttggccgtcgactgcgcgctcgacgccgcgcacgtcaccctgcgcgcgcgctggtggctgcactgcatcacgcgaagccgcgactgcgacgtgcgcctcgtcgtgcccttgggcgagcaggagcagggttcaattctaggcgctgaggttactgtcggaagaagatcatataatacccaagtaatcgaagtagaagaaactttggagaatcatgcaaaaattgagagtggtggccttctgaagccacatctgtttttcttgacaatatctcaggttgagggaggagcagatatctgtgctacatttcgatggtctcagaagttactatatgatagtgggtgtttctctgttgacatacctttccattttccatactttgtcaacccattaccaaaagtgttcatgaagagggaaaaagttcagttgactgcgaacactggtttcagtaaagaggtttttctgcaaggaacaagccacccgttgaaggaaaagagtaggcaaggagataaattgtttttcctgcatgaagccattgttgagaattggtcgagcaaagtttttaatttttcgtacagtgtttactcaggtgatttgtctggtggtgtgtttgtgcaaccctcaatattatgtgactatgatgatagagatagcttctgcatttttcttttacctggaagtggcaacagaaaggtattcagaaaagcagttgtgtttgttgttgacacaagtggaagcatgcaaggaaagcctcttgagaatgtcaagcatgcagtttctaccgctctttcagagcttgtgcaaggggattacttcaatattataacatttaatgatgagcttcactcattctcttcctgtttggagcaagtaaatgacaaagcaatagcaagtgcaactgattggatgaatgcaaacttagttgctgagggtggcacagatattatgcatcctttgagtgaggcaatggcattactatcaagtgttcatgacacacttccgcaaatatatcttattactgatggttctgttgatgatgagcataacatctgccaaactacaaaaaccgaagtcaccaacagagggtctaaatctccccgaatttctactttcggactaggatcatattgtaaccactatttcctgcgcatgctagcatcagttggcaaaggacattacaatgctgcacttgagacagcatcaatcgagaatcagattgttaagtggttcaggagagcatcaagtacaattgtggaaaatatctccattgatgctatgacacatcttgatgaatttgaagtggattctgagtacattccggacctttcagcaaattctcctttgtgtgtgtctggaaaataccgaggaaaattcccagacacagtgaaagctaaaggttacttagctgacatgaaggaagtcctgattgaactgaaggtccaacaactaaaggaagtaactcttgacaaagtattggtgacacaacatattgatcttatgacagcaaaggcatggctttctgcggccaaacaactggagagaaaggtgattaaattaagcatacaaaatggtgttccatcggagtacacagatatggtattacttcaaacaaatttggacaatactggaacacaaaaggacgctacaagggaaaatctcgtcacaggattttgggacgtgaactcagcagagaaaattgtgatgctccaaaagggacctggctgttgcagccgcgtcgctgactgcctttgctgcatgtgctgcatcagggcgtgcaacaggatgaacgaccagtgtgctattctgatggcacaggatatgtttgtagatattcaagatgaaaagattttgaaacattttcgaggcttaagaactcggaagataaatttacctcgcaacatcaactcatgctataacctctttttctctcaggtggtccttttcatcggcttgcaagcattcttgccacggagaatcagagaggtacggtgcttgattcggagcattgttgattactgtggaaatgctgggtcagagttgtttgagttggctcctatgttggtcagcaatttgggtcagtcaatgaccctgttacaagtttatgctgcagtcatccgtatttttgtagagtcttcgatgtttgaggacgctcttctcacttatattcaggccaagaacattggtgttgacagacgtttgtgcaatttcttgttgaagtgtttagttgaggggaatcaaatcatgtacgctaggagcttatttgatgacatgaaaagttgtggtccttcacccaatgtctgctcttattcaattttgatgagtatgtacacacatggagagagatcatgcttggaggaagcttttgagcttctttgtgaaatggaatcaaatggtgtgagaccaaacgctacaacatatggaacttatctctatgggctttgccgttccagacaggtaacatctgcatgggactttcttcaaactctttctcagagtggaggcccttgcagcaattattgtttcaatgctgtgattcatggtttctgttgtgaaggtcaggttgacaaagccatagaggtatttcatggaatgaagaaatgtgggtatgtaccagatgtccatagctacagcatattagttgatgggttatgcaaacaaggggatttattgaaaggttatgatatgcttgaagaaatggcaagaaatggaatatgtcctaatcaagtgagttacagttcacttctgcatggcctttgcaaaactggacaggttgcattggcattgaagattttcaagaatctccaagaccatggttttgagcatgaccagataaattacagcatcattcttcatggctgttgccaacacttagatctcaaggccatctctgacctttggtttgacatgattcatcataatatcgctccagatgtttacaactataccagtctgatctacgcattatgtagacatagaaacctccaagatgcattgggagtgtttgagctcatgcttgaaaatgggttgtctcccaacatcgtgacatgcacaatcctagttgacagctttagcaaacaagggctagttggtgaagctttcctattcctggatagaatgcatcagtcattgggaatcgtcccaaacctttgcatgtacagagttatgatcaatggcctttgcaagaccaacaaatatagtggtgtgtggaatgtttttgcggacatgataaagaggggctatgttcctgatgttgtcctgtacagtattattattgagggcttcgtgaaagctctgaagttgcaggaggcgttaaggttgtaccataagatgttggatgaaggtgtaaaacctaacatatttacgtattctagcctcataaatgggctgtgtaatgatgatagacttcctgaagctatgggattgattagggatatgattggggaagacctgttacttgacaatgttttgtacacatctatcattgcttgttattgtagacgtttaaatatgaaggctgctatggaaatggctcaaagagatggaaagaagcggtgtgttgccagatgcttttgtatatacttgtatgattgatggctatagtaaacttcctgcaatggatgctgcacgcttgatgatggaagaaatggaaaaaagaaagcttaaacctactatagtaacctacacagctctcattattggataccttaaaatgggggatgagaaggaagcttgtatgatgtacgagagtatgcgtcatgtaggcattgctccagatggaaagctgtgttgcattttgggcattggcaatgacaggggtgattgtgatgattctcagaaagcgaagggtgtaacataattacataattttcacagagatttattaacttgatgaagggacttctctatgatggctgaatggctctgagctctccagtgcaggacacactgtttgctccatttgtttcctccacttccacactgccatcctatggacaaggaatggaaagcagtaacctgaaatgtggcagttaaatccgtggacaactgctgagggtgtgaccgatacagatgaacacacaataccatgactccggcaaaatactcccatattttgcttgaagatttactgacaattaatatagaaaaagccatggatttggatgtacccatgtaagtttttctcctgacaaagaaacacttaaattccatttatggtgcaactttctaactcactatttgtgttgcagtttgctaaatatattgcattttcagatgatgacaatagtgtgtaagcatatttgcattaccattttattcatctcactgttatgtgcttctactatatactcttatttgataccattcatttttctgttacaaaagcgtaaatcaatagcaaaggaactcaaaaatagatgttgaatcttcacatgaggtatgctttatgaacttaacacagcaagtttatgttccaccacacttaactattcaattaaaccacaccacagagcacaaatgttttaccatctaatactcctgaaaattcccccatcgcattagaaacgccaacgaaaaggttcttacaactcctttttttctctttttaactttaaacatttactttaccaattaccatgacaaatattgttccttaatacattcctcatgaaagaaatattgtcacaggctcaagcaaatctctggaacacaacttcctcatgaaagaaatattgtcacaggctcaaacaaattcgattatgcagatccacttacatgacaagatgaagggccagcaactttagtttgctgctaaatttcatctgcgtccgtttggtcgatgggcaggttcgatggagattgccgccgttggcgtttcgatcgccatatttaaccaagtctccaaggtccatgaacatcaggacactgcagcagggtccggatggtaaagatcaaagcaaatatcaacatctatagcatgacacaacaggatatgataagattgaaaacgccttcgataatgctgtccgaattaataactaagtggattgttatatatgcccaaatgtgaagtacttaagagaaggtgctttcattaatgttgatattgaaaaggggatacaagatggacagaaagcagttggcgacgaagcaactgttgtaaagaagcgtccacacggtggcaggacctcaggccgttctttgcacggcagagctcgggagcaggtgtccccagtttgtgtgagccacggcagggccggagtggctgcatgggagcaggtcgtcgcaaggcctcgactatttcctttccgagaattattcatcttccggtactgtgtgtcgttcaaggcaaccgtctcaacattcaaccagggttacgcaaccatttgttgaatttacg

SEQ ID NO: 215803 - DNA, 3569 bp, Zea Mays
cgccccgcccggagcacccccgcgagcctgcgaccacgccgttgtccagccgccgctccgccgtttgtgaagcacatttgtgaagcagacaagctgtgatttgtgatttgtgaccctaactgtgatttgtgaagcagacaagcagtgaagatattcaagatgaaaagattttgaaacattttcgaggcttaagaactcggaagataaatttacctcgcaacatcaactcatgctataacctctttttctctcaggtggtccttttcatcggcttgcaagtaagattggtccatgaagtgtagtttatgcacagctcatccctgcttctggtggtactgtcaatgtaaggaggggatcagcatcccttgtctatgcgccgggcggccccattgtttctgcaccaagcccgtgtaatcaggagctattgcccagtgacgcacctttcctctcaggcttgttggttgaacagctctgataatgaagagcccagtcagagtttcgcttacggtgattatagaagtcgtcgtctgcttcccttgatcacacaagcattgcgggcttcgaactgggacgctgccagaaatataagcttcagggagtgtgtgaggttatacgggtcatctcaatcagttggtttgtttgctttgatcatgcaggcattcttgccacggagaatcagagaggtacggtgcttgattcggagcattgttgattactgtggaaatgctgggtcagagttgtttgagttggctcctatgttggtcagcaatttgggtcagtcaatgaccctgttacaagtttatgctgcagtcatccgtatttttgtagagtcttcgatgtttgaggacgctcttctcacttatattcaggccaagaacattggtgttgacagacgtttgtgcaatttcttgttgaagtgtttagttgaggggaatcaaatcatgtacgctaggagcttatttgatgacatgaaaagttgtggtccttcacccaatgtctgctcttattcaattttgatgagtatgtacacacatggagagagatcatgcttggaggaagcttttgagcttctttgtgaaatggaatcaaatggtgtgagaccaaacgctacaacatatggaacttatctctatgggctttgccgttccagacaggtaacatctgcatgggactttcttcaaactctttctcagagtggaggcccttgcagcaattattgtttcaatgctgtgattcatggtttctgttgtgaaggtcaggttgacaaagccatagaggtatttcatggaatgaagaaatgtgggtatgtaccagatgtccatagctacagcatattagttgatgggttatgcaaacaaggggatttattgaaaggttatgatatgcttgaagaaatggcaagaaatggaatatgtcctaatcaagtgagttacagttcacttctgcatggcctttgcaaaactggacaggttgcattggcattgaagattttcaagaatctccaagaccatggttttgagcatgaccagataaattacagcatcattcttcatggctgttgccaacacttagatctcaaggccatctctgacctttggtttgacatgattcatcataatatcgctccagatgtttacaactataccagtctgatctacgcattatgtagacatagaaacctccaagatgcattgggagtgtttgagctcatgcttgaaaatgggttgtctcccaacatcgtgacatgcacaatcctagttgacagctttagcaaacaagggctagttggtgaagctttcctattcctggatagaatgcatcagtcattgggaatcgtcccaaacctttgcatgtacagagttatgatcaatggcctttgcaagaccaacaaatatagtggtgtgtggaatgtttttgcggacatgataaagaggggctatgttcctgatgttgtcctgtacagtattattattgagggcttcgtgaaagctctgaagttgcaggaggcgttaaggttgtaccataagatgttggatgaaggtgtaaaacctaacatatttacgtattctagcctcataaatgggctgtgtaatgatgatagacttcctgaagctatgggattgattagggatatgattggggaagacctgttacttgacaatgttttgtacacatctatcattgcttgttattgtagacgtttaaatatgaaggctgctatggaaatggctcaaagagatggaaagaagcggtgtgttgccagatgcttttgtatatacttgtatgattgatggctatagtaaacttcctgcaatggatgctgcacgcttgatgatggaagaaatggaaaaaagaaagcttaaacctactatagtaacctacacagctctcattattggataccttaaaatgggggatgagaaggaagcttgtatgatgtacgagagtatgcgtcatgtaggcattgctccagatggaaagctgtgttgcattttgggcattggcaatgacaggggtgattgtgatgattctcagaaagcgaagggtgtaacataattacataattttcacagagatttattaacttgatgaagggacttctctatgatggctgaatggctctgagctctccagtgcaggacacactgtttgctccatttgtttcctccacttccacactgccatcctatggacaaggaatggaaagcagtaacctgaaatgtggcagttaaatccgtggacaactgctgagggtgtgaccgatacagcgtaaatcaatagcaaaggaactcaaaaatagatgttgaatcttcacatgaggctcaagcaaatctctggaacacaacttcctcatgaaagaaatattgtcacaggctcaaacaaattcgattatgcagatccacttacatgacaagatgaagggccagcaactttagtttgctgctaaatttcatctgcgtccgtttggtcgatgggcaggttcgatggagattgccgccgttggcgtttcgatcgccatatttaaccaagtctccaaggaacaccataatcaatgcgaacctatgcccgcacatggatatgagatggtccatgaacatcaggacactgcagcagggtccggatggtaaagatcaaagcaaatatcaacatctatagcatgacacaacaggatatgataagattgaaaacgccttcgataatgctgtccgaattaataactaagtggattgttatatatgcccaaatgtgaagtacttaagagaaggtgctttcattaatgttgatattgaaaaggggatacaagatggacagaaagcagttggcgacgaagcaactgttgtaaagaagcggtaaggatccatatggcgtggaattgggcagccgtccgtctaccttgcgtgccttcccccagctgcatgtatctgtgtttccgtcttgccacaagcagcccacaaccacaacttggtgtcttgtatacctgtgccttgctttccttggttggtggtgacagggccatcatgaattaggcatgacttgtttccattctggtattgtaatgtgtatcatta

SEQ ID NO: 215804 - DNA, 1004 bp, Zea Mays
ggagagtgccccaactggccaactgcttgacgaacaatcctctccgttctcgcagtggcgggtttcggcgacagcgccgcctccgatgctcggctcgagcgccgcgtacagtggagggagcggagctcgaagggcgaaggcgcaggggggctcgcgagtcgctatccagcccacgccgtcacgcactcacgcagctgcaccttgcatcccaggaagaccttgtttgcttcgtccaagatcttatcaccgtgcttgatcagtttgtttgagtaccatgtgaggaagaacttccccttgtcggtctggtatgttccgttatccgcgaagaactgggtcttctcaggagtgtcattgtacgtcccagcatcatcaggcaaatcccactcaggatgcccagcctcttctgctgctgctttgaagtctgcttgcagggagcttgagggtctatttatacagcggaggcaggggagatctggaatgcgactttgcagcgcttctccagcgatgcaaaaacctatctttccgtatagtcgcccaggaatgcgcatgtgcagggtgagctgatgattttggatatcgataccatcccgagctggcatatgtagcacagcaggttgttgccattgtgattcgcggggactgcgtcctgaagaactttggttttgacgccttgtatttgtacggcaatgattgggatgaacatggccggtgagaattttttattttacattttctgtcctcgtttgccacgtgagtgttgtctgattctgatgtaaaacagcaacgagtaaaaaaaaagtataagtggaacctgtaatgtgggattgtaacaaatatatatattgcatggcttattataacagcacacgggctgcggtaccatgtgtgtggcatgttttatacacatattccgctttgatgcttttttagcgccctgtatatattttgttatataggctgagcatccaaaaaaaaaacctttgcaatttttttctctaaattat

SEQ ID NO: 215805 - DNA, 775 bp, Zea Mays
gtgggccaggagagtgccccaactggccaactgcttgacgaacaatcctctccgttctcgcagtggcgggtttcggcgacagcgccgcctccgatgctcggctcgagcgccgcgtacagtggagggagcggagctcgaagggcgaaggcgcaggggggctcgcgagtcgctatccagcccacgccgtcacgcactcacgcagggagcttgagggtctatttatacagcggaggcaggggagatctggaatgcgactttgcagcgcttctccagcgatgcaaaaacctatctttccgtatagtcgcccaggaatgcgcatgtgcagggtgagctgatgattttggatatcgataccatcccgagctggcatatgtagcacagcaggttgttgccattgtgattcgcggggactgcgtcctgaagaactttggttttgacgccttgtatttgtacggcaatgattgggatgaacatggccggtgagaattttttattttacattttctgtcctcgtttgccacgtgagtgttgtctgattctgatgtaaaacagcaacgagtaaaaaaaaagtataagtggaacctgtaatgtgggattgtaacaaatatatatattgcatggcttattataacagcacacgggctgcggtaccatgtgtgtggcatgttttatacacatattccgctttgatgcttttttagcgccctgtatatattttgttatataggctgagcatccaaaaaaaaaacctttgcaatttttttctctaaattat

SEQ ID NO: 215806 - DNA, 1541 bp, Zea Mays
ggagagtgccccaactggccaactgcttgacgaacaatcctctccgttctcgcagtggcgggtttcggcgacagcgccgcctccgatgctcggctcgagcgccgcgtacagtggagggagcggagctcgaagggcgaaggcgcaggggggctcgcgagtcgctatccagcccacgccgtcacgcactcacgcagacaaatcttgtagcattttagaaattgaaaaaagaggaacacgaagaccttcgttgggccagccacgggagctgctgtgcttgatcttggacgaaacaagtgaatggtcttcagcgggtttcagacacttgcagtcgcttcctattcttctacgattaccttctattaccggcttatgttgtgttgcaaaatgcgttctgtagtatcgctttagtggtcctttgggaaccctcctattcggtaactctaattaccgacagggggtttgtactttgttcactctactccctcttaatgaaaaacgtgcaatgacacggtcacgaaaaaaaaatcttgtagcattttctaggagatttgtcctggtattttttaaaacagagaatgttaggtcatctggcttttattcaaggacttttgcctgagttggaccactagattggcaggatgttaaatcccacctccactaaccaagtggccgatctgtcgatcctcaggtttgatccttttttagttcaagttcgagcacgggttgcatgatgatccacactacatagtacatgtttatgccaatttgtgacatctttggctttgggttgaggtgaagcaaacatttttttagttacatgaaaggtttgtattcttttgaattatagaattggtagaggcagccgcaggaaatcgatgacaacctatcgtcacgataatggctgtacggcgtcaccgaccagttgtcattggcagtgcctgctaatagaatcgttggcaatcaagcatgccttgctcttccttgaaccctttatttatagtccataaatgactcaaccttccaaaggaaaatatagaaactctaaaggtagaaagacttaaatatagaaagataaggttattaatctgctaacctgaacctagacagaggctgactcaaccttccaaaggaaaatgtagaaactctaaagatagaaagataaggttattgatttgctaaccctgaacctagacggcgtcggacataaatccggtccagagccataacagtatgcataaaactgacacagaaaataggtgatccaaatcatatacaaccatggtgctctcttagcttcacaacacattttattcttttatcatcacaccattttgatttgattattatttttctcttgatgttgtgtaatgatttgtttttatcatcaccagaatgtgcaggtagaactattatttcaagcacttgtaaaccacacatactctctaaagggcacaataaataacccacaaagccacaatttttattccttagctcaaatacatacatacaacaggaagaccaaggctattattacaactcat

SEQ ID NO: 215807 - DNA, 4115 bp, Zea Mays
tctcagcatcaaccggactcaagattaattttaacaaatcttgtctcctgcctatcaatttggatcatcagaaaacaactcatttggcggcggtgtttggctgtcagattggaactttccctttcacatacttgggtcttccgttgggaatcacaaaaccaagaatcaaagattatctccctctcatcaacaaaattgaaagaacaaagaaggttggattccaccagcatctggctctctttggcaggttagccaaatctattgacggtgctatgcagctttcgcatagatttggttttcaacatttggattttggacatactgttattttgtttgtgttgagtcttgtcgacatgctgattgattgcatcttagacgattgtggattgcccgtcacctctgctgatgaacatggcaacagaaaagatatgaattttaatggcaaggggagatcatttgacaggggagatgaacaccgtgaacatctaaggagaaagaatatacttatgtctattgaagttgttgagaaggtcactgcaaacaaaattacccaagtctttctgcggcttgtcaaccgtaacacacctgaaaatttcaattatctacttcggaaacttcaccttattggtgctcttaaaaagaagaacgctttgtctccatgcaatctgctagatagcttgattgtgaatatacagaatgccataagcacgggctaccaattagacaggaaaaggcttctgggagttcctgttagcatacagccttgcagttcagctatttacagtatattcgtaactggaaagggatcttgttggattccttttgatatgtttatggagaatgcaatggatgggagacatcttcatactatatcatcagttgaatatctgacagaactatccaaaacacttcaagtgttgaatcgggcaacttggcaagagacctttcaggctttatggatttcggctttgcggctagtacagcgaggcccagatgcttcggaaggaccatttcctcatcttgattcacggatgtgcatgttgttggctattatccccttgtccattgcaactattgtgaaggaagaggcgggcaatctgaaaggggaaacaacctctgttataagaggacaattagtgtcttcacttcagattctgagacaattttttggtcttctttcaccacctccagcaactgtgcacttggcaaatgctgcagctagaaaagcagcagttgttctgtctaacctgaaaactgggagtgagaacatgtacagttctttcaaagacagttcctctattaaagcagttggaaatatgctacatcttatcgtggaagcctgtatcgcaaggaacttaatagatgcatctgcttatttctggcctggctatgtggttccacttaaagaatcctctccagttcaggcatctccatggtcatctttagtagaagggtctccacttatagaacttaaggatgcccttatggtcacacctgcttcgagtgtagaagagttggagaaattgtactcttttgcagtaagtgggtcaccggaggaaaagttggcagcttcgaagattttgtgtggtgcatcacttcttcgtggttggaacattcaggaacatgttgttcaaatggtgcttaagttgttatcgacattcctccctttggattctggatcagaagggcgatatgtacagcatatgcctatgctgcatgctcttgtatcaggaatttcttctattgacactgttcatattctctcactgtatggtctggtgccagaagtagcatctatgttaatgcctctctgtgagaattttggatctttacctccatctgatcataggagttgtaaacttgaagaggcttctgtgtactcagtattctcatgcgctttcctgtccctgcttcgcttgtggaaatttcatagaccacccattgagagtgctttatcaaggcgtggagtctctgtttggtcagagctccgtttggattttctcttgttattacgtaatagtcattcttctttgaaaaatctgtctaatgttactcaatcaagcatatttgaattagatccaccatttcaaaaaccattgtatattgattcatttccaaagctaagggcatggtacttccagaatcaagcttgcatagcttctacactttctagtgcttgcagcaggacaactgtcctccatgtggcaaacatgatactgaaaatcatatgccataataaagtgccaaaaggtggtgtcctgtctgtaaatcctcagtcaacagcaaattccactacgagtagttcacctgcaggcgtacaggaagatatgtgccagtggccaacacttccagcatgggaaattcttgaagctgttccttttgtgcttgaggctatgctaacttcatgcgctcatggaagactttcatcccgtgacttggttacaggtttaagagatcttgcagatttcttgcctgcttcacttgctgctattgtcagctacttctctgcagaagtcactagtggcatatggaagccagttatgttgaatggaatggactggccaagtccagctgcaactcttccagtagttgaatcggagataaaagaagctcttgcatttgctggtgttcatatcaatatctgtccacgtccacgttctgcgatgccaatgcttccattgccaatagcagcgctaatgagtttgtcaataacagtcaagatggaggaattcagccacctacacggcatcatttcccaaggaattgaaatttgtgcgacatctagttcatggcccactatgcaaattataggcgcattgtggtcccagaaggcacggcggtggcatgattttatcatcctgacttgttcgcagtcccccttcactcgagataacaccgcggtggcacaactgatcaggagctgcttctcgtctttcctggggcctttggttgatgggcgctcctgctccgtagcaaacagaggagttgcgaatctgctggggcagagttctgatgaaaaagcacacaggcttgctgtagctccagggtttctctacatgagatcctgccggttatttccaaacaacacctttgtttgtgaagagatcttggaggtggtcattgagagagcccatgcgctagcaaatgaccgcagttctgacagacctgcccgtttgaggtcagagtgtttgccgctatcagctgcgtcatccttggtagagcagatagcatcacttgcagcgactatgctttgccacgctggcggggtgaatctgattcgtctcctctacgagcagatcatgcccaccctgctgctttcaggtggagaagctaagctcggttccggtggtatggtatgcagcataatcgaaggatacacgctagcgtacgttctcctcttctcgggcgcaaccgtctggggagtcggagaaacgtcgccagcttacactttaatatacacatccaaaagacaacgggtcctcgacaggcacctggagttcatggccagggtgatggagggtaacattgtgctgggctgtggagatgccacgtggaggtcctacgttctgtgtttcgtcaacttgctggtcagcttcgtgcccgcgtgggtccctgaagtgaagctaaatacgctgcagaaactggcatctgggcttcggagatggcacgagggcgatcttgccctctctttgcttgagctagggggagccaagaccgtgacttcagtagttgaatctcttctgcggtgagctggtgctcaactgactgtatagttttctacgacaggttggtccatatacacattataacatgttaatgatctaaaaattcagtcatcagaaagatgaacagtacagttctaccgaagcttgattattcgtactgtcagtcagctaaagagatgtccagcagtttctatagtagttacatgatagtgtgtaattgatggaaatgtcatttactggcagtcgtccatttggagtgtataaaaatcatggaataattggaagaatgcagtattagaaaacagcattgctgggagccaggcgtctgttccatcggatgacccgtgcggatgtgccgttagccttgttgcttccatttggtaattcttg

SEQ ID NO: 215808 - DNA, 3819 bp, Zea Mays
gttagccaaatctattgacggtgctatgcagctttcgcatagatttggttttcaacatttggattttggacatactgttattttgtttgtgttgagtcttgtcgacatgctgattgattgcatcttagacgattgtggattgcccgtcacctctgctgatgaacatggcaacagaaaagatatgaattttaatggcaaggggagatcatttgacaggggagatgaacaccgtgaacatctaaggagaaagaatatacttatgtctattgaagttgttgagaaggatagacctgaaaatttcaattatctacttcggaaacttcaccttattggtgctcttaaaaagaagaacgctttgtctccatgcaatctgctagatagcttgattgtgaatatacagaatgccataagcacgggctaccaattagacaggaaaaggcttctgggagttcctgttagcatacagccttgcagttcagctatttacagtatattcgtaactggaaagggatcttgttggattccttttgatatgtttatggagaatgcaatggatgggagacatcttcatactatatcatcagttgaatatctgacagaactatccaaaacacttcaagtgttgaatcgggcaacttggcaagagacctttcaggctttatggatttcggctttgcggctagtacatagggcccagatgcttcggaaggaccatttcctcatcttgattcacggatgtgcatgttgttggctattatccccttgtccattgcaactattgtgaaggaagaggcgggcaatctgaaaggggaaacaacctctgttataagaggacaattagtgtcttcacttcagattctgagacaattttttggtcttctttcaccacctccagcaactgtgcacttggcaaatgctgcagctagaaaagcagcagttgttctgtctaacctgaaaactgggagtgagaacatgtacagttctttcaaagacagttcctctattaaagcagttggaaatatgctacatcttatcgtggaagcctgtatcgcaaggaacttaatagatgcatctgcttatttctggcctggctatgtggttccacttaaagaatcctctccagttcaggcatctccatggtcatctttagtagaagggtctccacttatagaacttaaggatgcccttatggtcacacctgcttcgagtgtagaagagttggagaaattgtactcttttgcagtaagtgggtcaccggaggaaaagttggcagcttcgaagattttgtgtggtgcatcacttcttcgtggttggaacattcaggaacatgttgttcaaatggtgcttaagttgttatcgacattcctccctttggattctggatcagaagggcgatatgtacagcatatgcctatgctgcatgctcttgtatcaggaatttcttctattgacactgttcatattctctcactgtatggtctggtgccagaagtagcatctatgttaatgcctctctgtgagaattttggatctttacctccatctgatcataggagttgtaaacttgaagaggcttctgtgtactcagtattctcatgcgctttcctgtccctgcttcgcttgtggaaatttcatagaccacccattgagagtgctttatcaaggcgtggagtctctgtttggtcagagctccgtttggattttctcttgttattacgtaatagtcattcttctttgaaaaatctgtctaatgttactcaatcaagcatatttgaattagatccaccatttcaaaaaccattgtatattgattcatttccaaagctaagggcatggtacttccagaatcaagcttgcatagcttctacactttctagtgcttgcagcaggacaactgtcctccatgtggcaaacatgatactgaaaatcatatgccataataaagtgccaaaaggtggtgtcctgtctgtaaatcctcagtcaacagcaaattccactacgagtagttcacctgcaggcgtacaggaagatatgtgccagtggccaacacttccagcatgggaaattcttgaagctgttccttttgtgcttgaggctatgctaacttcatgcgctcatggaagactttcatcccgtgacttggttacaggtttaagagatcttgcagatttcttgcctgcttcacttgctgctattgtcagctacttctctgcagaagtcactagtggcatatggaagccagttatgttgaatggaatggactggccaagtccagctgcaactcttccagtagttgaatcggagataaaagaagctcttgcatttgctggtgttcatatcaatatctgtccacgtccacgttctgcgatgccaatgcttccattgccaatagcagcgctaatgagtttgtcaataacagtcaagatggaggaattcagccacctacacggcatcatttcccaaggaattgaaatttgtgcgacatctagttcatggcccactatgcaaattataggcgcattgtggtcccagaaggcacggcggtggcatgattttatcatcctgacttgttcgcagtcccccttcactcgagataacaccgcggtggcacaactgatcaggagctgcttctcgtctttcctggggcctttggttgatgggcgctcctgctccgtagcaaacagaggagttgcgaatctgctggggcagagttctgatgaaaaagcacacaggcttgctgtagctccagggtttctctacatgagatcctgccggttatttccaaacaacacctttgtttgtgaagagatcttggaggtggtcattgagagagcccatgcgctagcaaatgaccgcagttctgacagacctgcccgtttgaggtcagagtgtttgccgctatcagctgcgtcatccttggtagagcagatagcatcacttgcagcgactatgctttgccacgctggcggggtgaatctgattcgtctcctctacgagcagatcatgcccaccctgctgctttcaggtggagaagctaagctcggttccggtggtatggtatgcagcataatcgaaggatacacgctagcgtacgttctcctcttctcgggcgcaaccgtctggggagtcggagaaacgtcgccagcttacactttaatatacacatccaaaagacaacgggtcctcgacaggcacctggagttcatggccagggtgatggagggtaacattgtgctgggctgtggagatgccacgtggaggtcctacgttctgtgtttcgtcaacttgctggtcagcttcgtgcccgcgtgggtccctgaagtgaagctaaatacgctgcagaaactggcatctgggcttcggagatggcacgagggcgatcttgccctctctttgcttgagctagggggagccaagaccgtgacttcagtagttgaatctcttctgcggtgagctggtgctcaactgactgtatagttttctacgacaggttggtccatatacacattataacatgttaatgatctaaaaattcagtcatcagaaagatgaacagtacagttctaccgaagcttgattattcgtactgtcagtcagctaaagagatgtccagcagtttctatagtagttacatgatagtgtgtaattgatggaaatgtcatttactggcagtcgtccatttggagtgtataaaaatcatggaataattggaagaatgcagtattagaaaacagcattgctgggagccaggcgtctgttccatcggatgacccgtgcggatgtgccgttagccttgttgcttccatttggtaattcttg

SEQ ID NO: 215809 - DNA, 1391 bp, Zea Mays
tcgctgggcgcgcagcccacatgtcccccgccgcttccgcaccggtcttctcccacctcggccccctcatccctcctccaactccaatgctctccactcttctccgccaccgcctcaccgccgccgcctcctcctcgtcgccgacccacagcacgcctctccgtctgcgccccctcgccgcagccatgtcgtcgtccgcgtccgcgcctcacggcggccggaagccgaaccgcctcgccgccgagcacagcccctacctgctgcagcacgcgcacaacccggttgattggtacccttggggggaagaggctttccagaaggcgcgcgccaaggacgtccccatcttcctctcgagtatgaactctcctgataccattgtgttagctcagtagttttgttgcagccttgcaggcatgtagtgccaccaatgtgtgacatggtaaattgttttgcttaaccatattatgatggtcttgtcaagagagaactaagttaaaatggtaatcgaattttctgattccgttctagtcaactcaaacgttctgtacctaacgttcttattttgcttcattgcaatccggttgtgtcccacaagttggctatagcacatgccattggtgtcatgtgatggaggtggagtcctttgagaatgaggaagtggcaaagttgctgaatgattggtttgttagcatcaaggttgaccgtgaagagcgccctgatgttgataagttagctcgaaaaggtttctgggcgtgtttgtattgggtggcacactaggttctttgttgaatatagcctcacatattttaggtttatatgacatatgtatcggcactgcatggtggtggtggttggcctctaagcgtctttttgtcacctgacttgaaacctctgatgggtggtacatactttccaccggatgataattatggaagaccagggttcaagactgtattgaggaaggtcaaggaagcctgggaaactaaacgtgaagcgcttgagcggacgggaaatcttgttatcgaacaattaagggacgcattatctgctaaggctagctctcaagatgtgccaaatgacctagcagttgtctctgttgatcaatgtgtcgaaaagttagcgagcagctatgatccaaaatttggtggatttggctctgctcccaagtttccaagacctgttgaagattatataatgctatacaaattccataagtacatggaggctgggaaggagattgaagccttgaacataaagaagatggtgactcacacattggactgtatggcaagaggtggagttcatgaccacataggtggtggttttcacagatatagtgtggatgagtgctggcatgttccacattttgagaagatgatttccgatcaggg

SEQ ID NO: 215810 - DNA, 1138 bp, Zea Mays
cgcgggccttgcggacgccagcgtgtgccgagcggaggcaggcaggtgtcgctgggcgcgcagcccacatgtcccccgccgcttccgcaccggtcttctcccacctcggccccctcatccctcctccaactccaatgctctccactcttctccgccaccgcctcaccgccgccgcctcctcctcgtcgccgacccacagcacgcctctccgtctgcgccccctcgccgcagccatgtcgtcgtccgcgtccgcgcctcacggcggccggaagccgaaccgcctcgccgccgagcacagcccctacctgctgcagcacgcgcacaacccggttgattggtacccttggggggaagaggctttccagaaggcgcgcgccaaggacgtccccatcttcctctcgattggctatagcacatgccattggtgtcatgtgatggaggtggagtcctttgagaatgaggaagtggcaaagttgctgaatgattggtttgttagcatcaagtctgattattaattttgataggttgaccgtgaagagcgccctgatgttgataaggtttatatgacatatgtatcggcactgcatggtggtggtggttggcctctaagcgtctttttgtcacctgacttgaaacctctgatgggtggtacatactttccaccggatgataattatggaagaccagggttcaagactgtattgaggaaggtcaaggaagcctgggaaactaaacgtgaagcgcttgagcggacgggaaatcttgttatcgaacaattaagggacgcattatctgctaaggctagctctcaagatgtgccaaatgacctagcagttgtctctgttgatcaatgtgtcgaaaagttagcgagcagctatgatccaaaatttggtggatttggctctgctcccaagtttccaagacctgttgaagattatataatgctatacaaattccataagtacatggaggctgggaaggagattgaagccttgaacataaagaagatggtgactcacacattggactgtatggcaagaggtggagttcatgaccacataggtggtggttttcacagatatagtgtggatgagtgctggcatgttccacattttgagaagatgatttccgatcaggg

SEQ ID NO: 215811 - DNA, 987 bp, Zea Mays
aacaaagtggcgcacacacactagcagcaggcgcgcgggccttgcggacgccagcgtgtgccgagcggaggcaggcaggtgtcgctgggcgcgcagcccacatgtcccccgccgcttccgcaccggtcttctcccacctcggccccctcatccctcctccaactccaatgctctccactcttctccgccaccgcctcaccgccgccgcctcctcctcgtcgccgacccacagcacgcctctccgtctgcgccccctcgccgcagccatgtcgtcgtccgcgtccgcgcctcacggcggccggaagccgaaccgcctcgccgccgagcacagcccctacctgctgcagcacgcgcacaacccggttgattggtacccttggggggaagaggctttccagaaggcgcgcgccaaggacgtccccatcttcctctcgattggctatagcacatgccattggtgtcatgtgatggaggtggagtcctttgagaatgaggaagtggcaaagttgctgaatgattggtttgttagcatcaaggttgaccgtgaagagcgccctgatgttgataaggtttatatgacatatgtatcggcactgcatggtggtggtggttggcctctaagcgtctttttgtcacctgacttgaaacctctgatgggtggtacatactttccaccggatgataattatggaagaccagggttcaagactgtattgaggaaggtcaaggaagcctgggaaactaaacgtgaagcgcttgagcggacgggaaatcttgttatcgaacaattaagggacgcattatctgctaaggctagctctcaagatgtgccaaatgacctagcagttgtctctgttgatcaatgtgtcgaaaagccatctaataaagcatcagttagcccaaccatatcatctagcttcccagagttgcttctgcagaggttctatgactacgcggacatgtactgaagtacacacttgttcttac

SEQ ID NO: 215812 - DNA, 1701 bp, Zea Mays
agttatccttgccctcagcatgcggttcctaaaacctccctccaatcaagtacatgcaaaagttcgtgaagataaccgattttacccttactttaagaattgtctgggttcaatagatggaacccacgttccaatatcgatgtcacctaatcaagctgcaccattcaggaatagaaaagggacacttagtcaaaatgtgatgttcgtttgtgattttgatctcagagtcacttatttgtcagctggatgggaaggatcagcaacagattcaatggttctcagatctgcaatgaccaattctataggaaaggttgaagtaccttccagaaagttctacctagtagatggtggttatgccaatacagcttcctttcttgcgccttatcgtggggttaggtaccacttgaaagagtttggtcgtggccaccgaagacctcaaaatcataaggagttatataatcatcgcccatgccattttaagaaatcatgtagagagggctttgggtgtcataaagaagagatttccaatcctcaaagttgctacctttcacaaaatagaaaaccaagccaaaatacctttagctactgcagtctttcataacttgattcggtcactaaatggtgatgagaggtggctagagaatgatcaaggaaatatcaatccataaacttttatcaacctacatgatgataagatgtttagaggttctcctaagataatagctttatctaaagctgctcaaaagaaggcttctcctaaagctgcaaaatcaaagaaatgtggcggtggtgttgagagagctgcatggaatgttgaattagagaagagtcttgttgacttgttatttgaacacaatatgcctgcatatagggctcaaaatggatggagtccagatgcttggaataaaatagtttctgaattccacaagaagcatgaatatgttacattcaacaagatccaaattcaagaaaaggagagagaatttaaaagggaatacaaggtattgaaggaggcaagaaaacaaagtggagtttcttggaatgaaaaaagatgcatgatcattgctgaaccaacgatatggggcaacattatcactacatttcctagagctaagaagttccgcaagaagtcttttcctctctttgatgccttgagtgaattatatgatggtcacattgcacaagggacttggaacattacatctactcaaccactacaaaattctgatgaaggagagaaatttaaaaccatagaagtggaagatgaagatactaatgaaccacaagtagatgcgagaatagaacaagatgaagatatagtaattgttgaaagggttgaacagaggttacctaaaaggtcaggtgcaccaactgttaatcaagagaaggagacaaagagagtgaggaaagatgcactagaagggctgatagggaggtaccttgatgtaaaaacaaagcaagttgcaaatgaggctgcacaatcaacaaaagagaaggaagttgctcaagataatgatttttctatcaagaggtgtatttctgttcttaagactatggatatcacaagagatgagaagatcaaagcagctgaggtgtttaacacaccaaattacagagaaacatttatttgtttcaatgatgatgagccagaagtcgctctcctttggctaagggggaagatggataaactctaaaggtaag

SEQ ID NO: 215813 - DNA, 1187 bp, Zea Mays
atgggagatgggggcaagctcacggccggcatggtggagtccgaggcgagcaccgacatgaaggagaggccacggcgagcgcagatgccgaagcaagacgtggctatggattggctggaccagggagagcgtgcggtgaagctcgacgtggccaagcccacgcgatttgcgacagggacaggaccagcgtcccggattgtccctactcttgtgagagtcgcgaggacgagctttccccctcttgagatccggtgtctaatccatttttcaaggtggtgttgagagagctgcatggaatgttgaattagagaagagtcttgttgacttgttatttgaacacaatatgcctgcatatagggctcaaaatggatggagtccagatgcttggaataaaatagtttctgaattccacaagaagcatgaatatgttacattcaacaagatccaaattcaagaaaaggagagagaatttaaaagggaatacaaggtattgaaggaggcaagaaaacaaagtggagtttcttggaatgaaaaaagatgcatgatcattgctgaaccaacgatatggggcaacattatcactacatttcctagagctaagaagttccgcaagaagtcttttcctctctttgatgccttgagtgaattatatgatggtcacattgcacaagggacttggaacattacatctactcaaccactacaaaattctgatgaaggagagaaatttaaaaccatagaagtggaagatgaagatactaatgaaccacaagtagatgcgagaatagaacaagatgaagatatagtaattgttgaaagggttgaacagaggttacctaaaaggtcaggtgcaccaactgttaatcaagagaaggagacaaagagagtgaggaaagatgcactagaagggctgatagggaggtaccttgatgtaaaaacaaagcaagttgcaaatgaggctgcacaatcaacaaaagagaaggaagttgctcaagataatgatttttctatcaagaggtgtatttctgttcttaagactatggatatcacaagagatgagaagatcaaagcagctgaggtgtttaacacaccaaattacagagaaacatttatttgtttcaatgatgatgagccagaagtcgctctcctttggctaagggggaagatggataaactctaaaggtaag

SEQ ID NO: 215814 - DNA, 1508 bp, Zea Mays
ctgatccctgcttacgcgcgctccctgcccagtgctgccccttacccctgctcggcttcaacaccgaggcccatatccagcgccacctaatccctccctcattcatgggcatcgtcggctggacctccctaatggttacgtgtgcatctccgtgctccatcatcccatcatggaactcaagcaccgacagcgcccccatctactgcccacctcgctgatcggcgagctcaatcgtgtgcgcgtccctgcttccctctattgccgactgtcgttgaccccggcatggggctcgtccctgcgctcggccttcctctacgcgaacgcgcagagctgtgcctgtcgtgtgctcgtctcagccgagcaccgtttgccccagcgtcactcgcccatggtcgccggttcgtcctcagccctggatgccattcttttccgctcacctcacccagcgccggtccggccgctgtctccggtcttgtccttgtttacacggatcatcgtgggcacgtgctgtggcagcgccttggtggctgtcgagcagcgcaccatgcctgcgcagtctcagccatgaagtcgtccatcatgttcggtgcactctaggtattcgacaaaatagaaccaaggaactgtcgtcattcaaacagcttcgccgcgtcttgcatccccgccggtccttgttcgctgtccgcctggtgcgcgatgaaaggctcgaactgggcatcgttgtcaatctcgtggtttcgagtccgatttagataatagtagccgattcgttacttccgctattggtcggatgaatttagttaaacataatagttgtgtcgtttctcttgtcgatagcatgtgcattgtggtcataaggataatgtttattgcaatgttcgagtcgcttgcggtgatatggtcgtgtgaatggtcgaatgcttgttgaaataccgcagtggcgaggagtgtttgggtagacatgtaggcttaatgtgttagtgttggaaatggtaaattaaccgctatgcttggtgaagtatatgtttgaggttcatatgatagtagagtgtttggtaagcaagtatgtgacatatagtcaagcttagattaaaaatgcaaagtggatgcaagatgattaaattagtaattaattaggcatatgtgagtaaaactgccttaggtatttagcgtattgaggatacagtttcgcggggctccatgctagttgataatgagttgtctgctagatctaaaactaatgtgatattcatgtaattagcgtgttatccaaattagtttgaacaagtggtttagaaagtcagttaatgtgcttctatccttattctaaatttagatgtctaagattaatgattctaagtttgttagtcttctggtgttctataatattaagtctagttttagatgttatgctctactttgaggcctatgttcaattattgttaatttgatgtttgaattaagtatgattatctcgaagattagaattatcgtaaagtcatagttat

SEQ ID NO: 215815 - DNA, 2293 bp, Zea Mays
ggttgccggcaagctccaactcccagattaacgccatggagagaaggggcattgaaccttacagtgatacacttgctgctctctcagagggtcatagcaatagtttacagttggatttggctgaggagtttttggaaagaatttcagagataaaaccaaagcatataggttcctttaatgctttgctttctggatgtgcgattatgaatgaaccagaaagagctgtccgcatactagctaaaatgaaacatgtgaacatgaagccaactctcaggacatatgaacttttgttttctctgtttggaaatgtaaatgttccttatgaacaaggagatgtgctctctcatgtcgatgtttccaaaaggataagtatcattgagatggacatgtttaacaatggaatccaacacagctttgtgtccatgaagaacttgatacgagcttttggagctgaggggatgatagaggaaatgctgaggtacctgaatatagcagaaaatactctgtggaacataaatcctcatcagaagagtgatctctacagcactgcgttgcatgctctggttgatgtgaaggaaactcacagagcagtaaagatgttcaaaatcatgagatcatgcagtcttccaactaatatttcaatttataataccatgatagagtgctgcaaatggctgccatgcttcaaatcagctagtgctttgctgtctttgatgcttcgagatggtttcaatcctacggttgtgacttttacatcactcctgaaggttgtattagaaaatgataattttgaaggggctctggatctgcttgatatatgcaagattgaaggacttcagcctggcatacagactttcaacacagtactcttacgtgcatatgctagaggtcaaattcatgtccttgaatatattttggagtgtatacatcgatcaaaaatccaacctgatccatcaacactttggtacacgttttgtgcctacgaggagcatgaactgtacaatactgcaattgagtcattgctagtcctcagcatgagaatgatatctgaggatgccggcattcctagtgagaaaagaattgtttttgaagatctaatcctcagtgaagaacctgatgctgaattcaggatcataagggcattccaagcaggcgaagaattccttgcgacagctttactgaacctaagatggtgtgccacaatgggtgccaccgtatcttggtcaccggaggagagtctttgggcaatgaggctggcagcctcgtatgatgctaacaagagaccacatataaacccctcggatgctcccaaatcttggggaaggaatccacttaaccgcccgtattgggaggctaacgggtgattggttgattggttggctacgcttccgttgatcacgcttggcacgtgtttggatggctgcagagcatctctaccgcctgctcccatgcatgcagcgttgattttttcccccactgggtagcctgcatgcgcggaaactcaactccccgtctccccctcgtttccagcggcccaggctggcacgatgctggtgcgagacgcccctacaaccaatcatgcgttaactgaggcagagctggagtctagcgtttcaaatctctctgttgagtatgatgacaatgttgtgttctgttttgctggaagccagtagatgttttgtttacctaactaacatgattgcagtacgatcgggcggcctccctacctgtcgtgaagcttgttccgcatgattgctccaaattggcctcgtaccgttttcaggcttctaggccaacagctctatgttccgattctttacattacttgataggttgctcactttatttacccagttgtaatttctgattatactggctgtcgggagcattagctttgcaaaactgtaggaatatatatgacaacgacgaagatcgagtcgcatggcagtgacagaagaataagaggtgttacgattacaatagctggaaaccaaaacttgctctggttattttgaaggtgtttagattttggaatgacgatgttacaattacactttattctggcaaaggtagattgtagaaggatggatagtgatgcactgttaccgcgtggtactgggttggtctttgtttgttgtacatcagttgttttctggcaggtcgttttgttgacttcgtagctgcccgaataacagaccaattattccatctcagttagagatcatttgtctacggcactcgacattcccttggtttctctcctttctgtctggttttggacttttgtttcagc

SEQ ID NO: 215816 - DNA, 3315 bp, Zea Mays
actgcttccacttcacacgcttcctccacgccacctcgatctgtgcggcggcaaacccagagatccttgccccgtccgccggcgaaaggcgctcacctcccctcttcgctgtctgcgatgcagaggatactatcgagggccgctcgccggtgcacgaactcctcggcggcgttcaactcacctcacgcgcaggccaatgcagcaagtgttcactctgaagacgccccaacttgttcaaacatgattacagagaacgatgattttacatggaagactagttttgttagacccatgcaatcagaagtcgtcaatgccctccgtagagtttgttatggaaactttggaactcatggaggagaaggccattggcatgagtaaaagtatctacagatatgtcattagagctctgagcagagggggatatgcgaaggagcttgcagtgttacagggaaatttgcctgcagcttatgatatctggaaggagtgctctaggtattatagcccaagcattgtcacgcaaaggagatttataagggctttaactgcgctaggtgaccttcaatctgcgtatcacatattgcagcatatggtagcccttgctgcacaaagctgtgactatctgagggtgtcttctaaaagaagataccgatcatcgagactagacattcctgtacctgctttgaatgaatttgaagatctcaacctgccatcatgccaagggaagctggctaccggcgaacatttggttgatgctcaacctgagctatttgatgagaaaactcggccaggcaacaatctttcttataaggttgtagtagatgcgagtgttgcaaatacattgaagtctgcaccaagcacagtaaaacaaattttgagatgggcgttcaatgatgttttgcatgcatgtgtaccgttcaacaactgccagttagctgagcatttatttacagagatgcagaaacttggattgcaaccaacaagttatacatatgacggttttattaaaaccgtgatagctgggaaaggaattgcatatgccaacaaagtgattaacgccatggagagaaggggcattgaaccttacagtgatacacttgctgctctctcagagggtcatagcaatagtttacagttggatttggctgaggagtttttggaaagaatttcagagataaaaccaaagcatataggttcctttaatgctttgctttctggatgtgcgattatgaatgaaccagaaagagctgtccgcatactagctaaaatgaaacatgtgaacatgaagccaactctcaggacatatgaacttttgttttctctgtttggaaatgtaaatgttccttatgaacaaggagatgtgctctctcatgtcgatgtttccaaaaggataagtatcattgagatggacatgtttaacaatggaatccaacacagctttgtgtccatgaagaacttgatacgagcttttggagctgaggggatgatagaggaaatgctgaggtacctgaatatagcagaaaatactctgtggaacataaatcctcatcagaagagtgatctctacagcactgcgttgcatgctctggttgatgtgaaggaaactcacagagcagtaaagatgttcaaaatcatgagatcatgcagtcttccaactaatatttcaatttataataccatgatagagtgctgcaaatggctgccatgcttcaaatcagctagtgctttgctgtctttgatgcttcgagatggtttcaatcctacggttgtgacttttacatcactcctgaaggttgtattagaaaatgataattttgaaggggctctggatctgcttgatatatgcaagattgaaggacttcagcctggcatacagactttcaacacagtactcttacgtgcatatgctagaggtcaaattcatgtccttgaatatattttggagtgtatacatcgatcaaaaatccaacctgatccatcaacactttggtacacgttttgtgcctacgaggagcatgaactgtacaatactgcaattgagtcattgctagtcctcagcatgagaatgatatctgaggatgccggcattcctagtgagaaaagaattgtttttgaagatctaatcctcagtgaagaacctgatgctgaattcaggatcataagggcattccaagcaggcgaagaattccttgcgacagctttactgaacctaagatggtgtgccacaatgggtgccaccgtatcttggtcaccggaggagagtctttgggcaatgaggctggcagcctcgtatgatgctaacaagagaccacatataaacccctcggatgctcccaaatcttggggaaggaatccacttaaccgcccgtattgggaggctaacgggtgattggttgattggttggctacgcttccgttgatcacgcttggcacgtgtttggatggctgcagagcatctctaccgcctgctcccatgcatgcagcgttgattttttcccccactgggtagcctgcatgcgcggaaactcaactccccgtctccccctcgtttccagcggcccaggctggcacgatgctggtgcgagacgcccctacaaccaatcatgcgttaactgaggcagagctggagtctagcgtttcaaatctctctgttgagtatgatgacaatgttgtgttctgttttgctggaagccagtagatgttttgtttacctaactaacatgattgcagtacgatcgggcggcctccctacctgtcgtgaagcttgttccgcatgattgctccaaattggcctcgtaccgttttcaggcttctaggccaacagctctatgttccgattctttacattacttgataggttgctcactttatttacccagttgtaatttctgattatactggctgtcgggagcattagctttgcaaaactgtaggaatatatatgacaacgacgaagatcgagtcgcatggcagtgacagaagaataagaggtgttacgattacaatagctggaaaccaaaacttgctctggttattttgaaggtgtttagattttggaatgacgatgttacaattacactttattctggcaaaggtagattgtagaaggatggatagtgatgcactgttaccgcgtggtactgggttggtctttgtttgttgtacatcagttgttttctggcaggtcgttttgttgacttcgtagctgcccgaataacagaccaattattccatctcagttagagatcatttgtctacggcactcgacattcccttggtttctctcctttctgtctggttttggacttttgtttcagc

SEQ ID NO: 215817 - DNA, 3600 bp, Zea Mays
cccgaggtccggtggcagcatcgctgaacccctcgtcgccggtgtcgctctcgtctgcttccattttgtaggctgcgcggtgtatactgcttccacttcacacgcttcctccacgccacctcgatctgtgcggcggcaaacccagagatccttgccccgtccgccggcgaaaggcgctcacctcccctcttcgctgtctgcgatgcagaggatactatcgagggccgctcgccggtgcacgaactcctcggcggcgttcaactcacctcacgcgcaggccaatgcagcaagtgttcactctgaagacgccccaacttgttcaaacatgattacagagaacgatgattttacatggaagactagttttgttagacccatgcaatcagaagtcgtcaatgccctccgtagaggtgaccggcagcgagcatcattgattctttcgaactttcatcacactaaggaatcactgaccaaggaagatttttcttatatattggagtattgtgcagaggcacctgatcctttgtttgttatggaaactttggaactcatggaggagaaggccattggcatgagtaaaagtatctacagatatgtcattagagctctgagcagagggggatatgcgaaggaggcacttcactggctggctcttctaggggagaaagaaagcactcatgccactacaccgatttttaatatctttctaaatgcctgtggtagagcaaatctgaaggacgccgaaaactgtctagagatactggaaaatctttttcttgggaagtctgaaataacatactgtgagcttttgaagcttgcagtgttacagggaaatttgcctgcagcttatgatatctggaaggagtgctctaggtattatagcccaagcattgtcacgcaaaggagatttataagggctttaactgcgctaggtgaccttcaatctgcgtatcacatattgcagcatatggtagcccttgctgcacaaagctgtgactatctgagggtgtcttctaaaagaagataccgatcatcgagactagacattcctgtacctgctttgaatgaatttgaagatctcaacctgccatcatgccaagggaagctggctaccggcgaacatttggttgatgctcaacctgagctatttgatgagaaaactcggccaggcaacaatctttcttataaggttgtagtagatgcgagtgttgcaaatacattgaagtctgcaccaagcacagtaaaacaaattttgagatgggcgttcaatgatgttttgcatgcatgtgtaccgttcaacaactgccagttagctgagcatttatttacagagattaacgccatggagagaaggggcattgaaccttacagtgatacacttgctgctctctcagagggtcatagcaatagtttacagttggatttggctgaggagtttttggaaagaatttcagagataaaaccaaagcatataggttcctttaatgctttgctttctggatgtgcgattatgaatgaaccagaaagagctgtccgcatactagctaaaatgaaacatgtgaacatgaagccaactctcaggacatatgaacttttgttttctctgtttggaaatgtaaatgttccttatgaacaaggagatgtgctctctcatgtcgatgtttccaaaaggataagtatcattgagatggacatgtttaacaatggaatccaacacagctttgtgtccatgaagaacttgatacgagcttttggagctgaggggatgatagaggaaatgctgaggtacctgaatatagcagaaaatactctgtggaacataaatcctcatcagaagagtgatctctacagcactgcgttgcatgctctggttgatgtgaaggaaactcacagagcagtaaagatgttcaaaatcatgagatcatgcagtcttccaactaatatttcaatttataataccatgatagagtgctgcaaatggctgccatgcttcaaatcagctagtgctttgctgtctttgatgcttcgagatggtttcaatcctacggttgtgacttttacatcactcctgaaggttgtattagaaaatgataattttgaaggggctctggatctgcttgatatatgcaagattgaaggacttcagcctggcatacagactttcaacacagtactcttacgtgcatatgctagaggtcaaattcatgtccttgaatatattttggagtgtatacatcgatcaaaaatccaacctgatccatcaacactttggtacacgttttgtgcctacgaggagcatgaactgtacaatactgcaattgagtcattgctagtcctcagcatgagaatgatatctgaggatgccggcattcctagtgagaaaagaattgtttttgaagatctaatcctcagtgaagaacctgatgctgaattcaggatcataagggcattccaagcaggcgaagaattccttgcgacagctttactgaacctaagatggtgtgccacaatgggtgccaccgtatcttggtcaccggaggagagtctttgggcaatgaggctggcagcctcgtatgatgctaacaagagaccacatataaacccctcggatgctcccaaatcttggggaaggaatccacttaaccgcccgtattgggaggctaacgggtgattggttgattggttggctacgcttccgttgatcacgcttggcacgtgtttggatggctgcagagcatctctaccgcctgctcccatgcatgcagcgttgattttttcccccactgggtagcctgcatgcgcggaaactcaactccccgtctccccctcgtttccagcggcccaggctggcacgatgctggtgcgagacgcccctacaaccaatcatgcgttaactgaggcagagctggagtctagcgtttcaaatctctctgttgagtatgatgacaatgttgtgttctgttttgctggaagccagtagatgttttgtttacctaactaacatgattgcagtacgatcgggcggcctccctacctgtcgtgaagcttgttccgcatgattgctccaaattggcctcgtaccgttttcaggcttctaggccaacagctctatgttccgattctttacattacttgataggttgctcactttatttacccagttgtaatttctgattatactggctgtcgggagcattagctttgcaaaactgtaggaatatatatgacaacgacgaagatcgagtcgcatggcagtgacagaagaataagaggtgttacgattacaatagctggaaaccaaaacttgctctggttattttgaaggtgtttagattttggaatgacgatgttacaattacactttattctggcaaaggtagattgtagaaggatggatagtgatgcactgttaccgcgtggtactgggttggtctttgtttgttgtacatcagttgttttctggcaggtcgttttgttgacttcgtagctgcccgaataacagaccaattattccatctcagttagagatcatttgtctacggcactcgacattcccttggtttctctcctttctgtctggttttggacttttgtttcagc

SEQ ID NO: 215818 - DNA, 3690 bp, Zea Mays
cccgaggtccggtggcagcatcgctgaacccctcgtcgccggtgtcgctctcgtctgcttccattttgtaggctgcgcggtgtatactgcttccacttcacacgcttcctccacgccacctcgatctgtgcggcggcaaacccagagatccttgccccgtccgccggcgaaaggcgctcacctcccctcttcgctgtctgcgatgcagaggatactatcgagggccgctcgccggtgcacgaactcctcggcggcgttcaactcacctcacgcgcaggccaatgcagcaagtgttcactctgaagacgccccaacttgttcaaacatgattacagagaacgatgattttacatggaagactagttttgttagacccatgcaatcagaagtcgtcaatgccctccgtagaggtgaccggcagcgagcatcattgattctttcgaactttcatcacactaaggaatcactgaccaaggaagatttttcttatatattggagtattgtgcagaggcacctgatcctttgtttgttatggaaactttggaactcatggaggagaaggccattggcatgagtaaaagtatctacagatatgtcattagagctctgagcagagggggatatgcgaaggaggcacttcactggctggctcttctaggggagaaagaaagcactcatgccactacaccgatttttaatatctttctaaatgcctgtggtagagcaaatctgaaggacgccgaaaactgtctagagatactggaaaatctttttcttgggaagtctgaaataacatactgtgagcttttgaagcttgcagtgttacagggaaatttgcctgcagcttatgatatctggaaggagtgctctaggtattatagcccaagcattgtcacgcaaaggagatttataagggctttaactgcgctaggtgaccttcaatctgcgtatcacatattgcagcatatggtagcccttgctgcacaaagctgtgactatctgagggtgtcttctaaaagaagataccgatcatcgagactagacattcctgtacctgctttgaatgaatttgaagatctcaacctgccatcatgccaagggaagctggctaccggcgaacatttggttgatgctcaacctgagctatttgatgagaaaactcggccaggcaacaatctttcttataaggttgtagtagatgcgagtgttgcaaatacattgaagtctgcaccaagcacagtaaaacaaattttgagatgggcgttcaatgatgttttgcatgcatgtgtaccgttcaacaactgccagttagctgagcatttatttacagagaaacttggattgcaaccaacaagttatacatatgacggttttattaaaaccgtgatagctgggaaaggaattgcatatgccaacaaagtgattaacgccatggagagaaggggcattgaaccttacagtgatacacttgctgctctctcagagggtcatagcaatagtttacagttggatttggctgaggagtttttggaaagaatttcagagataaaaccaaagcatataggttcctttaatgctttgctttctggatgtgcgattatgaatgaaccagaaagagctgtccgcatactagctaaaatgaaacatgtgaacatgaagccaactctcaggacatatgaacttttgttttctctgtttggaaatgtaaatgttccttatgaacaaggagatgtgctctctcatgtcgatgtttccaaaaggataagtatcattgagatggacatgtttaacaatggaatccaacacagctttgtgtccatgaagaacttgatacgagcttttggagctgaggggatgatagaggaaatgctgaggtacctgaatatagcagaaaatactctgtggaacataaatcctcatcagaagagtgatctctacagcactgcgttgcatgctctggttgatgtgaaggaaactcacagagcagtaaagatgttcaaaatcatgagatcatgcagtcttccaactaatatttcaatttataataccatgatagagtgctgcaaatggctgccatgcttcaaatcagctagtgctttgctgtctttgatgcttcgagatggtttcaatcctacggttgtgacttttacatcactcctgaaggttgtattagaaaatgataattttgaaggggctctggatctgcttgatatatgcaagattgaaggacttcagcctggcatacagactttcaacacagtactcttacgtgcatatgctagaggtcaaattcatgtccttgaatatattttggagtgtatacatcgatcaaaaatccaacctgatccatcaacactttggtacacgttttgtgcctacgaggagcatgaactgtacaatactgcaattgagtcattgctagtcctcagcatgagaatgatatctgaggatgccggcattcctagtgagaaaagaattgtttttgaagatctaatcctcagtgaagaacctgatgctgaattcaggatcataagggcattccaagcaggcgaagaattccttgcgacagctttactgaacctaagatggtgtgccacaatgggtgccaccgtatcttggtcaccggaggagagtctttgggcaatgaggctggcagcctcgtatgatgctaacaagagaccacatataaacccctcggatgctcccaaatcttggggaaggaatccacttaaccgcccgtattgggaggctaacgggtgattggttgattggttggctacgcttccgttgatcacgcttggcacgtgtttggatggctgcagagcatctctaccgcctgctcccatgcatgcagcgttgattttttcccccactgggtagcctgcatgcgcggaaactcaactccccgtctccccctcgtttccagcggcccaggctggcacgatgctggtgcgagacgcccctacaaccaatcatgcgttaactgaggcagagctggagtctagcgtttcaaatctctctgttgagtatgatgacaatgttgtgttctgttttgctggaagccagtagatgttttgtttacctaactaacatgattgcagtacgatcgggcggcctccctacctgtcgtgaagcttgttccgcatgattgctccaaattggcctcgtaccgttttcaggcttctaggccaacagctctatgttccgattctttacattacttgataggttgctcactttatttacccagttgtaatttctgattatactggctgtcgggagcattagctttgcaaaactgtaggaatatatatgacaacgacgaagatcgagtcgcatggcagtgacagaagaataagaggtgttacgattacaatagctggaaaccaaaacttgctctggttattttgaaggtgtttagattttggaatgacgatgttacaattacactttattctggcaaaggtagattgtagaaggatggatagtgatgcactgttaccgcgtggtactgggttggtctttgtttgttgtacatcagttgttttctggcaggtcgttttgttgacttcgtagctgcccgaataacagaccaattattccatctcagttagagatcatttgtctacggcactcgacattcccttggtttctctcctttctgtctggttttggacttttgtttcagc

SEQ ID NO: 215819 - DNA, 4852 bp, Zea Mays
ctgcgctgcgctgcgctggaatggatagggtgtctcgcagctccagacggccacgtcggccagccgtcggccactcgcttcgactggcaggctcctacccttgcagacaaaaaacgcaaacacgaggacgaggacgaaggttcgttcagttcaagaccagacgaggaggaagagaggcgcgcaagcggtccggtctcatggcgcccttccccgccctccgctcatcgtcgccggtggccgccgccgcggcgccgtcgctcggtcgcgtgtccggccacgttcaggcgttctgtctatgtcttatattcacttgtgagtgagtgagttccgtcgtcgaaactcgaaacgcagcatctgcggcgcccagcaagaggcgcgtcgtctcctgcagggccgtcagcagcaggtcgctgtccatcatcaggtgcgagcagagcgcgaagaagggcggcgggccggacacatggctgggccgcgcggccatggtcggcttcgcctccgcgatcgccgtcgaggtggccaccggcaagggcttccttcagaacttgggcgtgggtactccggcgccgacgctggcgctggccgtgtcggggctcgtcgtcggcctcgccgtcttcttcctgctgcagtcgggaggaggcacgcgagactgacgactgatggaacccatgagctgagctgagcacgcgtcgaacatcgtctccccactcgacatcagtcgttgctgtaatggttggtgaagcgaagatgaaaacccaggacatatatcagcatcatgtcatgtgtaacaaagacgacaactctcatgtgttggtgttgtctgctgctgttgtacgacatccgccgctcgcttgtacgaccgtactgcacttcatctgccggccgggcgagcacagccgttctttaataacatgacgggcgcatgcacacgccagctgactcttcatgtcgattgcgtccagacaattttgttaggactggtttgttattaggagcagacctgccgtttccatgtgcttgcttcacggagcacggcagctctgtaaacggcagactcgacgtagcttgcacgcacaggggttttcagctaaaaaatcctctagcgacagttcattggttgcccagttcaccgactgcctttataaacagggagctcgagctcgagtggtagcagcacaggcacaagtgcggtgccataagtgacagccacctcagtctctgtctgtggagctctctctcgcgcgcgttgccatctcgcaggttcttcatctcgtcgctctgttcaggcgcaggcggcgacaggagatggacggggagcaggcggcgcggtgggcggcggcgcaggagggggttcccgtcggggcggaccttgtcgcggcggcgctgcggcagctgcgcttcctcgcggcggtggaccgccgccggtggctctacgacgagggcccgctgctcgaccgggccatacgcaggtacaaagcatgctggcttccgcttcttgacaagcacactaagggtgtggttgtagatggtccattggttgttcctcttgattgtgagtggatatggcactgccatcgccttaacccggttcagtacataagggactgcaagaaagtgtatggcagaatactgaacaataacaacgttgagtcgtccactcaaacaaagtcgacacttgagtcagaaaaagtttggaaagagctgtatcctgaggagcccttcgaattgttgttcacaagaacctttgacactgccgtggatgtcaaccctgcaggtgcagaggaggacattacctatgatctggtctcggctgttaagagacaatcctctttctattatcaggttggaacaccaacaatgcatgatccacggtttctccaagaagctctagctcgatacaaggcgtttctttacctgatcaagatgaatcaagaaaaaggattgcagcgcttccgtgtaccaacctatgatgtggatctgttgtggcacactcaccagctgcatcctattacctaccgcaacgacatggtgaagcttcttggaaaagttctggagcatgatgacaccgatgctgatcgatctgaagggaagaaactcgatgttggatttaccgagactactgaacagttcgagagtacctttggtgtaagatactggaaggctggatgtatgtaccgtggcaacgtgccatctcctgtgacatccactcctcagacattcagtgctgaggttggtactgggtcttacatctgcaaagcccagaaagatcttaatgcccttgatgtaacagttgtagagttatatttacaaattgtagacatcaagaatttaccatctgctgttcaaaaagaaaatgtgtatgtacggttcgccaagaatcaatcagatatgttcatcagtgacggcggcaggttggatatctcaacagttacagggaagaacaccggagtttgtttacagtgtgaacctaccggagaactcattcttgcagtaatggttgatcaattatcaaagaaaccagaaccgatagggaaggtttctttcccactgcacgatttgacagggcctgattctaagctctccttcgagaagtggtttgaactgaaagctcatggtgggcatgccgcttcacctcctgttagtcttcgtgttgcagcttctgctactgtcccaagcagcgctcagaaggtgttcaccatggtcaggatggagccattctctctcaagtcatgtcttttgccacattccatcaaggatcagaacacgggcagctggactcgtttcgtaaatgattgtggtaccgagcttatccgtctccagataagagagcacaaggcgaagaatagcatggccgtcgttcgagaattggttggagtattgaagtcaacaaaaaagcaaattcaacttgcagaattcaaggaaaacaagtggaccctaaaagactccaacttgccaataagtcatggcactgatggcagtctactcgatctcaaaggtgacaaccatctgatcaagctttatcggggaaggaaactggaatacgagcgcaaatgttgcagcgctcactctgaggacgtatcagctgttactgctgtaaagttctgtgctgaacatccatatggcaaagccgttgccttgctagacactgaagctcagcttatcatggtgaacgaggattggctcctacttccatggatctccatatcagtcctgtttatggacggcgatggcggtacgaaacttggcggcggtgccatggttcagaaaggtacagtgtttggatccgacactagcatggtgctagagacacagaccgtcggagcagggagcgtggcatccaatctagcacaatgtggcacttgcagcgccgtgttcggtggtgatgataaagaaatggcgaactgcaaggttgagcatgcgagctctggcgcttctcgcacggttgttgcaagtggtgagaatgggcacactgagactgctggctgtggaggcggctgtggtagcaattgtggacccatgatggctgaagaccccaaggccggcaatgccaagtccggaggctgtggttcggggtgtggtggtggctgcggtggcgcgggaggttgtgggaccatggccaacgaaggccaatccaggtccggaggtgttggcaccttgttgagctccaacgccatgggtggtgagggccagcaggcccattcagctggctgtggctccggctgtggtggtggctgcggcagcggcatggtcatcgaaggctccaaggttaacaacgttaacgccatgtccggcggctgtggctctggttgtggtggtggttgcggcagtggcatggtcatcgaaggctccaaggccaacaacgccatgtccggtggctgtggctctggttgcggtggtggatgcggcagcggcatgctcatcgaaggctccaaggccaacaaagccatgtccggcggctgtggctctggttgtggtggtggttgcggcagcggcatggtcatcgaatgctccaaggccaacaacaccatgtccggcggctgtggctctggttgcggtggtggttgcggcagtggcatggtcatcgaaggctccaaggccaacaacgccatgtccggcggctgtggctctggttgtggtggtggttgcggcagtggcatggtcaacgaaggctccaaggccgccaacaccatgtccggcggctgtggctccggttgcggtggtggttgcggtgccctgttcaacgctagcactgctgccggagagggcctgcacaataagtcggctgggtgcggcggcggcgggtgcggctccgggtgcggcggtggcggcggctgtggtagcggcatggctatcgaaggcttcaaggccaaccacgccaagtctggtggctgcggctctggctgcggtggtggtggctgcggcaccctgttcagctccagcgctgcggccagccaaggccagtccagatccggcggctgcggctctggctgcggtggtggaggctgtggcactggcagcatggtcgctgaaggctccaacggcgggaacgccaagtccggcggctgtggcggcggttgcggtggcggaggtggctgcggcggcggaggctgtggcgggggttgcggcgccgtgttcaacgcatgatctcggtggagtggaggcatttgtgcagacatgcagtcgtcgtcgtctactgctagataccacatgctacagcatactgtgtattgctgtgcataatctactaaataaaaggaatgaataaacaatggatggatcggctgcctccgtggcgtttctgcaaacgaaaaatctcggtgttgttgggtgcagggatgaggatgaaaacgat

SEQ ID NO: 215820 - DNA, 4780 bp, Zea Mays
ctgcgctgcgctgcgctggaatggatagggtgtctcgcagctccagacggccacgtcggccagccgtcggccactcgcttcgactggcaggctcctacccttgcagacaaaaaacgcaaacacgaggacgaggacgaaggttcgttcagttcaagaccagacgaggaggaagagaggcgcgcaagcggtccggtctcatggcgcccttccccgccctccgctcatcgtcgccggtggccgccgccgcggcgccgtcgctcggtcgcgtgtccggccacgcatctgcggcgcccagcaagaggcgcgtcgtctcctgcagggccgtcagcagcaggtcgctgtccatcatcaggtgcgagcagagcgcgaagaagggcggcgggccggacacatggctgggccgcgcggccatggtcggcttcgcctccgcgatcgccgtcgaggtggccaccggcaagggcttccttcagaacttgggcgtgggtactccggcgccgacgctggcgctggccgtgtcggggctcgtcgtcggcctcgccgtcttcttcctgctgcagtcgggaggaggcacgcgagactgacgactgatggaacccatgagctgagctgagcacgcgtcgaacatcgtctccccactcgacatcagtcgttgctgtaatggttggtgaagcgaagatgaaaacccaggacatatatcagcatcatgtcatgtgtaacaaagacgacaactctcatgtgttggtgttgtctgctgctgttgtacgacatccgccgctcgcttgtacgaccgtactgcacttcatctgccggccgggcgagcacagccgttctttaataacatgacgggcgcatgcacacgccagctgactcttcatgtcgattgcgtccagacaattttgttaggactggtttgttattaggagcagacctgccgtttccatgtgcttgcttcacggagcacggcagctctgtaaacggcagactcgacgtagcttgcacgcacaggggttttcagctaaaaaatcctctagcgacagttcattggttgcccagttcaccgactgcctttataaacagggagctcgagctcgagtggtagcagcacaggcacaagtgcggtgccataagtgacagccacctcagtctctgtctgtggagctctctctcgcgcgcgttgccatctcgcaggttcttcatctcgtcgctctgttcaggcgcaggcggcgacaggagatggacggggagcaggcggcgcggtgggcggcggcgcaggagggggttcccgtcggggcggaccttgtcgcggcggcgctgcggcagctgcgcttcctcgcggcggtggaccgccgccggtggctctacgacgagggcccgctgctcgaccgggccatacgcaggtacaaagcatgctggcttccgcttcttgacaagcacactaagggtgtggttgtagatggtccattggttgttcctcttgattgtgagtggatatggcactgccatcgccttaacccggttcagtacataagggactgcaagaaagtgtatggcagaatactgaacaataacaacgttgagtcgtccactcaaacaaagtcgacacttgagtcagaaaaagtttggaaagagctgtatcctgaggagcccttcgaattgttgttcacaagaacctttgacactgccgtggatgtcaaccctgcaggtgcagaggaggacattacctatgatctggtctcggctgttaagagacaatcctctttctattatcaggttggaacaccaacaatgcatgatccacggtttctccaagaagctctagctcgatacaaggcgtttctttacctgatcaagatgaatcaagaaaaaggattgcagcgcttccgtgtaccaacctatgatgtggatctgttgtggcacactcaccagctgcatcctattacctaccgcaacgacatggtgaagcttcttggaaaagttctggagcatgatgacaccgatgctgatcgatctgaagggaagaaactcgatgttggatttaccgagactactgaacagttcgagagtacctttggtgtaagatactggaaggctggatgtatgtaccgtggcaacgtgccatctcctgtgacatccactcctcagacattcagtgctgaggttggtactgggtcttacatctgcaaagcccagaaagatcttaatgcccttgatgtaacagttgtagagttatatttacaaattgtagacatcaagaatttaccatctgctgttcaaaaagaaaatgtgtatgtacggttcgccaagaatcaatcagatatgttcatcagtgacggcggcaggttggatatctcaacagttacagggaagaacaccggagtttgtttacagtgtgaacctaccggagaactcattcttgcagtaatggttgatcaattatcaaagaaaccagaaccgatagggaaggtttctttcccactgcacgatttgacagggcctgattctaagctctccttcgagaagtggtttgaactgaaagctcatggtgggcatgccgcttcacctcctgttagtcttcgtgttgcagcttctgctactgtcccaagcagcgctcagaaggtgttcaccatggtcaggatggagccattctctctcaagtcatgtcttttgccacattccatcaaggatcagaacacgggcagctggactcgtttcgtaaatgattgtggtaccgagcttatccgtctccagataagagagcacaaggcgaagaatagcatggccgtcgttcgagaattggttggagtattgaagtcaacaaaaaagcaaattcaacttgcagaattcaaggaaaacaagtggaccctaaaagactccaacttgccaataagtcatggcactgatggcagtctactcgatctcaaaggtgacaaccatctgatcaagctttatcggggaaggaaactggaatacgagcgcaaatgttgcagcgctcactctgaggacgtatcagctgttactgctgtaaagttctgtgctgaacatccatatggcaaagccgttgccttgctagacactgaagctcagcttatcatggtgaacgaggattggctcctacttccatggatctccatatcagtcctgtttatggacggcgatggcggtacgaaacttggcggcggtgccatggttcagaaaggtacagtgtttggatccgacactagcatggtgctagagacacagaccgtcggagcagggagcgtggcatccaatctagcacaatgtggcacttgcagcgccgtgttcggtggtgatgataaagaaatggcgaactgcaaggttgagcatgcgagctctggcgcttctcgcacggttgttgcaagtggtgagaatgggcacactgagactgctggctgtggaggcggctgtggtagcaattgtggacccatgatggctgaagaccccaaggccggcaatgccaagtccggaggctgtggttcggggtgtggtggtggctgcggtggcgcgggaggttgtgggaccatggccaacgaaggccaatccaggtccggaggtgttggcaccttgttgagctccaacgccatgggtggtgagggccagcaggcccattcagctggctgtggctccggctgtggtggtggctgcggcagcggcatggtcatcgaaggctccaaggttaacaacgttaacgccatgtccggcggctgtggctctggttgtggtggtggttgcggcagtggcatggtcatcgaaggctccaaggccaacaacgccatgtccggtggctgtggctctggttgcggtggtggatgcggcagcggcatgctcatcgaaggctccaaggccaacaaagccatgtccggcggctgtggctctggttgtggtggtggttgcggcagcggcatggtcatcgaatgctccaaggccaacaacaccatgtccggcggctgtggctctggttgcggtggtggttgcggcagtggcatggtcatcgaaggctccaaggccaacaacgccatgtccggcggctgtggctctggttgtggtggtggttgcggcagtggcatggtcaacgaaggctccaaggccgccaacaccatgtccggcggctgtggctccggttgcggtggtggttgcggtgccctgttcaacgctagcactgctgccggagagggcctgcacaataagtcggctgggtgcggcggcggcgggtgcggctccgggtgcggcggtggcggcggctgtggtagcggcatggctatcgaaggcttcaaggccaaccacgccaagtctggtggctgcggctctggctgcggtggtggtggctgcggcaccctgttcagctccagcgctgcggccagccaaggccagtccagatccggcggctgcggctctggctgcggtggtggaggctgtggcactggcagcatggtcgctgaaggctccaacggcgggaacgccaagtccggcggctgtggcggcggttgcggtggcggaggtggctgcggcggcggaggctgtggcgggggttgcggcgccgtgttcaacgcatgatctcggtggagtggaggcatttgtgcagacatgcagtcgtcgtcgtctactgctagataccacatgctacagcatactgtgtattgctgtgcataatctactaaataaaaggaatgaataaacaatggatggatcggctgcctccgtggcgtttctgcaaacgaaaaatctcggtgttgttgggtgcagggatgaggatgaaaacgat

SEQ ID NO: 215821 - DNA, 3798 bp, Zea Mays
tcacggagcacggcagctctgtaaacggcagactcgacgtagcttgcacgcacaggggttttcagctaaaaaatcctctagcgacagttcattggttgcccagttcaccgactgcctttataaacagggagctcgagctcgagtggtagcagcacaggcacaagtgcggtgccataagtgacagccacctcagtctctgtctgtggagctctctctcgcgcgcgttgccatctcgcaggcggcgacaggagatggacggggagcaggcggcgcggtgggcggcggcgcaggagggggttcccgtcggggcggaccttgtcgcggcggcgctgcggcagctgcgcttcctcgcggcggtggaccgccgccggtggctctacgacgagggcccgctgctcgaccgggccatacgcaggtacaaagcatgctggcttccgcttcttgacaagcacactaagggtgtggttgtagatggtccattggttgttcctcttgattgtgagtggatatggcactgccatcgccttaacccggttcagtacataagggactgcaagaaagtgtatggcagaatactgaacaataacaacgttgagtcgtccactcaaacaaagtcgacacttgagtcagaaaaagtttggaaagagctgtatcctgaggagcccttcgaattgttgttcacaagaacctttgacactgccgtggatgtcaaccctgcaggtgcagaggaggacattacctatgatctggtctcggctgttaagagacaatcctctttctattatcaggttggaacaccaacaatgcatgatccacggtttctccaagaagctctagctcgatacaaggcgtttctttacctgatcaagatgaatcaagaaaaaggattgcagcgcttccgtgtaccaacctatgatgtggatctgttgtggcacactcaccagctgcatcctattacctaccgcaacgacatggtgaagcttcttggaaaagttctggagcatgatgacaccgatgctgatcgatctgaagggaagaaactcgatgttggatttaccgagactactgaacagttcgagagtacctttggtgtaagatactggaaggctggatgtatgtaccgtggcaacgtgccatctcctgtgacatccactcctcagacattcagtgctgaggttggtactgggtcttacatctgcaaagcccagaaagatcttaatgcccttgatgtaacagttgtagagttatatttacaaattgtagacatcaagaatttaccatctgctgttcaaaaagaaaatgtgtatgtacggttcgccaagaatcaatcagatatgttcatcagtgacggcggcaggttggatatctcaacagttacagggaagaacaccggagtttgtttacagtgtgaacctaccggagaactcattcttgcagtaatggttgatcaattatcaaagaaaccagaaccgatagggaaggtttctttcccactgcacgatttgacagggcctgattctaagctctccttcgagaagtggtttgaactgaaagctcatggtgggcatgccgcttcacctcctgttagtcttcgtgttgcagcttctgctactgtcccaagcagcgctcagaaggtgttcaccatggtcaggatggagccattctctctcaagtcatgtcttttgccacattccatcaaggatcagaacacgggcagctggactcgtttcgtaaatgattgtggtaccgagcttatccgtctccagataagagagcacaaggcgaagaatagcatggccgtcgttcgagaattggttggagtattgaagtcaacaaaaaagcaaattcaacttgcagaattcaaggaaaacaagtggaccctaaaagactccaacttgccaataagtcatggcactgatggcagtctactcgatctcaaaggtgacaaccatctgatcaagctttatcggggaaggaaactggaatacgagcgcaaatgttgcagcgctcactctgaggacgtatcagctgttactgctgtaaagttctgtgctgaacatccatatggcaaagccgttgccttgctagacactgaagctcagcttatcatggtgaacgaggattggctcctacttccatggatctccatatcagtcctgtttatggacggcgatggcggtacgaaacttggcggcggtgccatggttcagaaaggtacagtgtttggatccgacactagcatggtgctagagacacagaccgtcggagcagggagcgtggcatccaatctagcacaatgtggcacttgcagcgccgtgttcggtggtgatgataaagaaatggcgaactgcaaggttgagcatgcgagctctggcgcttctcgcacggttgttgcaagtggtgagaatgggcacactgagactgctggctgtggaggcggctgtggtagcaattgtggacccatgatggctgaagaccccaaggccggcaatgccaagtccggaggctgtggttcggggtgtggtggtggctgcggtggcgcgggaggttgtgggaccatggccaacgaaggccaatccaggtccggaggtgttggcaccttgttgagctccaacgccatgggtggtgagggccagcaggcccattcagctggctgtggctccggctgtggtggtggctgcggcagcggcatggtcatcgaaggctccaaggttaacaacgttaacgccatgtccggcggctgtggctctggttgtggtggtggttgcggcagtggcatggtcatcgaaggctccaaggccaacaacgccatgtccggtggctgtggctctggttgcggtggtggatgcggcagcggcatgctcatcgaaggctccaaggccaacaaagccatgtccggcggctgtggctctggttgtggtggtggttgcggcagcggcatggtcatcgaatgctccaaggccaacaacaccatgtccggcggctgtggctctggttgcggtggtggttgcggcagtggcatggtcatcgaaggctccaaggccaacaacgccatgtccggcggctgtggctctggttgtggtggtggttgcggcagtggcatggtcaacgaaggctccaaggccgccaacaccatgtccggcggctgtggctccggttgcggtggtggttgcggtgccctgttcaacgctagcactgctgccggagagggcctgcacaataagtcggctgggtgcggcggcggcgggtgcggctccgggtgcggcggtggcggcggctgtggtagcggcatggctatcgaaggcttcaaggccaaccacgccaagtctggtggctgcggctctggctgcggtggtggtggctgcggcaccctgttcagctccagcgctgcggccagccaaggccagtccagatccggcggctgcggctctggctgcggtggtggaggctgtggcactggcagcatggtcgctgaaggctccaacggcgggaacgccaagtccggcggctgtggcggcggttgcggtggcggaggtggctgcggcggcggaggctgtggcgggggttgcggcgccgtgttcaacgcatgatctcggtggagtggaggcatttgtgcagacatgcagtcgtcgtcgtctactgctagataccacatgctacagcatactgtgtattgctgtgcataatctactaaataaaaggaatgaataaacaatggatggatcggctgcctccgtggcgtttctgcaaacgaaaaatctcggtgttgttgggtgcagggatgaggatgaaaacgat

SEQ ID NO: 215822 - DNA, 4220 bp, Zea Mays
aaacggcagactcgacgtagcttgcacgcacaggggttttcagctaaaaaatcctctagcgacagttcattggttgcccagttcaccgactgcctttataaacagggagctcgagctcgagtggtagcagcacaggcacaagtgcggtgccataagtgacagccacctcagtctctgtctgtggagctctctctcgcgcgcgttgccatctcgcaggttcttcatctcgtcgctctgttcaggttcatcggctggcgttagcgtttgttctctctcatacgactatttcatgcgtcctctgctgcatctcttcgattcatccgtagtatcttctttttacagctagtttgggaacccattttcttaacaattctatttttttttcaaaaaaatgaactaattttctttaataaaataaaaggtttctaaactagtccttaagtaaaaaaaaggggcggtcccgagcaaagtcaaacggtcccgagcaagcaagaaaccgtgtcgtcgattctcttttctctctggctttccgtggcagcaagaagaagggatcaaaggaccggacccgtccgtccgtccggccggcctcctgatcgcgtcgcgcgcgcccctcgaaaagccacaccccgccgtctgacctcgtggtgaccggtcccgcaggcggcgacaggagatggacggggagcaggcggcgcggtgggcggcggcgcaggagggggttcccgtcggggcggaccttgtcgcggcggcgctgcggcagctgcgcttcctcgcggcggtggaccgccgccggtggctctacgacgagggcccgctgctcgaccgggccatacgcaggtacaaagcatgctggcttccgcttcttgacaagcacactaagggtgtggttgtagatggtccattggttgttcctcttgattgtgagtggatatggcactgccatcgccttaacccggttcagtacataagggactgcaagaaagtgtatggcagaatactgaacaataacaacgttgagtcgtccactcaaacaaagtcgacacttgagtcagaaaaagtttggaaagagctgtatcctgaggagcccttcgaattgttgttcacaagaacctttgacactgccgtggatgtcaaccctgcaggtgcagaggaggacattacctatgatctggtctcggctgttaagagacaatcctctttctattatcaggttggaacaccaacaatgcatgatccacggtttctccaagaagctctagctcgatacaaggcgtttctttacctgatcaagatgaatcaagaaaaaggattgcagcgcttccgtgtaccaacctatgatgtggatctgttgtggcacactcaccagctgcatcctattacctaccgcaacgacatggtgaagcttcttggaaaagttctggagcatgatgacaccgatgctgatcgatctgaagggaagaaactcgatgttggatttaccgagactactgaacagttcgagagtacctttggtgtaagatactggaaggctggatgtatgtaccgtggcaacgtgccatctcctgtgacatccactcctcagacattcagtgctgaggttggtactgggtcttacatctgcaaagcccagaaagatcttaatgcccttgatgtaacagttgtagagttatatttacaaattgtagacatcaagaatttaccatctgctgttcaaaaagaaaatgtgtatgtacggttcgccaagaatcaatcagatatgttcatcagtgacggcggcaggttggatatctcaacagttacagggaagaacaccggagtttgtttacagtgtgaacctaccggagaactcattcttgcagtaatggttgatcaattatcaaagaaaccagaaccgatagggaaggtttctttcccactgcacgatttgacagggcctgattctaagctctccttcgagaagtggtttgaactgaaagctcatggtgggcatgccgcttcacctcctgttagtcttcgtgttgcagcttctgctactgtcccaagcagcgctcagaaggtgttcaccatggtcaggatggagccattctctctcaagtcatgtcttttgccacattccatcaaggatcagaacacgggcagctggactcgtttcgtaaatgattgtggtaccgagcttatccgtctccagataagagagcacaaggcgaagaatagcatggccgtcgttcgagaattggttggagtattgaagtcaacaaaaaagcaaattcaacttgcagaattcaaggaaaacaagtggaccctaaaagactccaacttgccaataagtcatggcactgatggcagtctactcgatctcaaaggtgacaaccatctgatcaagctttatcggggaaggaaactggaatacgagcgcaaatgttgcagcgctcactctgaggacgtatcagctgttactgctgtaaagttctgtgctgaacatccatatggcaaagccgttgccttgctagacactgaagctcagcttatcatggtgaacgaggattggctcctacttccatggatctccatatcagtcctgtttatggacggcgatggcggtacgaaacttggcggcggtgccatggttcagaaaggtacagtgtttggatccgacactagcatggtgctagagacacagaccgtcggagcagggagcgtggcatccaatctagcacaatgtggcacttgcagcgccgtgttcggtggtgatgataaagaaatggcgaactgcaaggttgagcatgcgagctctggcgcttctcgcacggttgttgcaagtggtgagaatgggcacactgagactgctggctgtggaggcggctgtggtagcaattgtggacccatgatggctgaagaccccaaggccggcaatgccaagtccggaggctgtggttcggggtgtggtggtggctgcggtggcgcgggaggttgtgggaccatggccaacgaaggccaatccaggtccggaggtgttggcaccttgttgagctccaacgccatgggtggtgagggccagcaggcccattcagctggctgtggctccggctgtggtggtggctgcggcagcggcatggtcatcgaaggctccaaggttaacaacgttaacgccatgtccggcggctgtggctctggttgtggtggtggttgcggcagtggcatggtcatcgaaggctccaaggccaacaacgccatgtccggtggctgtggctctggttgcggtggtggatgcggcagcggcatgctcatcgaaggctccaaggccaacaaagccatgtccggcggctgtggctctggttgtggtggtggttgcggcagcggcatggtcatcgaatgctccaaggccaacaacaccatgtccggcggctgtggctctggttgcggtggtggttgcggcagtggcatggtcatcgaaggctccaaggccaacaacgccatgtccggcggctgtggctctggttgtggtggtggttgcggcagtggcatggtcaacgaaggctccaaggccgccaacaccatgtccggcggctgtggctccggttgcggtggtggttgcggtgccctgttcaacgctagcactgctgccggagagggcctgcacaataagtcggctgggtgcggcggcggcgggtgcggctccgggtgcggcggtggcggcggctgtggtagcggcatggctatcgaaggcttcaaggccaaccacgccaagtctggtggctgcggctctggctgcggtggtggtggctgcggcaccctgttcagctccagcgctgcggccagccaaggccagtccagatccggcggctgcggctctggctgcggtggtggaggctgtggcactggcagcatggtcgctgaaggctccaacggcgggaacgccaagtccggcggctgtggcggcggttgcggtggcggaggtggctgcggcggcggaggctgtggcgggggttgcggcgccgtgttcaacgcatgatctcggtggagtggaggcatttgtgcagacatgcagtcgtcgtcgtctactgctagataccacatgctacagcatactgtgtattgctgtgcataatctactaaataaaaggaatgaataaacaatggatggatcggctgcctccgtggcgtttctgcaaacgaaaaatctcggtgttgttgggtgcagggatgaggatgaaaacgat

SEQ ID NO: 215823 - DNA, 3549 bp, Zea Mays
gtgcggtgccataagtgacagccacctcagtctctgtctgtggagctctctctcgcgcgcgttgccatctcgcaggttcttcatctcgtcgctctgttcaggcgcaggcggcgacaggagatggacggggagcaggcggcgcggtgggcggcggcgcaggagggggttcccgtcggggcggaccttgtcgcggcggcgctgcggcagctgcgcttcctcgcggcggtggaccgccgccggtggctctacgacgagggcccgctgctcgaccgggccatacgcaggttcagtacataagggactgcaagaaagtgtatggcagaatactgaacaataacaacgttgagtcgtccactcaaacaaagtcgacacttgagtcagaaaaagtttggaaagagctgtatcctgaggagcccttcgaattgttgttcacaagaacctttgacactgccgtggatgtcaaccctgcaggtgcagaggaggacattacctatgatctggtctcggctgttaagagacaatcctctttctattatcaggttggaacaccaacaatgcatgatccacggtttctccaagaagctctagctcgatacaaggcgtttctttacctgatcaagatgaatcaagaaaaaggattgcagcgcttccgtgtaccaacctatgatgtggatctgttgtggcacactcaccagctgcatcctattacctaccgcaacgacatggtgaagcttcttggaaaagttctggagcatgatgacaccgatgctgatcgatctgaagggaagaaactcgatgttggatttaccgagactactgaacagttcgagagtacctttggtgtaagatactggaaggctggatgtatgtaccgtggcaacgtgccatctcctgtgacatccactcctcagacattcagtgctgaggttggtactgggtcttacatctgcaaagcccagaaagatcttaatgcccttgatgtaacagttgtagagttatatttacaaattgtagacatcaagaatttaccatctgctgttcaaaaagaaaatgtgtatgtacggttcgccaagaatcaatcagatatgttcatcagtgacggcggcaggttggatatctcaacagttacagggaagaacaccggagtttgtttacagtgtgaacctaccggagaactcattcttgcagtaatggttgatcaattatcaaagaaaccagaaccgatagggaaggtttctttcccactgcacgatttgacagggcctgattctaagctctccttcgagaagtggtttgaactgaaagctcatggtgggcatgccgcttcacctcctgttagtcttcgtgttgcagcttctgctactgtcccaagcagcgctcagaaggtgttcaccatggtcaggatggagccattctctctcaagtcatgtcttttgccacattccatcaaggatcagaacacgggcagctggactcgtttcgtaaatgattgtggtaccgagcttatccgtctccagataagagagcacaaggcgaagaatagcatggccgtcgttcgagaattggttggagtattgaagtcaacaaaaaagcaaattcaacttgcagaattcaaggaaaacaagtggaccctaaaagactccaacttgccaataagtcatggcactgatggcagtctactcgatctcaaaggtgacaaccatctgatcaagctttatcggggaaggaaactggaatacgagcgcaaatgttgcagcgctcactctgaggacgtatcagctgttactgctgtaaagttctgtgctgaacatccatatggcaaagccgttgccttgctagacactgaagctcagcttatcatggtgaacgaggattggctcctacttccatggatctccatatcagtcctgtttatggacggcgatggcggtacgaaacttggcggcggtgccatggttcagaaaggtacagtgtttggatccgacactagcatggtgctagagacacagaccgtcggagcagggagcgtggcatccaatctagcacaatgtggcacttgcagcgccgtgttcggtggtgatgataaagaaatggcgaactgcaaggttgagcatgcgagctctggcgcttctcgcacggttgttgcaagtggtgagaatgggcacactgagactgctggctgtggaggcggctgtggtagcaattgtggacccatgatggctgaagaccccaaggccggcaatgccaagtccggaggctgtggttcggggtgtggtggtggctgcggtggcgcgggaggttgtgggaccatggccaacgaaggccaatccaggtccggaggtgttggcaccttgttgagctccaacgccatgggtggtgagggccagcaggcccattcagctggctgtggctccggctgtggtggtggctgcggcagcggcatggtcatcgaaggctccaaggttaacaacgttaacgccatgtccggcggctgtggctctggttgtggtggtggttgcggcagtggcatggtcatcgaaggctccaaggccaacaacgccatgtccggtggctgtggctctggttgcggtggtggatgcggcagcggcatgctcatcgaaggctccaaggccaacaaagccatgtccggcggctgtggctctggttgtggtggtggttgcggcagcggcatggtcatcgaatgctccaaggccaacaacaccatgtccggcggctgtggctctggttgcggtggtggttgcggcagtggcatggtcatcgaaggctccaaggccaacaacgccatgtccggcggctgtggctctggttgtggtggtggttgcggcagtggcatggtcaacgaaggctccaaggccgccaacaccatgtccggcggctgtggctccggttgcggtggtggttgcggtgccctgttcaacgctagcactgctgccggagagggcctgcacaataagtcggctgggtgcggcggcggcgggtgcggctccgggtgcggcggtggcggcggctgtggtagcggcatggctatcgaaggcttcaaggccaaccacgccaagtctggtggctgcggctctggctgcggtggtggtggctgcggcaccctgttcagctccagcgctgcggccagccaaggccagtccagatccggcggctgcggctctggctgcggtggtggaggctgtggcactggcagcatggtcgctgaaggctccaacggcgggaacgccaagtccggcggctgtggcggcggttgcggtggcggaggtggctgcggcggcggaggctgtggcgggggttgcggcgccgtgttcaacgcatgatctcggtggagtggaggcatttgtgcagacatgcagtcgtcgtcgtctactgctagataccacatgctacagcatactgtgtattgctgtgcataatctactaaataaaaggaatgaataaacaatggatggatcggctgcctccgtggcgtttctgcaaacgaaaaatctcggtgttgttgggtgcagggatgaggatgaaaacgat

SEQ ID NO: 215824 - DNA, 3661 bp, Zea Mays
gtgcggtgccataagtgacagccacctcagtctctgtctgtggagctctctctcgcgcgcgttgccatctcgcaggttcttcatctcgtcgctctgttcaggcggcgacaggagatggacggggagcaggcggcgcggtgggcggcggcgcaggagggggttcccgtcggggcggaccttgtcgcggcggcgctgcggcagctgcgcttcctcgcggcggtggaccgccgccggtggctctacgacgagggcccgctgctcgaccgggccatacgcaggtacaaagcatgctggcttccgcttcttgacaagcacactaagggtgtggttgtagatggtccattggttgttcctcttgattgtgagtggatatggcactgccatcgccttaacccggttcagtacataagggactgcaagaaagtgtatggcagaatactgaacaataacaacgttgagtcgtccactcaaacaaagtcgacacttgagtcagaaaaagtttggaaagagctgtatcctgaggagcccttcgaattgttgttcacaagaacctttgacactgccgtggatgtcaaccctgcaggtgcagaggaggacattacctatgatctggtctcggctgttaagagacaatcctctttctattatcaggttggaacaccaacaatgcatgatccacggtttctccaagaagctctagctcgatacaaggcgtttctttacctgatcaagatgaatcaagaaaaaggattgcagcgcttccgtgtaccaacctatgatgtggatctgttgtggcacactcaccagctgcatcctattacctaccgcaacgacatggtgaagcttcttggaaaagttctggagcatgatgacaccgatgctgatcgatctgaagggaagaaactcgatgttggatttaccgagactactgaacagttcgagagtacctttggtgtaagatactggaaggctggatgtatgtaccgtggcaacgtgccatctcctgtgacatccactcctcagacattcagtgctgaggttggtactgggtcttacatctgcaaagcccagaaagatcttaatgcccttgatgtaacagttgtagagttatatttacaaattgtagacatcaagaatttaccatctgctgttcaaaaagaaaatgtgtatgtacggttcgccaagaatcaatcagatatgttcatcagtgacggcggcaggttggatatctcaacagttacagggaagaacaccggagtttgtttacagtgtgaacctaccggagaactcattcttgcagtaatggttgatcaattatcaaagaaaccagaaccgatagggaaggtttctttcccactgcacgatttgacagggcctgattctaagctctccttcgagaagtggtttgaactgaaagctcatggtgggcatgccgcttcacctcctgttagtcttcgtgttgcagcttctgctactgtcccaagcagcgctcagaaggtgttcaccatggtcaggatggagccattctctctcaagtcatgtcttttgccacattccatcaaggatcagaacacgggcagctggactcgtttcgtaaatgattgtggtaccgagcttatccgtctccagataagagagcacaaggcgaagaatagcatggccgtcgttcgagaattggttggagtattgaagtcaacaaaaaagcaaattcaacttgcagaattcaaggaaaacaagtggaccctaaaagactccaacttgccaataagtcatggcactgatggcagtctactcgatctcaaaggtgacaaccatctgatcaagctttatcggggaaggaaactggaatacgagcgcaaatgttgcagcgctcactctgaggacgtatcagctgttactgctgtaaagttctgtgctgaacatccatatggcaaagccgttgccttgctagacactgaagctcagcttatcatggtgaacgaggattggctcctacttccatggatctccatatcagtcctgtttatggacggcgatggcggtacgaaacttggcggcggtgccatggttcagaaaggtacagtgtttggatccgacactagcatggtgctagagacacagaccgtcggagcagggagcgtggcatccaatctagcacaatgtggcacttgcagcgccgtgttcggtggtgatgataaagaaatggcgaactgcaaggttgagcatgcgagctctggcgcttctcgcacggttgttgcaagtggtgagaatgggcacactgagactgctggctgtggaggcggctgtggtagcaattgtggacccatgatggctgaagaccccaaggccggcaatgccaagtccggaggctgtggttcggggtgtggtggtggctgcggtggcgcgggaggttgtgggaccatggccaacgaaggccaatccaggtccggaggtgttggcaccttgttgagctccaacgccatgggtggtgagggccagcaggcccattcagctggctgtggctccggctgtggtggtggctgcggcagcggcatggtcatcgaaggctccaaggttaacaacgttaacgccatgtccggcggctgtggctctggttgtggtggtggttgcggcagtggcatggtcatcgaaggctccaaggccaacaacgccatgtccggtggctgtggctctggttgcggtggtggatgcggcagcggcatgctcatcgaaggctccaaggccaacaaagccatgtccggcggctgtggctctggttgtggtggtggttgcggcagcggcatggtcatcgaatgctccaaggccaacaacaccatgtccggcggctgtggctctggttgcggtggtggttgcggcagtggcatggtcatcgaaggctccaaggccaacaacgccatgtccggcggctgtggctctggttgtggtggtggttgcggcagtggcatggtcaacgaaggctccaaggccgccaacaccatgtccggcggctgtggctccggttgcggtggtggttgcggtgccctgttcaacgctagcactgctgccggagagggcctgcacaataagtcggctgggtgcggcggcggcgggtgcggctccgggtgcggcggtggcggcggctgtggtagcggcatggctatcgaaggcttcaaggccaaccacgccaagtctggtggctgcggctctggctgcggtggtggtggctgcggcaccctgttcagctccagcgctgcggccagccaaggccagtccagatccggcggctgcggctctggctgcggtggtggaggctgtggcactggcagcatggtcgctgaaggctccaacggcgggaacgccaagtccggcggctgtggcggcggttgcggtggcggaggtggctgcggcggcggaggctgtggcgggggttgcggcgccgtgttcaacgcatgatctcggtggagtggaggcatttgtgcagacatgcagtcgtcgtcgtctactgctagataccacatgctacagcatactgtgtattgctgtgcataatctactaaataaaaggaatgaataaacaatggatggatcggctgcctccgtggcgtttctgcaaacgaaaaatctcggtgttgttgggtgcagggatgaggatgaaaacgat

SEQ ID NO: 215825 - DNA, 2217 bp, Zea Mays
cgacgctcatctgctcgtgggtgaaatcacctggccctgtctctattttctcatcctctcgtccgactcatcttgtactgcggcggtggcgcccggcttccctcgacgaactccaccgacggcgaccggctccctcgtcctccaccggtcgcgcccggccctctacctccatcgatcgcgcccgaccctctgcctccaccgtcgtcgctcgctcaggttttgcacttggattacttgaacaaatcagacaagaagtggctagatagaatacaactggaatgattctatgtacggctttgacgatgatctttcattgcttgctatctgtacagatgcatgcaaagggttagaaaatgcaataaagcttgttttccctcaggttgaccaaagagaatgatttaggcatctcatgcataattttgtgaaaaggtttggaggtgacatatcctctaagatgtaccctacacctagggcatataggccagaagtttcatagtactttttcaatcaagttgtagaagcctcccaagatgtaaagaaatggctagatgcttaccacaagctgaattggaggaggagtcagtttaaccctaccatcaagtgtgattatgtcaccaacaatctagctgaagtattcaacaactggattaaagattggaatgaccttcctgttgcggagcttgcagacaagtgtagcgagatgataatggtgttgtgggaaacggaggagacatgggggaaagcttactggcaagatcttacctgctgttttgcagcagttgaaagcaaggactagaggcctaggacatctataagtgacaaaggcagttgaggacagcacaaacattcataataggcatgtggtgaagtcatatttgcattagtgtacataccttgagtggcagcacactgacaaaccttgcccacatgcattggccttgattacagcagaaggattttgtgcatgaatactactcagtccaaaggttcaaaaaagtatacaagagaataattaaaccactaccaaataggtctcaatggccacaagtggaacaaccctatgtggttggtgcaccacttgacaagataggaagaggaaggtataaaaaaactaagaattaagagttgtttggaaggtgggaacaacaaaggaaaaaggtagctaaagaaaaaggcaaggaaactcacaaggatgcagtcctagaggctgacatggaggctacaaaccaatctaagaagggaaaaaagaagatgatgtgaggcaaaagaaagtgcaaaagatgtggagagttaaatcatagcgaaactagctacaagtgcccgttaaatggaacaaagaaaagaaagagaaggcctcacattaataaaacaaagtatggggagaataccaagatccccaaaagccgacttgaagaaggtgtccaaggtgaaggtgttatccaaggtgaagctgttgtctaagatcatggtgttgtccaaattgaagctgttgttcaagttggtccaagtggaagtttctcttccagtgcaaagcccaattatacgaacaagggagtctattttacaggacaacttgataaggtcagcttgctatgctactaggagatggttagattgaaatccagtcacctcctaataatacaactcctaagaagtttctagtgaagaagctcacagcaagctgaagagaacgtgacaagattctaagaaactactgttttatgtgttacccaagatttaaataagctagtgttagaagtgaacattttatgctatcagatgaactatatttggatagagatagtagttattttgatgtgtgatgttatcttaaacaagtgtcaggtttggatgtgttttgttatctgaaacaaatgttcagaagctgaaaatgttgtctctattagtgtacacatgttaccagtttctgttattatgcacaggttccaaatgttcagtatatgtggcccttctgtttgtgctgcagttcagctagagctgaaccaatgtcccaggctcccagctggacctcgcctcacggatggccccctggagctggacctcgcctggagctgagcgacgtacgttcgtttcgttgcctgtgattttaatcaatggcaaaagtgttcgatcaatagctatcaatataataaaataaagttaatggtattttatatgtaaggcaacgcttgagaatgataaattagtgaaacacgt

SEQ ID NO: 215826 - DNA, 1855 bp, Zea Mays
cgacgctcatctgctcgtgggtgaaatcacctggccctgtctctattttctcatcctctcgtccgactcatcttgtactgcggcggtggcgcccggcttccctcgacgaactccaccgacggcgaccggctccctcgtcctccaccggtcgcgcccggccctctacctccatcgatcgcgcccgaccctctgcctccaccgtcgtcgctcgctcaggttttgcacttggattacttgaacaaatcagacaagaagtggctagatagaatacaactggaatgattctatgtacggctttgacgatgatctttcattgcttgctatctgtacagatgcatgcaaagggttagaaaatgcaataaagcttgttttccctcaggttgaccaaagagaatgatttaggcatctcatgcataattttgtgaaaaggtttggaggtgacatatcctctaagatgtaccctacacctagggcatataggccagaagtttcatagtactttttcaatcaagttgtagaagcctcccaagatgtaaagaaatggctagatgcttaccacaagctgaattggaggaggagtcagtttaaccctaccatcaagtgtgattatgtcaccaacaatctagctgaagtattcaacaactggattaaagattggaatgaccttcctgttgcggagcttgcagacaagtgtagcgagatgataatggtgttgtgggaaacggaggagacatgggggaaagcttactggcaagatcttacctgctgttttgcagcagttgaaagcaaggactagaggcctaggacatctataagtgacaaaggcagttgaggacagcacaaacattcataataggcatgtggtgaagtcatatttgcattagtgtacataccttgagtggcagcacactgacaaaccttgcccacatgcattggccttgattacagcagaaggattttgtgcatgaatactactcagtccaaaggttcaaaaaagtatacaagagaataattaaaccactaccaaataggtctcaatggccacaagtggaacaaccctatgtggttggtgcaccacttgacaagataggaagaggaaggtataaaaaaactaagaattaagagttgtttggaaggtgggaacaacaaaggaaaaaggtagctaaagaaaaaggcaaggaaactcacaaggatgcagtcctagaggctgacatggaggctacaaaccaatctaagaagggaaaaaagaagatgatgtgaggcaaaagaaagtgcaaaagatgtggagagttaaatcatagcgaaactagctacaagtgcccgttaaatggaacaaagaaaagaaagagaaggcctcacattaataaaacaaagtatggggagaataccaagatccccaaaagccgacttgaagaaggtgtccaaggtgaaggtgttatccaaggtgaagctgttgtctaagatcatggtgttgtccaaattgaagctgttgttcaagttggtccaagtggaagtttctcttccagtgcaaagcccaattatacgaacaagggagtctattttacaggacaacttgataaggttccaaatgttcagtatatgtggcccttctgtttgtgctgcagttcagctagagctgaaccaatgtcccaggctcccagctggacctcgcctcacggatggccccctggagctggacctcgcctggagctgagcgacgtacgttcgtttcgttgcctgtgattttaatcaatggcaaaagtgttcgatcaatagctatcaatataataaaataaagttaatggtattttatatgtaaggcaacgcttgagaatgataaattagtgaaacacgt

SEQ ID NO: 215827 - DNA, 1773 bp, Zea Mays
cgacgctcatctgctcgtgggtgaaatcacctggccctgtctctattttctcatcctctcgtccgactcatcttgtactgcggcggtggcgcccggcttccctcgacgaactccaccgacggcgaccggctccctcgtcctccaccggtcgcgcccggccctctacctccatcgatcgcgcccgaccctctgcctccaccgtcgtcgctcgctcaggttttgcacttggattacttgaacaaatcagacaagaagtggctagatagaatacaactggaatgattctatgtacggatgcatgcaaagggttagaaaatgcaataaagcttgttttccctcaggttgaccaaagagaatgatttaggcatctcatgcataattttgtgaaaaggtttggaggtgacatatcctctaagatgtaccctacacctagggcatataggccagaagtttcatagtactttttcaatcaagttgtagaagcctcccaagatgtaaagaaatggctagatgcttaccacaagctgaattggaggaggagtcagtttaaccctaccatcaagtgtgattatgtcaccaacaatctagctgaagtattcaacaactggattaaagattggaatgaccttcctgttgcggagcttgcagacaagtgtagcgagatgataatggtgttgtgggaaacggaggagacatgggggaaagcttactggcaagatcttacctgctgttttgcagcagttgaaagcaaggactagaggcctaggacatctataagtgacaaaggcagttgaggacagcacaaacattcataataggcatgtggtgaagtcatatttgcattagtgtacataccttgagtggcagcacactgacaaaccttgcccacatgcattggccttgattacagcagaaggattttgtgcatgaatactactcagtccaaaggttcaaaaaagtatacaagagaataattaaaccactaccaaataggtctcaatggccacaagtggaacaaccctatgtggttggtgcaccacttgacaagataggaagaggaaggtataaaaaaactaagaattaagagttgtttggaaggtgggaacaacaaaggaaaaaggtagctaaagaaaaaggcaaggaaactcacaaggatgcagtcctagaggctgacatggaggctacaaaccaatctaagaagggaaaaaagaagatgatgtgaggcaaaagaaagtgcaaaagatgtggagagttaaatcatagcgaaactagctacaagtgcccgttaaatggaacaaagaaaagaaagagaaggcctcacattaataaaacaaagtatggggagaataccaagatccccaaaagccgacttgaagaaggtgtccaaggtgaaggtgttatccaaggtgaagctgttgtctaagatcatggtgttgtccaaattgaagctgttgttcaagttggtccaagtggaagtttctcttccagtgcaaagcccaattatacgaacaagggagtctattttacaggacaacttgataagttcagctagagctgaaccaatgtcccaggctcccagctggacctcgcctcacggatggccccctggagctggacctcgcctggagctgagcgacgtacgttcgtttcgttgcctgtgattttaatcaatggcaaaagtgttcgatcaatagctatcaatataataaaataaagttaatggtattttatatgtaaggcaacgcttgagaatgataaattagtgaaacacgt

SEQ ID NO: 215828 - DNA, 1811 bp, Zea Mays
cgacgctcatctgctcgtgggtgaaatcacctggccctgtctctattttctcatcctctcgtccgactcatcttgtactgcggcggtggcgcccggcttccctcgacgaactccaccgacggcgaccggctccctcgtcctccaccggtcgcgcccggccctctacctccatcgatcgcgcccgaccctctgcctccaccgtcgtcgctcgctcaggttttgcacttggattacttgaacaaatcagacaagaagtggctagatagaatacaactggaatgattctatgtacggctttgacgatgatctttcattgcttgctatctgtacagatgcatgcaaagggttagaaaatgcaataaagcttgttttccctcaggttgaccaaagagaatgatttaggcatctcatgcataattttgtgaaaaggtttggaggtgacatatcctctaagatgtaccctacacctagggcatataggccagaagtttcatagtactttttcaatcaagttgtagaagcctcccaagatgtaaagaaatggctagatgcttaccacaagctgaattggaggaggagtcagtttaaccctaccatcaagtgtgattatgtcaccaacaatctagctgaagtattcaacaactggattaaagattggaatgaccttcctgttgcggagcttgcagacaagtgtagcgagatgataatggtgttgtgggaaacggaggagacatgggggaaagcttactggcaagatcttacctgctgttttgcagcagttgaaagcaaggactagaggcctaggacatctataagtgacaaaggcagttgaggacagcacaaacattcataataggcatgtggtgaagtcatatttgcattagtgtacataccttgagtggcagcacactgacaaaccttgcccacatgcattggccttgattacagcagaaggattttgtgcatgaatactactcagtccaaaggttcaaaaaagtatacaagagaataattaaaccactaccaaataggtctcaatggccacaagtggaacaaccctatgtggttggtgcaccacttgacaagataggaagaggaaggtataaaaaaactaagaattaagagttgtttggaaggtgggaacaacaaaggaaaaaggtagctaaagaaaaaggcaaggaaactcacaaggatgcagtcctagaggctgacatggaggctacaaaccaatctaagaagggaaaaaagaagatgatgtgaggcaaaagaaagtgcaaaagatgtggagagttaaatcatagcgaaactagctacaagtgcccgttaaatggaacaaagaaaagaaagagaaggcctcacattaataaaacaaagtatggggagaataccaagatccccaaaagccgacttgaagaaggtgtccaaggtgaaggtgttatccaaggtgaagctgttgtctaagatcatggtgttgtccaaattgaagctgttgttcaagttggtccaagtggaagtttctcttccagtgcaaagcccaattatacgaacaagggagtctattttacaggacaacttgataagttcagctagagctgaaccaatgtcccaggctcccagctggacctcgcctcacggatggccccctggagctggacctcgcctggagctgagcgacgtacgttcgtttcgttgcctgtgattttaatcaatggcaaaagtgttcgatcaatagctatcaatataataaaataaagttaatggtattttatatgtaaggcaacgcttgagaatgataaattagtgaaacacgt

SEQ ID NO: 215829 - DNA, 2306 bp, Zea Mays
cttattttagtgtcagcctttcactggatagttttgcccctgaccaaaagtgtcgacgctcatctgctcgtgggtgaaatcacctggccctgtctctattttctcatcctctcgtccgactcatcttgtactgcggcggtggcgcccggcttccctcgacgaactccaccgacggcgaccggctccctcgtcctccaccggtcgcgcccggccctctacctccatcgatcgcgcccgaccctctgcctccaccgtcgtcgctcgctcaggttttgcacttggattacttgaacaaatcagacaagaagtggctagatagaatacaactggaatgattctatgtacggatgcatgcaaagggttagaaaatgcaataaagcttgttttccctcaggttgaccaaagagaatgatttaggcatctcatgcataattttgtgaaaaggtttggaggtgacatatcctctaagatgtaccctacacctagggcatataggccagaagtttcatagtactttttcaatcaagttgtagaagcctcccaagatgtaaagaaatggctagatgcttaccacaagctgaattggaggaggagtcagtttaaccctaccatcaagtgtgattatgtcaccaacaatctagctgaagtattcaacaactggattaaagattggaatgaccttcctgttgcggagcttgcagacaagtgtagcgagatgataatggtgttgtgggaaacggaggagacatgggggaaagcttactggcaagatcttacctgctgttttgcagcagttgaaagcaaggactagaggcctaggacatctataagtgacaaaggcagttgaggacagcacaaacattcataataggcatgtggtgaagtcatatttgcattagtgtacataccttgagtggcagcacactgacaaaccttgcccacatgcattggccttgattacagcagaaggattttgtgcatgaatactactcagtccaaaggttcaaaaaagtatacaagagaataattaaaccactaccaaataggtctcaatggccacaagtggaacaaccctatgtggttggtgcaccacttgacaagataggaagaggaaggtataaaaaaactaagaattaagagttgtttggaaggtgggaacaacaaaggaaaaaggtagctaaagaaaaaggcaaggaaactcacaaggatgcagtcctagaggctgacatggaggctacaaaccaatctaagaagggaaaaaagaagatgatgtgaggcaaaagaaagtgcaaaagatgtggagagttaaatcatagcgaaactagctacaagtgcccgttaaatggaacaaagaaaaggtaagtgataaaatgcctaatttgaacatgtacattttttatatttgactctatatgtggtgtctaacatgtagaaagagaaggcctcacattaataaaacaaagtatggggagaataccaagatccccaaaagccgacttgaagaaggtgtccaaggtgaaggtgttatccaaggtgaagctgttgtctaagatcatggtgttgtccaaattgaagctgttgttcaagttggtccaagtggaagtttctcttccagtgcaaagcccaattatacgaacaagggagtctattttacaggacaacttgataaggtcagcttgctatgctactaggagatggttagattgaaatccagtcacctcctaataatacaactcctaagaagtttctagtgaagaagctcacagcaagctgaagagaacgtgacaagattctaagaaactactgttttatgtgttacccaagatttaaataagctagtgttagaagtgaacattttatgctatcagatgaactatatttggatagagatagtagttattttgatgtgtgatgttatcttaaacaagtgtcaggtttggatgtgttttgttatctgaaacaaatgttcagaagctgaaaatgttgtctctattagtgtacacatgttaccagtttctgttattatgcacaggttccaaatgttcagtatatgtggcccttctgtttgtgctgcagttcagctagagctgaaccaatgtcccaggctcccagctggacctcgcctcacggatggccccctggagctggacctcgcctggagctgagcgacgtacgttcgtttcgttgcctgtgattttaatcaatggcaaaagtgttcgatcaatagctatcaatataataaaataaagttaatggtattttatatgtaaggcaacgcttgagaatgataaattagtgaaacacgt

SEQ ID NO: 215830 - DNA, 2706 bp, Zea Mays
ggtgtccatttgtggtttttatgcccagccatctccgcccactccccgcactcccaccgtatcctcccctgcgtagggtttaaccactcgcagcagccgccgtgactcgagaatcatgtcagcgccgccgtcgctcaagaccccggcaaccgccgtagcggtctctcggcgctcggtcgccaccccgagagccaccgggcttcgcggcgcctgtgctcccccgactcggcgcctccggtgctcagcctccgccgccgtggccggggcttccaccgagatggctgatgctccgctggactgggcagagaggtcgctggaggagttacacagcttgccggaccacgacacgttctgcttgatggcgctctcgccgctggacgggcggtacgatcgcttcgtcaaggagctgatgccctttttcagcgagttcggcctaatcagataccgcgttctcatcgagatcaagtggctactgaaactttctcaaattcctgagatcactgaggtgcctcagttcagcaaggaagctcagtccttgttgaatgccattattgagaatttttgcatagatgatgcaaaagaagttaagaaaatcgagaaagtaaccaaccatgacgtgaaagccgtggagtactttctgaagcaaaggtgcagctcaaatccagagattgcaaaggtgtcggaattcttccattttggttgtacctctgaagatattaacaatctatcacatgcattggctttgaaagagggggtaaataaagttatgttccctgccatgatcgatctatgcagagcaatgtgttccttggcaacacaaaattcaggctaccctatgttggctcgaactcatgggcagccagcatcaccaacaactgtgggaaaggagatggcaaacttcgcggccagattatctgatataggaaagagtttctcagaggtgaagatactagggaaatttgctggcgctgttggcaattacaatgctgatgtggttgcatatcctgaagttgactggcctaaggtggcagaagagtttgttagatccttgggtttgcagtttaatccctatgttactcagattgagcctcatgactacatatcaaagctcttcaatctattcacccagtttaacaatgtgttgactgattttgatagagacatgtggtcctatatatcattaggctacttcaagcagataccaaaggctggtgaagttggttcttccactatgcctcataaaatcaaccccattgattttgaaaatagtgatggcaatttatgtcaagcgaattctatattgtctggtataagcatgaaactaccaatatcccggttgcagcgtgacctaacagactcgactgttttgagaaacctgggtatgggattaggtcattctctattggcttacaaagctaccatgcgtggaatcagcaaggttcaggctagaactactatgctgaattggtgcctttacagttgaatgaatcacgtttagctgaagacctggagcaaacttgggaggtccttgctgagccaatacagacagtgatgcgaagatatgggatacctgaaccttatgagaagctgaaggaactgacgagaggccaagctgtcaccaaggacagcatgcagcaattcattaatggtctagacataccggaggaggttcgatcgaagctttcgaagctaaccccgcattcctacactgggctagcggaggatttggccagagacatcgagaagtgggttgatcttgaatctggatttcagatcaagtgagctcccatttgacaacaatggagaaaataaataacagacgggaaccctaggaaacgagaatccaatgctggaaccaaggtgccgtttggttcacaaatttgtaacgtaatgggtaacgaataacgttaaatcatgtttgttttagtccaactgtaatcgaatactacactaaaaattgataccagcctattcaaatttgttaccgccagtaatcgaacgtaaaccattaccatttgcgttacatttcttgaaccaaacagcacccaaatgcgaattactgctacaataaacatcctacaagtaatggtcggtcggagcgttatgtttctctcctctcttcccaccgtacacggatcatatatatatatatatatatacacacacatgctctggaacggcttcttcgatagttccaccaccacggttacttccatatatttcccttggattggatcggcgctcaaacgaataacaatccggtaactaatggagtcttcacgagggaagctgtctgccgccggcgtcctcctgctgctgctgatgacactcctcgtggtggccgccatgcaggcggttgaggcacgcgactgcctgacacagagcacccggttaccggggcatctgtgcgtgcggtcggactactgcgcgatcgggtgcagggaggagggcaagggctacacgggcggcaggtgccgcatctctcccgtcccgctcgacgggattctctgctactgcgtcaagccttgcccatccaccacgacagaatgatgagacaagtgcggtgccggtgggtgtagtgcaggctggtcgagggttattagtttgaggaattactgctagagatggcaatggagacccgatccccgattccccgcggggaattcccctattaggggacgggtatgggactaatttagtccccgc

SEQ ID NO: 215831 - DNA, 632 bp, Zea Mays
caaaatccagctatcattcatggacatcctcgatctcaggcgcacccttacccaccgccaccagatgtgtacccgcctccccctcggggccatggacatccaccaccaccccatggcgtgtacccgccgccgccgcagggtccttaccccccaccacagcagcctccaccggggtaccagggctacttcaacgaccagcagcgtccttactacccgccgccgcatggagagcatcaacacaaccaccaccagggaaaccagggtagctcctctgggttcctcaaaggatgttggctgctctctgctgctgctgcgtgctggaggaatgctgcggctgcttctgagacgtgagatgtccgggaatccgatcgcaagttatcgtcgctagcattcgggagcaccccagttattatcatataatagtaactgtgcttgtaaataatctggagcagcagtgttcatgagctcccagccccgcatttatattctcataatttgtagtacgttctatgatttatccgaaaataaaggactctatatatgggattctaaataaggtatttgcatatttcatgggattcaaacagtttttttttgtccgtaaggcgcatttccggccgtttggacacgtg

SEQ ID NO: 215832 - DNA, 3840 bp, Zea Mays
aaaaaatcaacctcgaatatttgagctcctcacggatgtagtaaaacaaactttgatggtatttttctaatcttcaatctagttgttttttgagtaatctaacatggagctacgacaatgaagaaatctataactaagcaactaatcttcaatcttatggaacttttaatggtacagatccaactcttctttgaaagaagggaaataatctgtgcagtgtttaatattacttttattttgccgttcagcccctcgattcgtggtgctcctcctcctcccgcaatgccgcccccttccgcttccgccatcgccacccgcttcgcaacccactggatagctgacgccctcgccgacgacgagtccttcgacttctccgtgctccagggtgaggctccaaaccctaaactcctccgccgttcgcctgaacgctttcggtctctcacctggcccctcgcgggcgccccggaggccacgcgcgagcgggtcgcgctccggtgcctccaggaggcgtcatccgtgatagccgctgggggtgatgccgcggccacggcgggcgtgcttagggttgatggcgcccggtcatgcgaggatgtgctgttgcggcttatcagagaggttgggagttccagagaattggagaaggatttgcttccacctttcagtcaagacatccaggaaactatatgtaccaagaaatctacactaccagaaacttctttccagttgctaaaaggacttgagccatggatcacatctatgaccccacaatcccaaatggagcacaatgacactgaacaatgtgacattgatcagtccctgcgcagcagccatggatgtgtaaatatagagaagcctatgttccctacagacaatgctgaggttcagcaagagactatggcagatgtagtcaatggaagtgaaacgggaaatgtccaaaaggatccacctgcaccaacttctgtttttcaccaaccgtgtatgcacgaaagcaggtcttacatccctccgcaagaagatactatagatgttgttggtctaggcgataggtccttagaaaggagtcctattgtggaggggaacatgtccattggatctgtgcttgcttcagctggctgtgatgcacctttgcagggaagaattactgagcccttttcccagcaggataaacatgatcatactgctacagttgaaccaaaatcttgtaggcaaaaatctccaaatctatctcactgtgccgatggagagggggcagatgatggtggctccagcaatcagtcatctaaggtttccattcatgaaggaccgagtgctcatgccccagtaacttcaggttttgacagaatcagcggtgtcttatcaacagatgcatctgaacctgagcatttgtctgagtgcataccagcacaggatacatccatgatttcacagcttgacagcaggaaagctcatctgagtgctctgcaacaggaaagggttgagaaagtaaaccaaggtccggaagatatctctgcaaatattgggccagtggaaaaggaacatgttcatggggatctgactttgcaatctgctagtgttttactttctattagctgcaatggttctaatcaaggaactaaatctgaaaccaatcttcaaccagggactgctacagaggataggatggcttttgaagagcagaatgcggagaagtctcacttagaactcagtggtaccaacaaggctaatcaagctctgttcgatgatggcagcgtcatgaaaaataatacggttcatggtgggctgactgcgcatactgctccagtgtctcaaagctgcagtgtaaccttacatgataaaacttcagaagccaattgtttttctgagtggaaaaatgaaaagaacggtcaaaaagataattgccatacttctattccaggctcttctcaggatgggggtggagaaagtgcaaagaagacatcaaatgaggtaaactctggggacacttcttcaaaaatatgtgtccattctaaggataaagacattaatgatactcttgagggcttgtctcaacaagatttgtgtataaaatgtggtaaagttggtcagttgcttgaatgcagcagttgttctttagctgctcataatagctgttttggttcatcggtgacatttgaagagaccaacttattctactgcccagtatgcttctataagagagccaccgaagcatataaaaaggcaaagaaaacatatggggaagctaggaagaacgttgctgctttccttggcacaatacaggtcaccaagcaacataatgaacaactaaatggagttcaaccaggaggtgccaacagagaggatcattctgacacatcaaaaaggactcatgaaaatgaagtatataatcttgctcatcaggatgaagagcctcatcagcagatgaagaagcagaaaataaatgctataggtattgattatcgtaaggaggtactcactgagaaggttcctttccagaactctggtcctgcatccattaataaacattcagtgctccagaataacggtaaaacacgagttaaggatccagagaaaaagcagcaagcgggagacgaagaagctcgcaaagaagctggtaatgaaaaatctcatgaaacaggagcttcatctcagagaagatgtgatcctccttcgaatcatgacgttgaggctgaccaggaaggtagtcttacaacttctatccaatctagtggttctgatgaattagaagctaaaggattgcaagagaagaaggcagctgtatcaagtaaatctagaaaaggtatttcaaagcgggatcaacatatgcctacttcaccaagaaaaagaaattctgtacacctgcaaaagcgctattccaatcctcttgcaccacctggaagacgcaaaaaactcttttggacagaagaagaagaagctgttttgagggaagggatggcaaaattcactccacagaataatgcgcaaattccatggattctgatactagaacatggccgtggtgtgtttcacaggacgcgcctgccatctgatttgagggtcaagtggaggagcatgcagaggaagaagtggatctgatgccgttgacatggaacactgacgtggtacttgtacatagcgaatgtgcaagtaggaatggaggagggtttcttctaattacttttgcagcccttaatcctgtagcactgacgtggattggttgtgggattcggtgaacctaggcctcctctaatatgcacgtagatgatggtagagagattggtagattcaaacctacgcgaagaattgccaatagatgactttggctgcttcgttcgttcaaatcgcacatatatgttgctgccgtgactccataccgtgaagaagcttgcccaaagtctgcagttttctaaacccctggtcaaaaaaggcaccgataaaatcatatctccaagttgtcagttgactgcaaaacaaattagattttgtttggatactctagtattgacctcaatccatatatgttgagatccatgtatgttgaggtggattgggttgtaaattagtttaagttgtactccaatttacctcaacatatgtggatttgggtcaatactagagtatctaaactaagttaaggtgcatgtagagataaatacggatggaaaacctccttctgtttacgtttcttgactcggtgtaggtacatcctagtgactttaatagtagcctaaggctctatttgtttgagcttctcgtcatctttttagtgtaaaaagccagaagctaaaacaaagagtttatatagatgatgttatatagaaagctaagaagcttgattttatg

SEQ ID NO: 215833 - DNA, 3747 bp, Zea Mays
ctttgatggtatttttctaatcttcaatctagttgttttttgagtaatctaacatggagctacgacaatgaagaaatctataactaagcaactaatcttcaatcttatggaacttttaatggtacagatccaactcttctttgaaagaagggaaataatctgtgcagtgtttaatattacttttattttgccgttcagcccctcgattcgtggtgctcctcctcctcccgcaatgccgcccccttccgcttccgccatcgccacccgcttcgcaacccactggatagctgacgccctcgccgacgacgagtccttcgacttctccgtgctccaggatctggtgcgggcctcgtcgaagcccctcgcgggcgccccggaggccacgcgcgagcgggtcgcgctccggtgcctccaggaggcgtcatccgtgatagccgctgggggtgatgccgcggccacggcgggcgtgcttagggttgatggcgcccggtcatgcgaggatgtgctgttgcggcttatcagagaggttgggagttccagagaattggagaaggatttgcttccacctttcagtcaagacatccaggaaactatatgtaccaagaaatctacactaccagaaacttctttccagttgctaaaaggacttgagccatggatcacatctatgaccccacaatcccaaatggagcacaatgacactgaacaatgtgacattgatcagtccctgcgcagcagccatggatgtgtaaatatagagaagcctatgttccctacagacaatgctgaggttcagcaagagactatggcagatgtagtcaatggaagtgaaacgggaaatgtccaaaaggatccacctgcaccaacttctgtttttcaccaaccgtgtatgcacgaaagcaggtcttacatccctccgcaagaagatactatagatgttgttggtctaggcgataggtccttagaaaggagtcctattgtggaggggaacatgtccattggatctgtgcttgcttcagctggctgtgatgcacctttgcagggaagaattactgagcccttttcccagcaggataaacatgatcatactgctacagttgaaccaaaatcttgtaggcaaaaatctccaaatctatctcactgtgccgatggagagggggcagatgatggtggctccagcaatcagtcatctaaggtttccattcatgaaggaccgagtgctcatgccccagtaacttcaggttttgacagaatcagcggtgtcttatcaacagatgcatctgaacctgagcatttgtctgagtgcataccagcacaggatacatccatgatttcacagcttgacagcaggaaagctcatctgagtgctctgcaacaggaaagggttgagaaagtaaaccaaggtccggaagatatctctgcaaatattgggccagtggaaaaggaacatgttcatggggatctgactttgcaatctgctagtgttttactttctattagctgcaatggttctaatcaaggaactaaatctgaaaccaatcttcaaccagggactgctacagaggataggatggcttttgaagagcagaatgcggagaagtctcacttagaactcagtggtaccaacaaggctaatcaagctctgttcgatgatggcagcgtcatgaaaaataatacggttcatggtgggctgactgcgcatactgctccagtgtctcaaagctgcagtgtaaccttacatgataaaacttcagaagccaattgtttttctgagtggaaaaatgaaaagaacggtcaaaaagataattgccatacttctattccaggctcttctcaggatgggggtggagaaagtgcaaagaagacatcaaatgaggtaaactctggggacacttcttcaaaaatatgtgtccattctaaggataaagacattaatgatactcttgagggcttgtctcaacaagatttgtgtataaaatgtggtaaagttggtcagttgcttgaatgcagcagttgttctttagctgctcataatagctgttttggttcatcggtgacatttgaagagaccaacttattctactgcccagtatgcttctataagagagccaccgaagcatataaaaaggcaaagaaaacatatggggaagctaggaagaacgttgctgctttccttggcacaatacaggtcaccaagcaacataatgaacaactaaatggagttcaaccaggaggtgccaacagagaggatcattctgacacatcaaaaaggactcatgaaaatgaagtatataatcttgctcatcaggatgaagagcctcatcagcagatgaagaagcagaaaataaatgctataggtattgattatcgtaaggaggtactcactgagaaggttcctttccagaactctggtcctgcatccattaataaacattcagtgctccagaataacggtaaaacacgagttaaggatccagagaaaaagcagcaagcgggagacgaagaagctcgcaaagaagctggtaatgaaaaatctcatgaaacaggagcttcatctcagagaagatgtgatcctccttcgaatcatgacgttgaggctgaccaggaaggtagtcttacaacttctatccaatctagtggttctgatgaattagaagctaaaggattgcaagagaagaaggcagctgtatcaagtaaatctagaaaaggtatttcaaagcgggatcaacatatgcctacttcaccaagaaaaagaaattctgtacacctgcaaaagcgctattccaatcctcttgcaccacctggaagacgcaaaaaactcttttggacagaagaagaagaagctgttttgagggaagggatggcaaaattcactccacagaataatgcgcaaattccatggattctgatactagaacatggccgtggtgtgtttcacaggacgcgcctgccatctgatttgagggtcaagtggaggagcatgcagaggaagaaatctgatgccgttgacatggaacactgacgtggtacttgtacatagcgaatgtgcaagtaggaatggaggagggtttcttctaattacttttgcagcccttaatcctgtagcactgacgtggattggttgtgggattcggtgaacctaggcctcctctaatatgcacgtagatgatggtagagagattggtagattcaaacctacgcgaagaattgccaatagatgactttggctgcttcgttcgttcaaatcgcacatatatgttgctgccgtgactccataccgtgaagaagcttgcccaaagtctgcagttttctaaacccctggtcaaaaaaggcaccgataaaatcatatctccaagttgtcagttgactgcaaaacaaattagattttgtttggatactctagtattgacctcaatccatatatgttgagatccatgtatgttgaggtggattgggttgtaaattagtttaagttgtactccaatttacctcaacatatgtggatttgggtcaatactagagtatctaaactaagttaaggtgcatgtagagataaatacggatggaaaacctccttctgtttacgtttcttgactcggtgtaggtacatcctagtgactttaatagtagcctaaggctctatttgtttgagcttctcgtcatctttttagtgtaaaaagccagaagctaaaacaaagagtttatatagatgatgttatatagaaagctaagaagcttgattttatg

SEQ ID NO: 215834 - DNA, 3680 bp, Zea Mays
ctcgattcgtggtgctcctcctcctcccgcaatgccgcccccttccgcttccgccatcgccacccgcttcgcaacccactggatagctgacgccctcgccgacgacgagtccttcgacttctccgtgctccagggtgaggctccaaaccctaaactcctccgccgttcgcctgaacgctttcggtctctcacctggcccctcgcgggcgccccggaggccacgcgcgagcgggtcgcgctccggtgcctccaggaggcgtcatccgtgatagccgctgggggtgatgccgcggccacggcgggcgtgcttagggttgatggcgcccggtcatgcgaggatgtgctgttgcggcttatcagagaggttgggagttccagagaattggagaaggatttgcttccacctttcagtcaagacatccaggaaactatatgtaccaagaaatctacactaccagaaacttctttccagttgctaaaaggacttgagccatggatcacatctatgaccccacaatcccaaatggagcacaatgacactgaacaatgtgacattgatcagtccctgcgcagcagccatggatgtgtaaatatagagaagcctatgttccctacagacaatgctgaggttcagcaagagactatggcagatgtagtcaatggaagtgaaacgggaaatgtccaaaaggatccacctgcaccaacttctgtttttcaccaaccgtgtatgcacgaaagcaggtcttacatccctccgcaagaagatactatagatgttgttggtctaggcgataggtccttagaaaggagtcctattgtggaggggaacatgtccattggatctgtgcttgcttcagctggctgtgatgcacctttgcagggaagaattactgagcccttttcccagcaggataaacatgatcatactgctacagttgaaccaaaatcttgtaggcaaaaatctccaaatctatctcactgtgccgatggagagggggcagatgatggtggctccagcaatcagtcatctaaggtttccattcatgaaggaccgagtgctcatgccccagtaacttcaggttttgacagaatcagcggtgtcttatcaacagatgcatctgaacctgagcatttgtctgagtgcataccagcacaggatacatccatgatttcacagcttgacagcaggaaagctcatctgagtgctctgcaacaggaaagggttgagaaagtaaaccaaggtccggaagatatctctgcaaatattgggccagtggaaaaggaacatgttcatggggatctgactttgcaatctgctagtgttttactttctattagctgcaatggttctaatcaaggaactaaatctgaaaccaatcttcaaccagggactgctacagaggataggatggcttttgaagagcagaatgcggagaagtctcacttagaactcagtggtaccaacaaggctaatcaagctctgttcgatgatggcagcgtcatgaaaaataatacggttcatggtgggctgactgcgcatactgctccagtgtctcaaagctgcagtgtaaccttacatgataaaacttcagaagccaattgtttttctgagtggaaaaatgaaaagaacggtcaaaaagataattgccatacttctattccaggctcttctcaggatgggggtggagaaagtgcaaagaagacatcaaatgaggtaaactctggggacacttcttcaaaaatatgtgtccattctaaggataaagacattaatgatactcttgagggcttgtctcaacaagatttgtgtataaaatgtggtaaagttggtcagttgcttgaatgcagcagttgttctttagctgctcataatagctgttttggttcatcggtgacatttgaagagaccaacttattctactgcccagtatgcttctataagagagccaccgaagcatataaaaaggcaaagaaaacatatggggaagctaggaagaacgttgctgctttccttggcacaatacaggtcaccaagcaacataatgaacaactaaatggagttcaaccaggaggtgccaacagagaggatcattctgacacatcaaaaaggactcatgaaaatgaagtatataatcttgctcatcaggatgaagagcctcatcagcagatgaagaagcagaaaataaatgctataggtattgattatcgtaaggaggtactcactgagaaggttcctttccagaactctggtcctgcatccattaataaacattcagtgctccagaataacggtaaaacacgagttaaggatccagagaaaaagcagcaagcgggagacgaagaagctcgcaaagaagctggtaatgaaaaatctcatgaaacaggagcttcatctcagagaagatgtgatcctccttcgaatcatgacgttgaggctgaccaggaaggtagtcttacaacttctatccaatctagtggttctgatgaattagaagctaaaggattgcaagagaagaaggcagctgtatcaagtaaatctagaaaaggtatttcaaagcgggatcaacatatgcctacttcaccaagaaaaagaaattctgtacacctgcaaaagcgctattccaatcctcttgcaccacctggaagacgcaaaaaactcttttggacagaagaagaagaagctgttttgaggggatggcaaaattcactccacagaataatgcgcaaattccatggattctgatactagaacatggccgtggtgtgtttcacaggacgcgcctgccatctgatttgagggtcaagtggaggagcatgcagaggaagaagtgggcaggctactgatcttacacgcccccgcgcacgtagctgttgtgtctcatgctaaattactaaccataccttcatttctctgtgtccatctgcagatctgatgccgttgacatggaacactgacgtggtacttgtacatagcgaatgtgcaagtaggaatggaggagggtttcttctaattacttttgcagcccttaatcctgtagcactgacgtggattggttgtgggattcggtgaacctaggcctcctctaatatgcacgtagatgatggtagagagattggtagattcaaacctacgcgaagaattgccaatagatgactttggctgcttcgttcgttcaaatcgcacatatatgttgctgccgtgactccataccgtgaagaagcttgcccaaagtctgcagttttctaaacccctggtcaaaaaaggcaccgataaaatcatatctccaagttgtcagttgactgcaaaacaaattagattttgtttggatactctagtattgacctcaatccatatatgttgagatccatgtatgttgaggtggattgggttgtaaattagtttaagttgtactccaatttacctcaacatatgtggatttgggtcaatactagagtatctaaactaagttaaggtgcatgtagagataaatacggatggaaaacctccttctgtttacgtttcttgactcggtgtaggtacatcctagtgactttaatagtagcctaaggctctatttgtttgagcttctcgtcatctttttagtgtaaaaagccagaagctaaaacaaagagtttatatagatgatgttatatagaaagctaagaagcttgattttatg

SEQ ID NO: 215835 - DNA, 3434 bp, Zea Mays
ccgcaatgccgcccccttccgcttccgccatcgccacccgcttcgcaacccactggatagctgacgccctcgccgacgacgagtccttcgacttctccgtgctccaggatctggtgcgggcctcgtcgaagcccctcgcgggcgccccggaggccacgcgcgagcgggtcgcgctccggtgcctccaggaggcgtcatccgtgatagccgctgggggtgatgccgcggccacggcgggcgtgcttagggttgatggcgcccggtcatgcgaggatgtgctgttgcggcttatcagagaggttgggagttccagagaattggagaaggatttgcttccacctttcagtcaagacatccaggaaactatatgtaccaagaaatctacactaccagaaacttctttccagttgctaaaaggacttgagccatggatcacatctatgaccccacaatcccaaatggagcacaatgacactgaacaatgtgacattgatcagtccctgcgcagcagccatggatgtgtaaatatagagaagcctatgttccctacagacaatgctgaggttcagcaagagactatggcagatgtagtcaatggaagtgaaacgggaaatgtccaaaaggatccacctgcaccaacttctgtttttcaccaaccgtgtatgcacgaaagcaggtcttacatccctccgcaagaagatactatagatgttgttggtctaggcgataggtccttagaaaggagtcctattgtggaggggaacatgtccattggatctgtgcttgcttcagctggctgtgatgcacctttgcagggaagaattactgagcccttttcccagcaggataaacatgatcatactgctacagttgaaccaaaatcttgtaggcaaaaatctccaaatctatctcactgtgccgatggagagggggcagatgatggtggctccagcaatcagtcatctaaggtttccattcatgaaggaccgagtgctcatgccccagtaacttcaggttttgacagaatcagcggtgtcttatcaacagatgcatctgaacctgagcatttgtctgagtgcataccagcacaggatacatccatgatttcacagcttgacagcaggaaagctcatctgagtgctctgcaacaggaaagggttgagaaagtaaaccaaggtccggaagatatctctgcaaatattgggccagtggaaaaggaacatgttcatggggatctgactttgcaatctgctagtgttttactttctattagctgcaatggttctaatcaaggaactaaatctgaaaccaatcttcaaccagggactgctacagaggataggatggcttttgaagagcagaatgcggagaagtctcacttagaactcagtggtaccaacaaggctaatcaagctctgttcgatgatggcagcgtcatgaaaaataatacggttcatggtgggctgactgcgcatactgctccagtgtctcaaagctgcagtgtaaccttacatgataaaacttcagaagccaattgtttttctgagtggaaaaatgaaaagaacggtcaaaaagataattgccatacttctattccaggctcttctcaggatgggggtggagaaagtgcaaagaagacatcaaatgaggtaaactctggggacacttcttcaaaaatatgtgtccattctaaggataaagacattaatgatactcttgagggcttgtctcaacaagatttgtgtataaaatgtggtaaagttggtcagttgcttgaatgcagcagttgttctttagctgctcataatagctgttttggttcatcggtgacatttgaagagaccaacttattctactgcccagtatgcttctataagagagccaccgaagcatataaaaaggcaaagaaaacatatggggaagctaggaagaacgttgctgctttccttggcacaatacaggtcaccaagcaacataatgaacaactaaatggagttcaaccaggaggtgccaacagagaggatcattctgacacatcaaaaaggactcatgaaaatgaagtatataatcttgctcatcaggatgaagagcctcatcagcagatgaagaagcagaaaataaatgctataggtattgattatcgtaaggaggtactcactgagaaggttcctttccagaactctggtcctgcatccattaataaacattcagtgctccagaataacggtaaaacacgagttaaggatccagagaaaaagcagcaagcgggagacgaagaagctcgcaaagaagctggtaatgaaaaatctcatgaaacaggagcttcatctcagagaagatgtgatcctccttcgaatcatgacgttgaggctgaccaggaaggtagtcttacaacttctatccaatctagtggttctgatgaattagaagctaaaggattgcaagagaagaaggcagctgtatcaagtaaatctagaaaaggtatttcaaagcgggatcaacatatgcctacttcaccaagaaaaagaaattctgtacacctgcaaaagcgctattccaatcctcttgcaccacctggaagacgcaaaaaactcttttggacagaagaagaagaagctgttttgagggacgcgcctgccatctgatttgagggtcaagtggaggagcatgcagaggaagaaatctgatgccgttgacatggaacactgacgtggtacttgtacatagcgaatgtgcaagtaggaatggaggagggtttcttctaattacttttgcagcccttaatcctgtagcactgacgtggattggttgtgggattcggtgaacctaggcctcctctaatatgcacgtagatgatggtagagagattggtagattcaaacctacgcgaagaattgccaatagatgactttggctgcttcgttcgttcaaatcgcacatatatgttgctgccgtgactccataccgtgaagaagcttgcccaaagtctgcagttttctaaacccctggtcaaaaaaggcaccgataaaatcatatctccaagttgtcagttgactgcaaaacaaattagattttgtttggatactctagtattgacctcaatccatatatgttgagatccatgtatgttgaggtggattgggttgtaaattagtttaagttgtactccaatttacctcaacatatgtggatttgggtcaatactagagtatctaaactaagttaaggtgcatgtagagataaatacggatggaaaacctccttctgtttacgtttcttgactcggtgtaggtacatcctagtgactttaatagtagcctaaggctctatttgtttgagcttctcgtcatctttttagtgtaaaaagccagaagctaaaacaaagagtttatatagatgatgttatatagaaagctaagaagcttgattttatg

SEQ ID NO: 215836 - DNA, 1923 bp, Zea Mays
tataaattgcttcctgagatgccttgctgtggaggttgcagtgttatcagaatctcatgacctttgtattaatggggactgttttgaaatgctacaaagtactgaggctgttctccaggttatcccttatgtgaaggttttttcacgtgttgctccagaacaaaaagaacttgtactaactacattcaaaagtgttgggagggtgacactgatgtgtggagatggaaccaatgatgttggtgcactgaagcaggcacatgtcggcgttgctcttttgaatgctgaaccagttcagaaagtggattcaaaatctaaagctgaaaataaatctgggaaattgaaaaacaagaagcctgctaatgaagcatcatcacaagtgactccggtagctaatagttctggtaaagcatccagcagcctttccttgactgctgctgagaggcagcgagaaaagctgcagaagatgttggatgaaatgaatgatgaaagtgatggtcgttcagcaccaattgttaagcttggtgatgcttctatggcttcacctttcacagcaaagcatgcatctgttacccctactcttgatatcatccgtcagggaagaagcaccctagtcactacacttcaaatgttcaagattcttgggctcaattgccttgcgacagcttacgttctcagtgtcatgtacttggatggtgtcaaactgggcgatgttcaggctacaattagtggtgtcttcactgcagccttcttcctcttcatctccaatgctcggccactccaaacgctgtctgcagagcggcctcagcctaacatattctgtgcatacgttctgctctcgattcttggccagttcgccatgcacatattcttccttatcacggctgtcaatgaagcatcaaagcatatgccagaggaatgcattgagcctgactcagacttccatccaaaccttgtgaatacggtttcgtacatggtgaacatgatgatccaggtggcaacctttgctgtaaactacatgggccacccatttaatcagagcatatccgagaacaagcccttcaagtatgcattgtatggagcggttgctttcttcacagtgatcacatcagatatgttcaggggtttgaatgactacatgaaacttgaacctttgccagagggaatgcgtggcaaattgatgttgtgggctattctaatgttttgtggttgctacggatgggagcggctcctgcgatgggtgttcccggggaagattccggcgtgggagaagcgccagaaacaggcagttgcaagcttggagaaaaaacaccactagaattcttttagttgtctgcacttctttaccctttgatgcccatttcgatacttggtagtacatactgatcatgtcttgtcatggtttcaatctaatctgtagcctaggggaattttggcagtgaaagccctaaatgatagcatagagggtcacttatcaggattgttaaattttcggttacaatatgaaagttaatattagatggcaatgcatatcgggtgatgtacaaggcaaaatacagaaactatgccaggatttccttcattcttctactcttacaatgcgcattgatcttaatgtgtacaccctatgagaaaaggaatccctgtattctgctgctttatttatttatttatttaataatagcgtaaacatccatgttggtacagcgaaatgttggttacagcgaaagtatcaagacggaggaagggcaaaaggatcaagatgaagagtaaaattttcttttctattttttgtgtaaattaaattctaaaccaaagcttaatagtgtgatgaagcgttttgtaccttaattttcatgacaaatactagcatgacaatttgatgtataagcttaaatcattttgaattgaattgttcaaatataa

SEQ ID NO: 215837 - DNA, 1840 bp, Zea Mays
atgacgcgccgcagcgacgcgcgcctgaggagggtcgtcatggagccggcttcgcctccaaccgctgcaagtcgcgcggatgagggcggaggcgagagttttgcagtttctactgctgtcttcgctccgaaatccaaccgaaatctcagaggtcagaggaaagtaggaaacctcgttcgggaacctgctttgagtgagactccaatccttgggcgccattgccgcctgttttttgtgctcggaaaggtgcgtttatttccctgtccggggcgctttcccttctcttcccgttgcttatccacgtggggttgccgtgaatccaccgtcttctccgcctacaatctctcagcaaaaccaccaaagccagctgctcatttgggggaagaccttctttgagtgaggtccaacccttgggggccatttcaaccttcgtcctccgcaataaaagttgggcaatcctatgtcagtcacttctcttctagcccaacccattccatcgctgtttgctccttctcccgcgccttcgagagctcgccgaaaccgaacctcccggcggcgtttcttagctgcaacaaaactaaccatggatggcactagctttgacctgacagagcacgaaggttcaaatttgtctccttttctactcaaactttttaatgagtgggatgatcgcaagacaaggggcttgtttcaccatgacatcagttcctgtgaaacaaaggtgctacctggagtacataattttgtggcaacattaattgaaggacgtgaccaaaagaagcggccaactgagttcacaatgaaccaagttctccagccatttgttagtgagaagttcaatttcacaaaagtcagcccgttggaggtgatctttagattcaatgacactgagaaagattctgcacaatattttgatggtgttcctgatactgtttcagcttcttctagtgccatcttgattaatgtgagcccaattggctactgccatgtgctattgactcccaagatccaggactgtttgccgcaaaggattgatcaagagagcttcttaatagccatgtatgttgcaagagaagcaaggactcccttcttcagagttggttataacagcctgggcggctttgcaactatcaaccaccttcacttccaggcatactacctgaaagtacagtatccagttgaaaaggcaatcacggagaagctcaagaccctagggaatagcgtgagcatttttcacctggtggattacccagtcaatggctttgtgttcgaaggtggtgcgagcctggaagatttgtcagatgtggtctccaaagtctgcatcttcctgcaagagaacaacagacctttcaatgtcctcatctctgaatctggcaagagaattttccttctaccacagtgctatgcggagaagcagctcctcggaaaggcgagccaagagttcctggacatgagaatcaatccagcaatctgggagctcagtggccatctggtactgaagcggaggaaggactacgaggaggcctctgaagcaaacatatgcaggtttttggttgaagcagctctttctgaaacagaatttcaggagctgaacctatgcgtgctcgacttcctgaccagctctcttggttgaaactcggatgtaggttcctatagatagtaacagttctgaggttccagttaaaacagttgtgctggtactgttactttatgatggtatatcatgtagtagtatttctgatttgactcgtcacctctgcgatgaaataatatgtcttctccggcttcaatttcgtaaagagcccacataatcctgctgctgacctgctgtactgcgaag

SEQ ID NO: 215838 - DNA, 1079 bp, Zea Mays
ggccgcatcctctccccccgcggccgagctccacccccacccacccacacgcacacactttgccggcggcgagcaccaccaggacagcagtatccctgtctctcatagagagggttcaagcagcatgcctgtacaacacatccaggcttcgagtagtacaccaccggctactggtgagcctcgcattggtatgcgtagttgccccatcgatgtggaagccatcgatgatgatgccgttatctattcttcaagaccactgcctcgagcaagacagcagttgaccacgacagaaagtattactatcataatagatgatgattccgaaacaaacctagaaacagcaggcgatgctcttgacgagcatgtgaacttactgctatctctgggcatagaacgctcgcatgagcctacaagtgcaaccaacaccttccctggaataagcatggtggacacaccaaaagtaaacaccttcaagtggatccaggtgcctcctgaacctgtgaaggaggttccgaaggaaccgaagctcagctgcccgatctgtatgaacgagataaccgaagcggcgtcgaccgtatgcggtcacattttctgccagccgtgcatcaaggctgccattaaggcccagaagaagtgccctacctgccggaggaagctcactccaagacagcaacaccgggtgtacctcccatcgccttagtagcccagtgcagagtcattttgctacaagttctgccgtgccgggggctgtatgttggaggcaactggggggggggggggggggagcatagaggtcctgtttggttcgttcatttagtgtcataatcagttaacagggtaatctattaccattgctttatgtttggttagactatactgtaaacgattgcagtgggatgcaataccagccaatacaaaattattgccgctgctttttgactgttagccaactccgatccgtctttttggatcccacgttgcaaccaaacatagactggtaaccgttcacagcaaaggatagcaggtgcaataagttccattctcattaccactacctgttgccgaaccaaatagcacgt

SEQ ID NO: 215839 - DNA, 1490 bp, Zea Mays
ggccgcatcctctccccccgcggccgagctccacccccacccacccacacgcacacactttgccggcggcgagcaccaccaggacagcaggttacgcagatgtttctttttagagttattgcatctcctcagttgtagtttatctcggttgtgtatccacgagtgctgtgtacaccaattcctgtagaaaagatgggtgaacatgttttcattgttcaagaatgttgttatatgtttttaaatcatgtaagacatgttttagttttaccatggggtctcgagaacaatattgtttatttcctcattctgttttgaagccgtcggaattatgcttgtaatcattgctgaagtttttgtgaacatatattttttttcaatcgattttgctcgagccagtatcttttattgcaacaccatgaactcccatggtgctggttcgcattcacggcttttggacctcaactatccccctgctgaaggggctggtgagggggcttcacgtttcagcagtatccctgtctctcatagagagggttcaagcagcatgcctgtacaacacatccaggcttcgagtagtacaccaccggctactggtgagcctcgcattggtatgcgtagttgccccatcgatgtggaagccatcgatgatgatgccgttatctattcttcaagaccactgcctcgagcaagacagcagttgaccacgacagaaagtattactatcataatagatgatgattccgaaacaaacctagaaacagcaggcgatgctcttgacgagcatgtgaacttactgctatctctgggcatagaacgctcgcatgagcctacaagtgcaaccaacaccttccctggaataagcatggtggacacaccaaaagtaaacaccttcaaggtgcctcctgaacctgtgaaggaggttccgaaggaaccgaagctcagctgcccgatctgtatgaacgagataaccgaagcggcgtcgaccgtatgcggtcacattttctgccagccgtgcatcaaggctgccattaaggcccagaagaagtgccctacctgccggaggaagctcactccaagacagcaacaccgggtgtacctcccatcgccttagtagcccagtgcagagtcattttgctacaagttctgccgtgccgggggctgtatgttggaggcaactggggggggggggggggggagcatagaggtcctgtttggttcgttcatttagtgtcataatcagttaacagggtaatctattaccattgctttatgtttggttagactatactgtaaacgattgcagtgggatgcaataccagccaatacaaaattattgccgctgctttttgactgttagccaactccgatccgtctttttggatcccacgttgcaaccaaacatagactggtaaccgttcacagcaaaggatagcaggtgcaataagttccattctcattaccactacctgttgccgaaccaaatagcacgt

SEQ ID NO: 215840 - DNA, 1101 bp, Zea Mays
ggccgcatcctctccccccgcggccgagctccacccccacccacccacacgcacacactttgccggcggcgagcaccaccaggacagcaggggctggtgagggggcttcacgtttcagcagtatccctgtctctcatagagagggttcaagcagcatgcctgtacaacacatccaggcttcgagtagtacaccaccggctactggtgagcctcgcattggtatgcgtagttgccccatcgatgtggaagccatcgatgatgatgccgttatctattcttcaagaccactgcctcgagcaagacagcagttgaccacgacagaaagtattactatcataatagatgatgattccgaaacaaacctagaaacagcaggcgatgctcttgacgagcatgtgaacttactgctatctctgggcatagaacgctcgcatgagcctacaagtgcaaccaacaccttccctggaataagcatggtggacacaccaaaagtaaacaccttcaaggtgcctcctgaacctgtgaaggaggttccgaaggaaccgaagctcagctgcccgatctgtatgaacgagataaccgaagcggcgtcgaccgtatgcggtcacattttctgccagccgtgcatcaaggctgccattaaggcccagaagaagtgccctacctgccggaggaagctcactccaagacagcaacaccgggtgtacctcccatcgccttagtagcccagtgcagagtcattttgctacaagttctgccgtgccgggggctgtatgttggaggcaactggggggggggggggggggagcatagaggtcctgtttggttcgttcatttagtgtcataatcagttaacagggtaatctattaccattgctttatgtttggttagactatactgtaaacgattgcagtgggatgcaataccagccaatacaaaattattgccgctgctttttgactgttagccaactccgatccgtctttttggatcccacgttgcaaccaaacatagactggtaaccgttcacagcaaaggatagcaggtgcaataagttccattctcattaccactacctgttgccgaaccaaatagcacgt

SEQ ID NO: 215841 - DNA, 895 bp, Zea Mays
ggccgcatcctctccccccgcggccgagctccacccccacccacccacacgcacacactttgccggcggcgagcaccaccaggacagcaggcaagacagcagttgaccacgacagaaagtattactatcataatagatgatgattccgaaacaaacctagaaacagcaggcgatgctcttgacgagcatgtgaacttactgctatctctgggcatagaacgctcgcatgagcctacaagtgcaaccaacaccttccctggaataagcatggtggacacaccaaaagtaaacaccttcaaggtgcctcctgaacctgtgaaggaggttccgaaggaaccgaagctcagctgcccgatctgtatgaacgagataaccgaagcggcgtcgaccgtatgcggtcacattttctgccagccgtgcatcaaggctgccattaaggcccagaagaagtgccctacctgccggaggaagctcactccaagacagcaacaccgggtgtacctcccatcgccttagtagcccagtgcagagtcattttgctacaagttctgccgtgccgggggctgtatgttggaggcaactggggggggggggggggggagcatagaggtcctgtttggttcgttcatttagtgtcataatcagttaacagggtaatctattaccattgctttatgtttggttagactatactgtaaacgattgcagtgggatgcaataccagccaatacaaaattattgccgctgctttttgactgttagccaactccgatccgtctttttggatcccacgttgcaaccaaacatagactggtaaccgttcacagcaaaggatagcaggtgcaataagttccattctcattaccactacctgttgccgaaccaaatagcacgt

SEQ ID NO: 215842 - DNA, 904 bp, Zea Mays
ggccgcatcctctccccccgcggccgagctccacccccacccacccacacgcacacactttgccggcggcgagcaccaccaggacagcaggcaagacagcagttgaccacgacagaaagtattactatcataatagatgatgattccgaaacaaacctagaaacagcaggcgatgctcttgacgagcatgtgaacttactgctatctctgggcatagaacgctcgcatgagcctacaagtgcaaccaacaccttccctggaataagcatggtggacacaccaaaagtaaacaccttcaagtggatccaggtgcctcctgaacctgtgaaggaggttccgaaggaaccgaagctcagctgcccgatctgtatgaacgagataaccgaagcggcgtcgaccgtatgcggtcacattttctgccagccgtgcatcaaggctgccattaaggcccagaagaagtgccctacctgccggaggaagctcactccaagacagcaacaccgggtgtacctcccatcgccttagtagcccagtgcagagtcattttgctacaagttctgccgtgccgggggctgtatgttggaggcaactggggggggggggggggggagcatagaggtcctgtttggttcgttcatttagtgtcataatcagttaacagggtaatctattaccattgctttatgtttggttagactatactgtaaacgattgcagtgggatgcaataccagccaatacaaaattattgccgctgctttttgactgttagccaactccgatccgtctttttggatcccacgttgcaaccaaacatagactggtaaccgttcacagcaaaggatagcaggtgcaataagttccattctcattaccactacctgttgccgaaccaaatagcacgt

SEQ ID NO: 215843 - DNA, 1110 bp, Zea Mays
ggccgcatcctctccccccgcggccgagctccacccccacccacccacacgcacacactttgccggcggcgagcaccaccaggacagcaggggctggtgagggggcttcacgtttcagcagtatccctgtctctcatagagagggttcaagcagcatgcctgtacaacacatccaggcttcgagtagtacaccaccggctactggtgagcctcgcattggtatgcgtagttgccccatcgatgtggaagccatcgatgatgatgccgttatctattcttcaagaccactgcctcgagcaagacagcagttgaccacgacagaaagtattactatcataatagatgatgattccgaaacaaacctagaaacagcaggcgatgctcttgacgagcatgtgaacttactgctatctctgggcatagaacgctcgcatgagcctacaagtgcaaccaacaccttccctggaataagcatggtggacacaccaaaagtaaacaccttcaagtggatccaggtgcctcctgaacctgtgaaggaggttccgaaggaaccgaagctcagctgcccgatctgtatgaacgagataaccgaagcggcgtcgaccgtatgcggtcacattttctgccagccgtgcatcaaggctgccattaaggcccagaagaagtgccctacctgccggaggaagctcactccaagacagcaacaccgggtgtacctcccatcgccttagtagcccagtgcagagtcattttgctacaagttctgccgtgccgggggctgtatgttggaggcaactggggggggggggggggggagcatagaggtcctgtttggttcgttcatttagtgtcataatcagttaacagggtaatctattaccattgctttatgtttggttagactatactgtaaacgattgcagtgggatgcaataccagccaatacaaaattattgccgctgctttttgactgttagccaactccgatccgtctttttggatcccacgttgcaaccaaacatagactggtaaccgttcacagcaaaggatagcaggtgcaataagttccattctcattaccactacctgttgccgaaccaaatagcacgt

SEQ ID NO: 215844 - DNA, 1193 bp, Zea Mays
ggccgcatcctctccccccgcggccgagctccacccccacccacccacacgcacacactttgccggcggcgagcaccaccaggacagcagtatcttttattgcaacaccatgaactcccatggtgctggttcgcattcacggcttttggacctcaactatccccctgctgaaggggctggtgagggggcttcacgtttcagcagtatccctgtctctcatagagagggttcaagcagcatgcctgtacaacacatccaggcttcgagtagtacaccaccggctactggtgagcctcgcattggtatgcgtagttgccccatcgatgtggaagccatcgatgatgatgccgttatctattcttcaagaccactgcctcgagcaagacagcagttgaccacgacagaaagtattactatcataatagatgatgattccgaaacaaacctagaaacagcaggcgatgctcttgacgagcatgtgaacttactgctatctctgggcatagaacgctcgcatgagcctacaagtgcaaccaacaccttccctggaataagcatggtggacacaccaaaagtaaacaccttcaagtggatccaggtgcctcctgaacctgtgaaggaggttccgaaggaaccgaagctcagctgcccgatctgtatgaacgagataaccgaagcggcgtcgaccgtatgcggtcacattttctgccagccgtgcatcaaggctgccattaaggcccagaagaagtgccctacctgccggaggaagctcactccaagacagcaacaccgggtgtacctcccatcgccttagtagcccagtgcagagtcattttgctacaagttctgccgtgccgggggctgtatgttggaggcaactggggggggggggggggggagcatagaggtcctgtttggttcgttcatttagtgtcataatcagttaacagggtaatctattaccattgctttatgtttggttagactatactgtaaacgattgcagtgggatgcaataccagccaatacaaaattattgccgctgctttttgactgttagccaactccgatccgtctttttggatcccacgttgcaaccaaacatagactggtaaccgttcacagcaaaggatagcaggtgcaataagttccattctcattaccactacctgttgccgaaccaaatagcacgt

SEQ ID NO: 215845 - DNA, 1046 bp, Zea Mays
ggccgcatcctctccccccgcggccgagctccacccccacccacccacacgcacacactttgccggcggcgagcaccaccaggacagcagcatgcctgtacaacacatccaggcttcgagtagtacaccaccggctactggtgagcctcgcattggtatgcgtagttgccccatcgatgtggaagccatcgatgatgatgccgttatctattcttcaagaccactgcctcgagcaagacagcagttgaccacgacagaaagtattactatcataatagatgatgattccgaaacaaacctagaaacagcaggcgatgctcttgacgagcatgtgaacttactgctatctctgggcatagaacgctcgcatgagcctacaagtgcaaccaacaccttccctggaataagcatggtggacacaccaaaagtaaacaccttcaagtggatccaggtgcctcctgaacctgtgaaggaggttccgaaggaaccgaagctcagctgcccgatctgtatgaacgagataaccgaagcggcgtcgaccgtatgcggtcacattttctgccagccgtgcatcaaggctgccattaaggcccagaagaagtgccctacctgccggaggaagctcactccaagacagcaacaccgggtgtacctcccatcgccttagtagcccagtgcagagtcattttgctacaagttctgccgtgccgggggctgtatgttggaggcaactggggggggggggggggggagcatagaggtcctgtttggttcgttcatttagtgtcataatcagttaacagggtaatctattaccattgctttatgtttggttagactatactgtaaacgattgcagtgggatgcaataccagccaatacaaaattattgccgctgctttttgactgttagccaactccgatccgtctttttggatcccacgttgcaaccaaacatagactggtaaccgttcacagcaaaggatagcaggtgcaataagttccattctcattaccactacctgttgccgaaccaaatagcacgt

SEQ ID NO: 215846 - DNA, 1082 bp, Zea Mays
ggccgcatcctctccccccgcggccgagctccacccccacccacccacacgcacacactttgccggcggcgagcaccaccaggacagcagcagtatccctgtctctcatagagagggttcaagcagcatgcctgtacaacacatccaggcttcgagtagtacaccaccggctactggtgagcctcgcattggtatgcgtagttgccccatcgatgtggaagccatcgatgatgatgccgttatctattcttcaagaccactgcctcgagcaagacagcagttgaccacgacagaaagtattactatcataatagatgatgattccgaaacaaacctagaaacagcaggcgatgctcttgacgagcatgtgaacttactgctatctctgggcatagaacgctcgcatgagcctacaagtgcaaccaacaccttccctggaataagcatggtggacacaccaaaagtaaacaccttcaagtggatccaggtgcctcctgaacctgtgaaggaggttccgaaggaaccgaagctcagctgcccgatctgtatgaacgagataaccgaagcggcgtcgaccgtatgcggtcacattttctgccagccgtgcatcaaggctgccattaaggcccagaagaagtgccctacctgccggaggaagctcactccaagacagcaacaccgggtgtacctcccatcgccttagtagcccagtgcagagtcattttgctacaagttctgccgtgccgggggctgtatgttggaggcaactggggggggggggggggggagcatagaggtcctgtttggttcgttcatttagtgtcataatcagttaacagggtaatctattaccattgctttatgtttggttagactatactgtaaacgattgcagtgggatgcaataccagccaatacaaaattattgccgctgctttttgactgttagccaactccgatccgtctttttggatcccacgttgcaaccaaacatagactggtaaccgttcacagcaaaggatagcaggtgcaataagttccattctcattaccactacctgttgccgaaccaaatagcacgt

SEQ ID NO: 215847 - DNA, 1188 bp, Zea Mays
cggcggccgcatcctctccccccgcggccgagctccacccccacccacccacacgcacacactttgccggcggcgagcaccaccaggacagcagtatcttttattgcaacaccatgaactcccatggtgctggttcgcattcacggcttttggacctcaactatccccctgctgaaggggctggtgagggggcttcacgtttcagcagtatccctgtctctcatagagagggttcaagcagcatgcctgtacaacacatccaggcttcgagtagtacaccaccggctactggtgagcctcgcattggtatgcgtagttgccccatcgatgtggaagccatcgatgatgatgccgttatctattcttcaagaccactgcctcgagcaagacagcagttgaccacgacagaaagtattactatcataatagatgatgattccgaaacaaacctagaaacagcaggcgatgctcttgacgagcatgtgaacttactgctatctctgggcatagaacgctcgcatgagcctacaagtgcaaccaacaccttccctggaataagcatggtggacacaccaaaagtaaacaccttcaaggtgcctcctgaacctgtgaaggaggttccgaaggaaccgaagctcagctgcccgatctgtatgaacgagataaccgaagcggcgtcgaccgtatgcggtcacattttctgccagccgtgcatcaaggctgccattaaggcccagaagaagtgccctacctgccggaggaagctcactccaagacagcaacaccgggtgtacctcccatcgccttagtagcccagtgcagagtcattttgctacaagttctgccgtgccgggggctgtatgttggaggcaactggggggggggggggggggagcatagaggtcctgtttggttcgttcatttagtgtcataatcagttaacagggtaatctattaccattgctttatgtttggttagactatactgtaaacgattgcagtgggatgcaataccagccaatacaaaattattgccgctgctttttgactgttagccaactccgatccgtctttttggatcccacgttgcaaccaaacatagactggtaaccgttcacagcaaaggatagcaggtgcaataagttccattctcattaccactacctgttgccgaaccaaatagcacgt

SEQ ID NO: 215848 - DNA, 1762 bp, Zea Mays
gcagaagagcccgaggatatgtgtcgttcgtgcaccgagcggagaaacaggggggtgagcgacgagctgcgccgacgcagaggagggagcggacgtggagcttgcgctgacgcagaggagcgcgatgagatgcactgcgtcagtcacggatgatgaggcggcggacgcggcggcctggatgaagcagtgcggtcgccggttggaaagccgctgagatgtgaacaaaaccgcagcgagcagaccggtgttgctgtcaaacattgtaaggagggcactgagagctctattttctggtcttctcttggtggaaagcagagttatacaagtagaaatgttgtacctgatgttgttcttagagaacctcatttgtataccttctctcttaggaatggttactgaaattttcaatttttcacaagatgatttgttgaccgaagacatgatgatacttgatacacactctgaggtttttgtctggatgggtcagtgcgtggagacaaaagaaaaacagaaagcatttgacattggccagtcaatgaagggaatgaaccttgcttcttcaggacattcttctcctgggatagcacacggtccctggttcatggaaactcttttgagaagaaactttcagttcttttcggaatgcgttcagagggtggcaataagagctcaggtgatggtggaccaactcaaagggcatcagccttggcagctctttcatccgcattgaatccatcgtcgcaaggaaaacagtcagatgagaggcccacaaaacccagcagcacacaggcgcagtctcattcaggccaagggtcacagagagccgctgctgttgcagcactttccaatgttttgactgcagagggatcgcacagcccccgccacagtaggtcgtccccaacagcagatgctgagaagactgaattagctcctgcttctcctcaccagttggaaacagggcctgcagaagatgtccggacagagcctgatgtctcacaggaacaaactgctaacgaaaacggaggccagaccacctttagctacgaccgcttggtatcaaagtctactgaccctgtcagtgggatagaccacaagcgcagagagacatatttggtggacaatgagttcgagaccgtgtttggcatgaccaaagaggagttctacgagcagccaaggtggaagcaagagttgcagaagaagaaagctgatcttttctgaactcacacacacggctagctacgaataaaagccctccccgttgcgcgaccctttctctctccacggctgtcgtccagcattctcaccatgctcgttccacggatgcgtgatcaccagcagctttatccgtgagttgtatactctttatctgcacacgttttgggcgcgttatatatattattattattcccctagcccctccattattctggagtccacgttctggaagttgacctttcacgtgtttctttttgtaatcattaaaaatcaatttgttcagatgtcattaccagtgagattttcgtatgtaatgatgcactggcaccaaggtgtatggaacattttttttttttttgctataagacttgagcttctattgttctggcggtgttctactcgtctaattgaaggatccccggcctcctcgttgctcatgtttgtctcacggaatttcatcagcagaatgcatcttgctagtgctacctggcagggcaggacctcctttaccggaaggacagatctgaaccgtagaaatcagttggcc

SEQ ID NO: 215849 - DNA, 2085 bp, Zea Mays
gacggtggtgccccgactcatcctactttgacttcaaaccaaacacaccgtaatataaatgaattgtccaccactcttattagcttaagcttttagattgaattggttggtacatgcaacttaatagagccaaaccgagtggaacagcaggggtggcacacgtgacacgacacgcgtaggcgcagcaacaggggcggcgcgcgaccgacgaaggggagcacacggcgtggtggaacccacaccacaccgttgcagaagagcccgaggatatgtgtcgttcgtgcaccgagcggagaaacaggggggtgagcgacgagctgcgccgacgcagaggagggagcggacgtggagcttgcgctgacgcagaggagcgcgatgagatgcactgcgtcagtcacggatgatgaggcggcggacgcggcggcctggatgaagcagtgcggtcgccggttggaaagccgctgagatgtgaacaaaaccgcagcgagcagaccggtgttgctgtcaaacattgtaaggagggcactgagagctctattttctggtcttctcttggtggaaagcagagttatacaagtagaaatgttgtacctgatgttgttcttagagaacctcatttgtataccttctctcttaggaatgggaagctggaggttactgaaattttcaatttttcacaagatgatttgttgaccgaagacatgatgatacttgatacacactctgaggtttttgtctggatgggtcagtgcgtggagacaaaagaaaaacagaaagcatttgacattggccagaaatacgtacaaaatgccgtggcctttgaaggaatttctcctgatgtgcctctctataaagtcaatgaagggaatgaaccttgcttcttcaggacattcttctcctgggatagcacacggtccctggttcatggaaactcttttgagaagaaactttcagttcttttcggaatgcgttcagagggtggcaataagagctcaggtgatggtggaccaactcaaagggcatcagccttggcagctctttcatccgcattgaatccatcgtcgcaaggaaaacagtcagatgagaggcccacaaaacccagcagcacacaggcgcagtctcattcaggccaagggtcacagagagccgctgctgttgcagcactttccaatgttttgactgcagagggatcgcacagcccccgccacagtaggtcgtccccaacagcagatgctgagaagactgaattagctcctgcttctcctcaccagttggaaacagggcctgcagaagatgtccggacagagcctgatgtctcacaggaacaaactgctaacgaaaacggaggccagaccacctttagctacgaccgcttggtatcaaagtctactgaccctgtcagtgggatagaccacaagcgcagagagacatatttggtggacaatgagttcgagaccgtgtttggcatgaccaaagaggagttctacgagcagccaaggtggaagcaagagttgcagaagaagaaagctgatcttttctgaactcacacacacggctagctacgaataaaagccctccccgttgcgcgaccctttctctctccacggctgtcgtccagcattctcaccatgctcgttccacggatgcgtgatcaccagcagctttatccgtgagttgtatactctttatctgcacacgttttgggcgcgttatatatattattattattcccctagcccctccattattctggagtccacgttctggaagttgacctttcacgtgtttctttttgtaatcattaaaaatcaatttgttcagatgtcattaccagtgagattttcgtatgtaatgatgcactggcaccaaggtgtatggaacattttttttttttttgctataagacttgagcttctattgttctggcggtgttctactcgtctaattgaaggatccccggcctcctcgttgctcatgtttgtctcacggaatttcatcagcagaatgcatcttgctagtgctacctggcagggcaggacctcctttaccggaaggacagatctgaaccgtagaaatcagttggcc

SEQ ID NO: 215850 - DNA, 589 bp, Zea Mays
atcaattttcttggactatctacccatgttatccaccagataaatgatggcccatgcgcccttattgcagtctggggacatctcttttgaaccacatgaaactgtggtgtcaatggagtatctacttggccttgtccttgctcttcttggaggaagtgtgaaaatgcaggactattctgatgaaagaaaaagtcagatattggatgtggtgaagagtctggccggagggtttgatatggatgttatcttcaccagaacggatggttttacaatgactcaagagtggttgcttctggattgcttagatctcaaccttcgacatggttggattgctgctagggatttgttgaccggacccgaagtatcatttgaaagtcttacattggcttctaatgaacctggttttccacatgcggaggagatcaagaattttctaaggggacctcaacttactcccattggcttggtttcgctgcaagaagactttgttgagaatgttccgtgcattctgttctggaacaagcattaccatactatagttatgatcaatggagtattaaattctctagtcactgattctaattattta

SEQ ID NO: 215851 - DNA, 746 bp, Zea Mays
aaacggaggcgttggcgagggtttcgacgatatgaaaaaccaggggaaagactccactctgaaatagactgacaatcgatactagccgttgagagaacgaataaccatcctccgtccgcgcgccgttgtcttctgccgtctccttcccttctctctctcgccgatcttgcctcttgcctgggagatctccttgcctgaacctcagcgccggacgcaagcttcgtaccgaggccctgctggtgaagggaattgaccgagaagtgctgctgccaaaagatgggcaccaggaagtggctgaggtcgcgctgcagctggggaagtactgcatagatgaccccgtcaagtccccgccgggcggacggaggatggttattcgtactgccaaaagaatgggaggttgtgtactgctcggtgccaacctcgccgggcgggctctaccggacgcccttggccgcctggtattcaaaaccgacgagatggtccaggcggtggaagcgcctgacgtggtcaggaacaaggtgtcgttctccgtctttggcctagagggcgcagtgtcattgaaaggtaagctgaatgtgctggacagtaaatggattcaggtcgtgtttgaagcgccggaactgaaggtcggctccttggggtttcagtacggtggcgagagcgaagtcaagctggagaagggaaggagatgggagaagacaacagcgcgcggacggaggatagttattcgttctctcaacgattaa

SEQ ID NO: 215852 - DNA, 1633 bp, Zea Mays
ggcaagtttcctatccagactgcgagcgagggagaggcgacatgagctccatcgtctgtaccgccagcgttcgctccgctatcgtctgctccactgacgtccactgtgccgtccactgcgccaccacttagccgtgaggtactcaactgttgccatcatccgtggcttcttgatctagggtttagggtggatctaggaaatcaaatcctacactcgatctacagcctagtgctgctactgcctgagctgtagacatgccaaaatctagtcccctccgtcacggataatgggttcttggaggagcatgttaggcggtttttgttggaggaggaagaagacgatgatgaactattttttgttattctccctgctataatcccatacccctcagaagagaaaaggcccatccacacatcctccctcaccggtgctaaaaaggttaaagaaattcttaaagggcatgagagttggtgcaaatctgagttctgaatggagatggaaatattcaaagccacatcacttagaagagagaatttactatgtgacacgcgaagagttagcatggaggagcagattgggatgttcatgtatatgatctcccacaatgctagtaaccaaatgctacaaaaggcttttcaacacagtggagagactatccatcgaaaaatattcgaagtttttgagatagttcccatactaactcaatgatttgtgaagcttcctagctcagttcaaactcatgctaggattgcaactgattctaggttcatgccctttttcagaattgccttggtgccattgacgacacacatgtacccatgactaccacagaagacagggcccctccatatagaaatagaaaaggaactctttaacacaatgttatggtagtctgtgacttcgatctcaatttgacatttgtctcatgtggatgggaagggtcggcatcagacgcaggggtgcttcaatctactattagcaaaggatttattgtgccagaaggaaagttttatctggtagatggtggctatgcagatacatcatcatacattgcaccatacagaggagttcaataccatctcagtatgtttaggaggcgtcattcatcacaaagtggttatgcaaactacaaagagttgttcaatcatcgccatgcaattctccgcaaccatatagagagggccattggttttcttaagaaaaggttcccgattctaaaagtagggacattccattccatagaaaatcaaatcaagatcactgctgcagccattgcatttcacaacataattagagggcaaaatggtgatgaaggatggctcgacaaccaaccagcttatatatctccaagtcaatatgttgatgtccctgagggagacaacaattatcccaatgacatagagtcaagtgatggtagtacactaagagatcagatcgcactgcagatgtgggctacctacaatagttgattagcttaagtccacatacaataatgactgttaattcaggaacaatgtttgcagcttgttgtaatgttgtaatgcaactatctgtcttatctacttatacaagtgtgttgtcttatctgtaggtatcctgtaatgttcacaagtcaaaattgttataatacgat

SEQ ID NO: 215853 - DNA, 1506 bp, Zea Mays
gctgatccaccgtcgattaacgacgggaatcaatctcctcgacaccagcagggagatcgagaaggaggaggaggcgggtctacgctgcaagacgcagtcgcaatgatggctaggaactacaacgacggttgagaccagcaagaagacactgatcctccatggtaccaagactagtgctgtgttgaactctgtgctgtcagatatttaccacctaaagcgtgataatgctgtgaaatataccaagaagaatgacaacattaggccttttgaaagtggtggagaatcttctctggagtttttctctcttaaggcagactgtagccttatagtgtatggttctcattcaaagaagaggcccaacaatctgattttgggtagaacgtatgaccaccacatatatgaccttgttgaagtaggagttgagaactacaagtcaatggaatcttatgtttatgataagaagctagcaccattacttggatcgaagcctttctttgctttcataggggaacactttgagagtgctgaagagctgaaacatttgaaagaagtgctgcttgatcttttcagaggagaggtcgtagagaatctgaaccttgctggtgtggatcggatctatgtgtgcactgcaatctctcccactaccgtctacatgatgcactgtgctctccgtctaaaaaggtcaggtacatctattcctaggatggaactggtcgaagttggaccttcgatggatctggttgtaaggaggcacagacttccagctgaaagtttaaagaaagaagctatgaagaccgctgaacatgctaagaagatgaaaaacgtcactaaggatccagtgcagggcaagctgggcaaggtctacatgccagaccagcaggttggaaagttgaccttatcaaacgacataaagggactaaagagggagcgccgtgaagccaagaaaaaccaggactcaaagaagcaaaaggtcaaccccgagtaaagatcactgaagtttacctttgcattggatacaggtcaggttaagaaaccctggtttgtatctgttcccatctgctgtgttatccaattagaagttgctcgttgtcagattgtgttaaatagtttagggccatcttgttaggctaaagacatgtgtacgactttcacaacaatattgcgtaccaattcatgttaagacgtaagcatggaaaaatttgggagtgttatcctatcaaatatcttttgatgtctcaagcttggataaatgaggagggttacgataggcttggcgagccaacgttaaaggtagcaattctggagattgaaacataaaatacctaaagatttagccttgattaggaatgcatgaaaaacagctgtctatgttgatgtgtttgaatcttgactcgtggtttttcgtctcctgaaaaaaaataatctgtcctttacaacatgtcaacatcctctaaaatatccggtcctctatattttcttcatctccagcaacgacacttaaaagtt

SEQ ID NO: 215854 - DNA, 2078 bp, Zea Mays
atgggagaggccgtcaccgccgcggagctgctgtacggcatgccgttgatccggtcggtggccggggatggcgccggcgccggcgttgagaccgccggctgcggtgcgctgctcgtggagctcaagcaactgtggggggagatcgggaagagccgggaggagcgggagcggatggtgcgggagctggaggccgagtgcatgcgcgtgtaccgccgcaaggtcgacgaggccaccggcgagcgggccgctctgcaccagtcgctcgccgcgggggaggccgagatcgccgcgctcgccgccgcgctgggctccgacagcggccctcagctcaaggtacgcgccgtcgcgcgcgcggtctccttccttcaggtgaacaaatggaccatgtcgctgaccgagcgcgtgtcgtcggcaacagccctgctggaagagctgagggcggtgaaagcagagcggagcagacagttcgccgacgtccggtcagagatcgagaagatcaccgccgagatcgctgggaggagctacggctacgagggctccccccgggccagcgaggtgggagaacacgacctgacgatcaggaggctgaacgagtacagggcgcgcctcacgagcttccagaaggagaagtctgaccggctccacagggtcctggagcacgtgacggaggtgcactcgctgtgcgacgtgctcggcgaggacttcatcgcgatcgtgaacgaggtccacccggggctgcacgagacgtccgaccccggcaagcccaccagcatcagcgacagcacgctcgccaccctcgcccaggtcgtggcgacgctcgccgccgagaaagccaagcgagcgaccatgctgcgagaggccgtggtgcccttggtggagctgtgggagctgatggactcgtcggaggaggagcggcggagtttcaggaacgtggcggccgttctgaaccctgacaagctggatgctctgccctccggcgtcctgtcagtggcgacgataaagaagacggaggaggaggtggagaggctgacgaggctcaaggccggccggatgaaggagctcgtgctcaagaggcggctggagctggagagcatttgcaggagcatgcacgtggagcccgatgcgagcaccgtgccggagaaatccattgcgctgatcgactctggcctcgtgaacccttccgagctcatggccagcatcgacgaacagatagcgaaagccagggaggagctccagtccaggagagagatcatggagaagataaacaagtggctgctggcctgcgaggaagaggagtggctggaggagtacaatacggacgagaacagattcagtaccggcaggatcgcacgcctcaacttgaaacgcgcggagaaagcgaggcttatcatcaccaagattccggccgtgattgacagcctgatgagccgtacactcgcatgggagagcgaaagaaagaagccattcctgtacgacggggctcgcttggttgccgtcttggaggagcacaagcaagccaggctcaggcaggaagaggagaggaggcgactcaggaagaagctgcgcaccctgctgagcgagaaggaggcgatgccgcacctgaagcggcccggcagcagcttcggcagggcggccgagccctgcaaagtgaaccggaaacgggttgacgcgggcaggctcgcgtcctccggtggcagtggcaccaccagcggcagcagcagcagcagcggtggtggtgcgagtgcaaccgagctcatcaggccgcgttcctcggcggcgggctcgggacagtgcggcgagttcttcaagggcgtgaggcggctctcggcgccgccgttcaactacgtcgccgtgtccaagggccgcagcatgtcctcgtctctagctctgtcctaaactcgaaaccgcacaagtagcgaagacttgtcacgtgtgtgtatatagagtgccactgtaatttgtagccgtgttaccttttacacagatttttttggagggttattcgtctcaaaaaaattcctttgttattgttaaactatttcttgattagagaatttatgagtttatagtatctctac

SEQ ID NO: 215855 - DNA, 1137 bp, Zea Mays
tagaaaggtccctatagaaagccaagaagatcgaccacagactgatctgagctgcgggccgtcgtccaaggtcaaggagcaggtggcggcggcgccgacgggctccggcgacaggcaggggcaggggagaggcaagatcgagatcaagcgcatcgagaacacgacgaaccggcaggtgaccttctgcaagcgccgcaacggcctgctcaagaaggcgtacgagctctcggtgctctgcgacgccgaggtcgcgctcgtcgtcttctccagccgcggccgcctctacgagtacgccaacaacagtgtgaagtccaccattgagaggtacaagaaggccaacagtgactcctccaactctggcacagttgcagaagtcaatgcccagtactaccagcaggagtcctccaagctgcgacagatgatccacagcttgcaaaacgcaaacactaggaacatagtgggagattccatccacaccatgggcctcagggatcttaaacaaatggagggcaagctggagaaagccataatcaagattagagctagaaagaatgagctgctatacgctgaagttgactatatgcaaaaaagggagatggatctgcagactgacaacatgtacctgaggagcaagatcgctgagagtaatgaaacggggcagccggcgatgcacatgacgatgggagcgccgccgacgagcgagtacgaccacatggcccctttcgactcgagaaactttctgcaagtgagcatgcctcagcactactcccatcagctgcaacctacaaccctccagctcgggtaatcccaaacagcccttcagttaacaattgtctcagctccacactactgcacacacgcatgcagttatatcatgtgccaaatcgagatctcaagtaactctacgtacgtttgcttaattattaataattgtgattagtgcaactgttagggtatatatatttgtgagtgccaccactgtgtgcgtgcatttgtacgtgtgaatttagctgttgcatctactactattgtaccctccggccaggccatatcatcagaaacgcgggtttatttacgcatacttatatatatatgatttgtgtgctttatatagattgaaaagagtatgttggcctc

SEQ ID NO: 215856 - DNA, 3227 bp, Zea Mays
ctgccccctctcgaatcctacaccgagagagggggaactattttgcctcctctttgtagccagaaactatcccccaatttctcgagatttttttcagcgcatttctggaccttttggttgaatccactatatcgctctcgtcctttgcctccaccatgttgccaaatcggtgatttagggacatccaactttttgatcggagatctgcaacgttggaaacatcgagttatgtgatcaattggagacctatttgtttgaccctagcacgcaattctgagaaacatggtaacgacatcttcttctgcattgctaaagtttgcgaggacaattgtggcctctcgttgcattggtgaagtttgcatgtcgaagttttcgtgttttgaaatctcatattggcatgggttatcaagattgtaacacttcttgttcttcatcaacaatgtggtatgactatactatcttagcgcctcactaatgggaacttcataggaaaaataagattttgtagcgacctacatgtgaattggggtgtgttcagcttcccatggctgtgcaagcccattcaaggccacagaatgtttcgcggcaattatggcccgtgcttcaccatgccgtcagcgagtgctgcttgatcataatgctcgttacgactgctgtgttgtcatacatggccacaaggttcgcacgcatgtgcagcctccggtcaccatgtatgttatgttcgaggttggatcaatttctacatggcaaggcatggttctctgaagaactagtttgtgctacacacaggatagaaatatcacgtttgtcatattgccagagtcacaacaagcttgagcgctctgatgatatgtgtgataagtgcatgctttcttgcatgacctcaagtggcaagacctataacctgacaaacatgcatggtagggataaggtgaagtctcggtcgagatctaggcacaaacacatgtgctcctgttgttcgatgcagttcaagaagaaacgagattcacatatgctacctgacataacaaatagctggtttccaggtgacgatatgagcaaattaaaacaaagaaacatagtcatgtcaagtgttgggtattcttcaaatgacgactatgatcacttgccttatgaaggatatagaaaactaaagcttggccatgaatctgaatatgatattcacatctcaaatagtgataatgacgagagaaatgcagtatctcatgaagctagagaaagagccaatcacatgcctagtcatgatgcactgctgcaaccaatgatctctaatgccagcggcttgttgatgccttcttttgataatactattatgacaaaggccacacaaccactgaataatgtgagagatactgacactcactctagtgataccaaggatgcaaattctttggatcatgctattgggcttgttttggatgatatcagctggagtcaaatcaatacaagtgacaaaaatattgacgtacagtcgaaggctatccctgaagaagttttagcagagctcccaaaagagaaaagaagccctggtgttgaagctgcaaaggattttaatgcttctgcaaatgctggaacaagatcaagtgtagacactcatattagctggaacaacagcccaaaaattgcttctgcatgtagaggctattataaatctcctcgtttgtctgaaataatctcagcccgggacaccaattcaaaaacaaatgaagaagtcaagacatttctatcacaattgtctactgcacggggatttgatagctctttgaatgagatgacacctagaagtagcacacatattgatgactaccgacaacatgatgctactggtatgacaccatttcttgataggaacaactcaaatctagattcatttgatgccaacacaactagtgaagatgaaggtgaaagttctttggaacacttgaagaagcaggctaagtttaacaagaaaaaaatgggtatgctttataaggagctcgaggcagaacgaagtgcttcagcggtggcagtaagtgaagcaatggctatgatcaacaggttgcaagaggaaaaggcttcaatgcacatggaagcactgcagtatcttcggatgatggaagagcaggctgatcatgaccaggaagcaattgaaaagctaaatgacttgctaacagaaagggagaaagaattacttgacctagaagctgaacttgagggttaccggagcaagcttcatgatcaaccatttgatgttggaaaatttggtgctactgatggagctatggcattcagagtcttggaaggctcagatttcatgaggcataccatatttgattttgaagatgaaaaggcaaagattttggagtccttgcacagattggaggaaatcctaggcatgcccagcattgacatgggtgatgcaaatgattctctacagaacagtctactgagtgatcagtcaatgcacattagccaggatatagaaaattcagagttggaaagtttatcgttgcctcgagaggacatgattagtgaatcaatttcttcacagtgctatgatgagcaggaatctgttaaatacatgcataagcacatgcacaatcacgaacaagatgataatgaatccgttgataagcaacaaaagaatgtaacttcatgttcccactcagatgatggaaatattcatactatgaaaagtgttaaacatgaaatttctctccttaatgcaagattcaaggcacttgaagcagatcaggattttctcaagcaaatcctaagatctcttaatgttagcagtgatggagtagaatgtatccaggagataacaagccatttgcgagagctgcgaagaatcatggcagaccaaagggacatgacagtttttatgaggtcatgataattgattggtcactatgaagtttttgcatcgttgatgacgctactgctagctactgtgccatgatggcgaatttcatggtagcatgatgctcgaagatgtggcaaatggaaatggcagtgggagagcatcacccaggcgtgattctgcacagcatgggaactccaaaacatacatctcggggatctgacaagatccctaggcaccagtgataatttactaccgagaaatagatatttatatatattgtatgatctagttgttgtggtggttaactgctaggagctagtttgttaatgtaattaaaaatctctaggttttgttgagatca

SEQ ID NO: 215857 - DNA, 1762 bp, Zea Mays
gcctgctctcccagatacacctcgtgccgaaacccctcgcatcctggaaaaaaactctctctctccggaatcgtttggcctccagatcctagccaggtggcggcgatcgcgtgccgccggacgtcgtccgtttctggcgtctcgtgcaggaggcgcgccgccgccggcggcttgatcacgccgctggaggaacgccgatcgtccctgcctctgtttcgtcgcatccggcggctcacttagatggaactatcaaggatttccacagaaaaatttgatgatgcagttaaatccatgactgatgctggtttcttgaaggaaactgttgaacaagcactgaaaaaactgataatattatatgaggaaaactgggagcatatagaagctgataattattcgactttggttgaagctttacttggtcattcagatcccaaagcagggcagaaaaagcgagctgagaagaatctcaatgtggattcagaccattataataagaagctgaagattaaaggtggtcagacgcctagatctagtatgcatggcagtgccaagaaagagttgactgaagaggcagattcccttgaggagagaaccactggtaaccaattgcaaaccagtcgtgcagagactacaataactggtgaaaacagttgtactttacttgaaagtcaagacccttgcacctctgagaccccaacagtcatgtgtcctaaagttttagggtccaaccgtcacaatggcatcaaaagacagtaccatgatgtcaatgatataacaagaggcgaagaatgtgtgagcattccaatagtctgtggagaggatggggttcttcctcctccatttcactacatatcacaaaataccaccttccaagatgcctgtatcaacctctcacttgctagaattggagatgaaaattgctgttctggttgttttggggattgtctagcggagccacttccttgcgcttgtgcaagagaaactggcggagactttgcttatacgagagatggcctgcttaaagaaggatttctagatgcgtgtgtctcaatgctccgggaaccacttaaacaaccgcacttctactgtaagggtgtctgtcctattgagcaaataatgaagggagtcagctcagcgaaacctgatgcttgtaaagggcaccttattaagaagtttatcaaggaatgctggataaaatgcggctgcaccagaaattgtggaaaccgtgtggttcagcgaggcattactcgcaaactgcaggtgtttttagcttctcggaaaaagggatggggcttgcgttctgctgaaaatcttcctcgtggtgcttttgtatgcgagtatgttggtgaaatattaacaaacactgaactacataagcgaaacactgagctatatggaaaaaataataaaaaggctggtaaagcaaggcatacataccctgtgaatctcgatgctgactggggcactgaaggtgttctaaatgacgaggaagccctttgcctagatggtaccttttatgggaacgtggcgaggtttatgaaccataggtgcattgatggtaacatcatcgcaattcctgttgaagttgagacgcctgaccaccactactatcatctggcattcttcacaacgagggaagtagaggcttttgaagaattgacatgggactatggaattgattttgatgatgtcaaccatcctgtaaaagcattcaaatgccattgtggaagcacattttgtcggggaagataaaagacctatc

SEQ ID NO: 215858 - DNA, 1773 bp, Zea Mays
agatacacctcgtgccgaaacccctcgcatcctggaaaaaaactctctctctccggaatcgtttggcctccagatcctagccaggtggcggcgatcgcgtgccgccggacgtcgtccgtttctggcgtctcgtgcaggaggcgcgccgccgccggcggcttgatcacgccgctggaggaacgccgatcgtccctgcctctgtttcgtcgcatccggcggctcacttagttaggatggaactatcaaggatttccacagaaaaatttgatgatgcagttaaatccatgactgatgctggtttcttgaaggaaactgttgaacaagcactgaaaaaactgataatattatatgaggaaaactgggagcatatagaagctgataattattcgactttggttgaagctttacttggtcattcagatcccaaagcagggcagaaaaagcgagctgagaagaatctcaatgtggattcagaccattataataagaagctgaagattaaaggtggtcagacgcctagatctagtatgcatggcagtgccaagaaagagttgactgaagaggcagattcccttgaggagagaaccactggtaaccaattgcaaaccagtcgtgcagagactacaataactggtgaaaacagttgtactttacttgaaagtcaagacccttgcacctctgagaccccaacagtcatgtgtcctaaagttttagggtccaaccgtcacaatggcatcaaaagacagtaccatgatgtcaatgatataacaagaggcgaagaatgtgtgagcattccaatagtctgtggagaggatggggttcttcctcctccatttcactacatatcacaaaataccaccttccaagatgcctgtatcaacctctcacttgctagaattggagatgaaaattgctgttctggttgttttggggattgtctagcggagccacttccttgcgcttgtgcaagagaaactggcggagactttgcttatacgagagatggcctgcttaaagaaggatttctagatgcgtgtgtctcaatgctccgggaaccacttaaacaaccgcacttctactgtaagggtgtctgtcctattgagcaaataatgaagggagtcagctcagcgaaacctgatgcttgtaaagggcaccttattaagaagtttatcaaggaatgctggataaaatgcggctgcaccagaaattgtggaaaccgtgtggttcagcgaggcattactcgcaaactgcaggtgtttttagcttctcggaaaaagggatggggcttgcgttctgctgaaaatcttcctcgtggtgcttttgtatgcgagtatgttggtgaaatattaacaaacactgaactacataagcgaaacactgagctatatggaaaaaataataaaaaggctggtaaagcaaggcatacataccctgtgaatctcgatgctgactggggcactgaaggtgttctaaatgacgaggaagccctttgcctagatggtaccttttatgggaacgtggcgaggtttatgaaccataggtgcattgatggtaacatcatcgcaattcctgttgaagttgagacgcctgaccaccactactatcatctggcattcttcacaacgagggaagtagaggcttttgaagaattgacatgggactatggaattgattttgatgatgtcaaccatcctgtaaaagcattcaaatgccattgtggaagcacattttgtcggggaagataaaagacctatctcaggtaagtgtccgaag

SEQ ID NO: 215859 - DNA, 1676 bp, Zea Mays
agatacacctcgtgccgaaacccctcgcatcctggaaaaaaactctctctctccggaatcgtttggcctccagatcctagccaggtggcggcgatcgcgtgccgccggacgtcgtccgtttctggcgtctcgtgcaggaggcgcgccgccgccggcggcttgatcacgccgctggaggaacgccgatcgtccctgcctctgtttcgtcgcatccggcggctcacttagttaggatggaactatcaaggatttccacagaaaaatttgatgatgcagttaaatccatgactgatgctggtttcttgaaggaaactgttgaacaagcactgaaaaaactgataatattatatgaggaaaactgggagcatatagaagctgataattattcgactttggttgaagctttacttggtcattcagatcccaaagcagggcagaaaaagcgagctgagaagaatctcaatgtggattcagaccattataataagaagctgaagattaaaggtggtcagacgcctagatctagtatgcatggcagtgccaagaaagaggcatcaaaagacagtaccatgatgtcaatgatataacaagaggcgaagaatgtgtgagcattccaatagtctgtggagaggatggggttcttcctcctccatttcactacatatcacaaaataccaccttccaagatgcctgtatcaacctctcacttgctagaattggagatgaaaattgctgttctggttgttttggggattgtctagcggagccacttccttgcgcttgtgcaagagaaactggcggagactttgcttatacgagagatggcctgcttaaagaaggatttctagatgcgtgtgtctcaatgctccgggaaccacttaaacaaccgcacttctactgtaagggtgtctgtcctattgagcaaataatgaagggagtcagctcagcgaaacctgatgcttgtaaagggcaccttattaagaagtttatcaaggaatgctggataaaatgcggctgcaccagaaattgtggaaaccgtgtggttcagcgaggcattactcgcaaactgcaggtgtttttagcttctcggaaaaagggatggggcttgcgttctgctgaaaatcttcctcgtggtgcttttgtatgcgagtatgttggtgaaatattaacaaacactgaactacataagcgaaacactgagctatatggaaaaaataataaaaaggctggtaaagcaaggcatacataccctgtgaatctcgatgctgactggggcactgaaggtgttctaaatgacgaggaagccctttgcctagatggtaccttttatgggaacgtggcgaggtttatgaaccataggtgcattgatggtaacatcatcgcaattcctgttgaagttgagacgcctgaccaccactactatcatctggcattcttcacaacgagggaagtagaggcttttgaagaattgacatgggactatggaattgattttgatgatgtcaaccatcctgtaaaagcattcaaatgccattgtggaagcacattttgtcggggaagataaaagacctatctcaggaggatgtaaatctctggtgttgtcctgagaatattcaaggctcgtggcgggttcttttggaccatcctacttattgcaatgctttgcgtgctaaaag

SEQ ID NO: 215860 - DNA, 2332 bp, Zea Mays
ggctagtactagcaagcagtagtggtgtcgcatctgccgatctcctctgtccgagtcactcactcgtaggtggcttccacccatctccctcagcaccccgactgaggaggcggccggcgctccccaggcacgcacgagttgacgggtccagcagcggcctcgggatcttgccgccagctgcagcggcaatccggtccgtccgcccaggcttccgtggatatacatatactggtctgagttgtcaagtccttgacctgatcatatcagttttgcttataaggatgggggtttacctcagtactccaaaaactgacaagctatctgaaaatggagaaaatgatagacttaagtttggtctttcatctatgcaaggatggcgagcaaccatggaagatgctcattcagcattgctagatcttgatagcgagacagcattctttggtgtttttgatggtcatggaggaagagtcgttgccaaattctgtgcaaaatatctgcatggtcaagtcctcaaaagcgaagcctattcaactggtgacctaggcactgctgtccatagagctttcttcagaatggatgaaatgatgcaaggacagagaggttggcgagaactatctgcacttggagacaaaataaacaagtttagtggtatgatagaaggattgatttggtctccaaggggcagtgattcaaataatcaacaagatgattgggcttcagaggagggacctcactctgactttgctgggccaacatgtgggagtacagcgtgtgtagcattaataagaaacacccaacttgttgtggcaaatgctggtgattcccgatgtgttatttcaaggggtgggaaggcatacaatttatcgagggaccacaaaccagagcttgcagctgagagagaaaggataatgaaagcagggggcttcatccatatgggacgagtaaatggaagtttaaacttgtcaagggcaattggagacgtggaattgaaacagaacaaattcctgcctcccgagaagcaaattgtgacggccaatcctgatatcaatgtcgtggagctctgcgatgatgacgactttgttgttgtagcatgtgatggcatttgggactgcatgtcaagccaacagctggtggattttatccacgagcgtataaacacggagagcagcctgtctgccgtgtgcgagagagtgctggacagatgcctggctccatcaacgatcgctggagacgggtgcgacaacatgaccatgatcctggtgcagttcaaaaaacctgtcgatcggaacaagaaggccgaagcagcagggcaatctgccagcaatgtggacgaagccaagagtcggtaatagaatgaacatagagggcgctttctgtttgccgtgttccacaaggaagagagcaagttatagacctttccgagtgtacagtttatttggagggaagaaggataaagatgagaatggtgatgaggcgccatcgaaagcaggaatttttggaaatatgcaaaatctctatgaaactgttaagaaggcccaaatggttgtccaagttgaggctgtccgggtgcaaaaggagcttgcagcgactgagattgatggttattgtgaaggcgaactaatcaaggttacactttctggaaaccagcaacctattagagttgaaatcacagaagctgcgatggagttgggtgctgaaaaactttccgggttggtcaacgatgcttacaaggatgcacaccaacggagcgtccaggccatgaaagagaggatggctgacttggcgcagagcctgggaatgcctgcgggcctcggcgatggtctcaagtgatgccgcaattcgggaaagctttccaataatcctttttcctcaattttgtatgctagccgtgtgagtagtaagcataacccctccgcgacctctcataagaagtgtacttgtgagcacttgttttctttcagctttagctgccatttgctgttctgcgcacgcagatatttgcacattaacttcacgtctggtctacaaagttgcaagatgcgggccatgatcttttgggcatttttccaacaagttgttgggctggcccagttgtagcccttcgaagatgagacaaccaagcccatatatataacacacaccgaaagccttcagaatctgtcgtgtgtgaccaaggataaatcatggctttggtgaacagtgatttaacagcaaataaaacactaagtgggtgttcggtttgaggaatcactctatccaaaatgtggtggtgtatcatgggtcaattcctcaaatttggtgggatgacctattccttatattagtactaact

SEQ ID NO: 215861 - DNA, 5811 bp, Zea Mays
aagcggccagacgagtgagaagggggcagcggcacgcagccggaaagtgaggcaggcgtggtgaagggcagggggaggcttgcaccgcagagaagccagaggagcgttagtagtagaagagcagagagggagagggaggaagagccacgcgacgagagccgaggagccatccaccgcccgcctaatccttgttcgctgctagattcgccagaccaccgaggcgctgctccccggatctacggggcggcgtcggtgctcatcggaatccagagaggtggcggttgtttgccggggatcggcgccgcatgtctcagatctgagatggacaggatccgggacggcaggaggggcggggtgtcggtcggaggcgttccgccgccgccgcctccgaggaggcgcctcaggagcaacggcggagggggccccagggactcgcctcgctccgagcgccgacggggcgagcgcctcatgctcaacggcgggggtggctgcgccagtcgggacgacggcgacgacatctccgacgagagcctcggcgacgacgacgacgacgccgagcaggagctcgtgccgcggtaccaccagcagcggcggtcaccgagcacggcgccacctccttcctcgccacctccgcccggcggtggccaccacagcagtagtagcagcggtggcgggggttatcacaaccaccatcacggccagcaccaccagatgcagtggaagggcggctccaatcccatcgtgtccaaggctgtagacgagatgattggtgtccctgttccgaggaaagcacgctccgcttcaacgaaacgttcttcgcatgagtggcctgtccccggcggcggaaccagtggaggcagcaccggcgcaggagacggctcgcagattcaacggcctttgtcacggccaatctctccagcgtcagcctccactaccgtcccggctcggaagaagcttaaaccacttggaggtgggagcagcggtggtccaggacaagcgtcaaagcagcgaccatcaccgtcgccagctccatcaacaaccccgccacaaccaccgccaccgaagatgtcgaagtcgccgtctttcattcaagaggaaatcgaggttgccgaggtgctgttcggactcaccaggcagttctcgtgccctcccaaacaagaggtcaaccacaagctcgatcccagagatgtgccagagtccaagtgtgggaactcttcgtcggccccctcttctggcgcccgaccctctgattccacctccctttccgctatagcgccaaagaggaagaaaccacggctggcgaagtacgatgaagatagccgtccggcgagcccaacgaagccagagttggtggagccgtcctcaaagccggagccacctcctgtggctagatcagaagcaaagatggcaacgtcggcagcaaccgaaagtggcaccagcaccgcacctgcggctgttcaactcgagactttacgaaagccagagaagacggaggactcagagctccgtccaagcgaaccagatcggcgaaatcacagcctggagagccaggcggagctgccggcgtcgttgccggcgccttcagtcaagccggatgctgaagcaaagccggtaggatccgaggccaggaacggcgaagctactgcgacgacaaagattgagctggcatccgatggcgctcggcatgacaagttttccattgatctcatggctccccctcctgggaagctgtctgatgatatagatgcctcctccgaccctgatgcagataagaagggattggattctgagatggacatgttggggagaggaaattcggaaaagaaggatggtgaaaggactctgggagggctggatattgatttggaggaccagaaggtgcaaagaattccagccgatgagtccacgcccaagaagctcacactgcagttggatttggagaagcccagtcttggtgatgaaaaatcaccatcacagcgacggcagccgcatcaacatccacaacaattgcagcagctgaagccctcaaaagctgagataaagcacgagaaatctgctatgcctgctgttacaccacctatacctatacccgttggaggttggcttgggaatttcccaccgtttggttaccttagtccagtcccaggcctatcaggagctggtcttcatcatcccatggacgtgaagccagggtcttctagtggattacagcatgctgcattgcttccaccgccaacacgctcaaagagatgtgctacacattgctacattgcgcaatttatccagcaccagcagcgggttgcaaagatgaactccttctggccgccagctgttgcagcggcagccgccgccgccaacagatcagggccactctttggtgcaaggccattcagcatgggtgttgtgccaccgacagatgctgcctctatgcttgtgaacccaatgcaggggagctaccccatcagggctcacactccaatgcaagaagcaaaggctcctatggctacttcattccaggggagtctctcgaaggataaagcactgggcaatgctgctggtcctgaatcaagccagaggaaacaaccgcctgctcatgaaacacagcagtccactcccatgccaaacatgctgcaagccctggcattcatctttccattcaatcagcaacatgctatggtggcagctgcaaatgctgccaatcgagcaggggatgcaaaatcatctggagccagcaatgcaatgccgccatctgccagtgctcacactttggcagcaaactctggtgccacggccatgaacttgagctttgccaacttgcaaccggctgatgcccagttcttggcgatcttacagaatggataccaattccaggttgctgctcatcctggagggcctccatatcgaggcatggcaccaccaggcccagctgttccattcatcaatggacatgtgtattcctctcccatgctgcacccatcacagcagcaaggtgcgcaaccacaaagtcatcagaagacccagctgccaaacttgcccagttcatcacagaagcaccagccacaacattcccaagggctattgggatatgcaccaaatgctaacgcagcagcagctgctagtaattcgcacaattattcaagtggaaatcagcgccctgtccttgcgcaccgacaggagagtgacaaaactggagaagatggtctatcgagtgatgacaagccatcccactctcagaagagcgggtatgaacacaattttgctgttccagtccatctaccgaattttgcaatgatgccagctgctcaacctgctggcagtcagagtgagaagaagttaagtgaccatcaccaccagcagcagcagccacaagtcagtcgtggccagggtgtgaggattgatcttgcgtcttctcagccttttgtgatgccctttggctccattggtcctcctggatctgccccatctggtctcgacttctcggcattggcgcagagccatgcatttttacagagccatcaagaagcagcccggcatggttatcctcaacttaattttgctgcagctcaatctacgcagcacaagccccagcatggagaaacaaaatctgtcgctggggattcatccttgacacacattgccggagacagccagagaaagaaatcaacttctacaaagtattctggtgattcacagcagcattcgctgtccttcaccaggacagaaagcaagaatcatgtgcctcctttccttagtggcagcacaaatgaaagttcgtcccgaaccctaagccttattggaacagaatcttcaaatacatttatgggaagcaaatccacaaattccaccactcctgcctcaacaccacctgcagcttcgtctagcatttctcagcagcaccagcatttccttcagatgcaagtgcagcataagcatcagcatcagcagatgattcagcaccaccatttgaatcggcctagatctgccgcaccaagtacacaaaatagtgcaggtgggtacccagaccgtctcaatatggcgagctttcagaatatgatgtacccaccaaatgctgcccaaggccaagggagagttcaatccccccagttgaaggcatcctcagggagagggacaccttcatctactgctaccactccccctgctgctgcaccccctaatttgattgtgatgaagacaagtagtctccacccgcaacaagcaaagattcctatgcaggctctctccactcctggtcaccaatcccagagttctctaagcatgagttcatcaaaaatggctcctgtaactaacctttctactggaggaggggatctatctcgatcttcaaatgcccctgttgcttctggttcaccatccaattcggtgtccaaaagcactggtggcagcccgcctgccacaggaaatgcaaagggtgttcagcagcctgtccaattgccatcaccacaacagcagttagccaagaactctgtgtcgacgtgtggctccaagtctactcctgcaaaccatttcagtatggctatgccatctatccttggccaacagcctaattcatcgcctggttctaataccgggagcaagcagcagtcacatatgtcatcgtcaatgaaacagcagccgttccctcaaggccatttcttcatatccagcacgtatgctcctcaggctccaggagccggcggtgctgctgcccttggcctataccagaagcgaccaggcgacaagacacagccacaggcaccacaccagcagaacgccttgtcagccgctgctggcagtaacatgaaatcgcttcatccttcgtccggtggatttatgcatctcgcagcggcaacccagtctgcaggtggtggcatgccacacacccacatgcccgcggcgcaactgagtttcggaacaatgccggtgcctttaaaaccctcaagcgaccagaagcccgctgctggaaaataaacagagcccaggtgaccatgcgtcggagtggtaatctgagctggcgagctcaagtgcttatccagcggaagccccaaatggaggaggaaagatacaatgagaagagaaaagcaggccacagctcgaagaacctgcttttggttgctgctgtggtgatcaggaagggggaggaggggcactgcgaggacacgccttgctaacttaaaaggttgttcgggtctgggaatggctgatgtgagtgaatacttttgtgtagttttggctggttatccatcctcccatcccatggtgtaaaggtcggaggagtgcatagaatctgtctcgtagccccgttttttgtgcatggatggatgtcgaaggctgttctctccctctattctcttgtagcttctccagttcctcgtttcttttgggtggggggtctcagctttaaccggaggaggaaagattcaatcagaatgcagatctcagtaccagcaagaagaggagaaaacaaaatctattccaactagaatagggtccagccatgattggtgtgggtggcatacagtgacatgcgtctgggtttgttgttgtaagtagctcttgtgggtggggggggggggggggaggaaatgaatgaatggaattgcctgattatggatgctgtacctgtggccccctgcgacgacagatcattcgcctctgcctctcaatgttgtgatgatgactgtgcagccctcgtccggagatgaaagtggggacagtgcatgtggaggggggagtctagcagctccatcacttgtgtttgatatttctgtgcgtgtgtggatgggcaagatgccgtgctcgtaccagaggaag

SEQ ID NO: 215862 - DNA, 5822 bp, Zea Mays
aagcggccagacgagtgagaagggggcagcggcacgcagccggaaagtgaggcaggcgtggtgaagggcagggggaggcttgcaccgcagagaagccagaggagcgttagtagtagaagagcagagagggagagggaggaagagccacgcgacgagagccgaggagccatccaccgcccgcctaatccttgttcgctgctagattcgccagaccaccgaggcgctgctccccggatctacggggcggcgtcggtgctcatcggaatccagagaggtggcggttgtttgccggggatcggcgccgcatgtctcagatctgagatggacaggatccgggacggcaggaggggcggggtgtcggtcggaggcgttccgccgccgccgcctccgaggaggcgcctcaggagcaacggcggagggggccccagggactcgcctcgctccgagcgccgacggggcgagcgcctcatgctcaacggcgggggtggctgcgccagtcgggacgacggcgacgacatctccgacgagagcctcggcgacgacgacgacgacgccgagcaggagctcgtgccgcggtaccaccagcagcggcggtcaccgagcacggcgccacctccttcctcgccacctccgcccggcggtggccaccacagcagtagtagcagcggtggcgggggttatcacaaccaccatcacggccagcaccaccagatgcagtggaagggcggctccaatcccatcgtgtccaaggctgtagacgagatgattggtgtccctgttccgaggaaagcacgctccgcttcaacgaaacgttcttcgcatgagtggcctgtccccggcggcggaaccagtggaggcagcaccggcgcaggagacggctcgcagattcaacggcctttgtcacggccaatctctccagcgtcagcctccactaccgtcccggctcggaagaagcttaaaccacttggaggtgggagcagcggtggtccaggacaagcgtcaaagcagcgaccatcaccgtcgccagctccatcaacaaccccgccacaaccaccgccaccgaagatgtcgaagtcgccgtctttcattcaagaggaaatcgaggttgccgaggtgctgttcggactcaccaggcagttctcgtgccctcccaaacaagaggtcaaccacaagctcgatcccagagatgtgccagagtccaagtgtgggaactcttcgtcggccccctcttctggcgcccgaccctctgattccacctccctttccgctatagcgccaaagaggaagaaaccacggctggcgaagtacgatgaagatagccgtccggcgagcccaacgaagccagagttggtggagccgtcctcaaagccggagccacctcctgtggctagatcagaagcaaagatggcaacgtcggcagcaaccgaaagtggcaccagcaccgcacctgcggctgttcaactcgagactttacgaaagccagagaagacggaggactcagagctccgtccaagcgaaccagatcggcgaaatcacagcctggagagccaggcggagctgccggcgtcgttgccggcgccttcagtcaagccggatgctgaagcaaagccggctccccctcctgggaagctgtctgatgatatagatgcctcctccgaccctgatgcagataagaagggattggattctgagatggacatgttggggagaggaaattcggaaaagaaggatggtgaaaggactctgggagggctggatattgatttggaggaccagaaggtgcaaagaattccagccgatgagtccacgcccaagaagctcacactgcagttggatttggagaagcccagtcttggtgatgaaaaatcaccatcacagcgacggcagccgcatcaacatccacaacaattgcagcagctgaagccctcaaaagctgagataaagcacgagaaatctgctatgcctgctgttacaccacctatacctatacccgttggaggttggcttgggaatttcccaccgtttggtgggttggtttctgaaggtgctgttttgtgtcttggcagttaccttagtccagtcccaggcctatcaggagctggtcttcatcatcccatggacgtgaagccagggtcttctagtggattacagcatgctgcattgcttccaccgccaacacgctcaaagagatgtgctacacattgctacattgcgcaatttatccagcaccagcagcgggttgcaaagatgaactccttctggccgccagctgttgcagcggcagccgccgccgccaacagatcagggccactctttggtgcaaggccattcagcatgggtgttgtgccaccgacagatgctgcctctatgcttgtgaacccaatgcaggggagctaccccatcagggctcacactccaatgcaagaagcaaaggctcctatggctacttcattccaggggagtctctcgaaggataaagcactgggcaatgctgctggtcctgaatcaagccagaggaaacaaccgcctgctcatgaaacacagcagtccactcccatgccaaacatgctgcaagccctggcattcatctttccattcaatcagcaacatgctatggtggcagctgcaaatgctgccaatcgagcaggggatgcaaaatcatctggagccagcaatgcaatgccgccatctgccagtgctcacactttggcagcaaactctggtgccacggccatgaacttgagctttgccaacttgcaaccggctgatgcccagttcttggcgatcttacagaatggataccaattccaggttgctgctcatcctggagggcctccatatcgaggcatggcaccaccaggcccagctgttccattcatcaatggacatgtgtattcctctcccatgctgcacccatcacagcagcaaggtgcgcaaccacaaagtcatcagaagacccagctgccaaacttgcccagttcatcacagaagcaccagccacaacattcccaagggctattgggatatgcaccaaatgctaacgcagcagcagctgctagtaattcgcacaattattcaagtggaaatcagcgccctgtccttgcgcaccgacaggagagtgacaaaactggagaagatggtctatcgagtgatgacaagccatcccactctcagaagagcgggtatgaacacaattttgctgttccagtccatctaccgaattttgcaatgatgccagctgctcaacctgctggcagtcagagtgagaagaagttaagtgaccatcaccaccagcagcagcagccacaagtcagtcgtggccagggtgtgaggattgatcttgcgtcttctcagccttttgtgatgccctttggctccattggtcctcctggatctgccccatctggtctcgacttctcggcattggcgcagagccatgcatttttacagagccatcaagaagcagcccggcatggttatcctcaacttaattttgctgcagctcaatctacgcagcacaagccccagcatggagaaacaaaatctgtcgctggggattcatccttgacacacattgccggagacagccagagaaagaaatcaacttctacaaagtattctggtgattcacagcagcattcgctgtccttcaccaggacagaaagcaagaatcatgtgcctcctttccttagtggcagcacaaatgaaagttcgtcccgaaccctaagccttattggaacagaatcttcaaatacatttatgggaagcaaatccacaaattccaccactcctgcctcaacaccacctgcagcttcgtctagcatttctcagcagcaccagcatttccttcagatgcaagtgcagcataagcatcagcatcagcagatgattcagcaccaccatttgaatcggcctagatctgccgcaccaagtacacaaaatagtgcaggtgggtacccagaccgtctcaatatggcgagctttcagaatatgatgtacccaccaaatgctgcccaaggccaagggagagttcaatccccccagttgaaggcatcctcagggagagggacaccttcatctactgctaccactccccctgctgctgcaccccctaatttgattgtgatgaagacaagtagtctccacccgcaacaagcaaagattcctatgcaggctctctccactcctggtcaccaatcccagagttctctaagcatgagttcatcaaaaatggctcctgtaactaacctttctactggaggaggggatctatctcgatcttcaaatgcccctgttgcttctggttcaccatccaattcggtgtccaaaagcactggtggcagcccgcctgccacaggaaatgcaaagggtgttcagcagcctgtccaattgccatcaccacaacagcagttagccaagaactctgtgtcgacgtgtggctccaagtctactcctgcaaaccatttcagtatggctatgccatctatccttggccaacagcctaattcatcgcctggttctaataccgggagcaagcagcagtcacatatgtcatcgtcaatgaaacagcagccgttccctcaaggccatttcttcatatccagcacgtatgctcctcaggctccaggagccggcggtgctgctgcccttggcctataccagaagcgaccaggcgacaagacacagccacaggcaccacaccagcagaacgccttgtcagccgctgctggcagtaacatgaaatcgcttcatccttcgtccggtggatttatgcatctcgcagcggcaacccagtctgcaggtggtggcatgccacacacccacatgcccgcggcgcaactgagtttcggaacaatgccggtgcctttaaaaccctcaagcgaccagaagcccgctgctggaaaataaacagagcccaggtgaccatgcgtcggagtggtaatctgagctggcgagctcaagtgcttatccagcggaagccccaaatggaggaggaaagatacaatgagaagagaaaagcaggccacagctcgaagaacctgcttttggttgctgctgtggtgatcaggaagggggaggaggggcactgcgaggacacgccttgctaacttaaaaggttgttcgggtctgggaatggctgatgtgagtgaatacttttgtgtagttttggctggttatccatcctcccatcccatggtgtaaaggtcggaggagtgcatagaatctgtctcgtagccccgttttttgtgcatggatggatgtcgaaggctgttctctccctctattctcttgtagcttctccagttcctcgtttcttttgggtggggggtctcagctttaaccggaggaggaaagattcaatcagaatgcagatctcaggtaactttgttatgcaactgatgctcccattacacactgtctgtcgatacactctgactggattgttttagtaccagcaagaagaggagaaaacaaaatctattccaactagaatagggtccagccatgattggtgtgggtggcatacagtgacatgcgtctgggtttgttgttgtaagtagctcttgtgggtggggggggggggggggaggaaatgaatgaatggaattgcctgattatggatgctgtacctgtggccccctgcgacgacagatcattcgcctctgcctctcaatgttgtgatgatgactgtgcagccctcgtccggagatgaaagtggggacagtgcatgtggaggggggagtctagcagctccatcacttgtgtttgatatttctgtgcgtgtgtggatgggcaagatgccgtgctcgtaccagaggaag

SEQ ID NO: 215863 - DNA, 2821 bp, Zea Mays
cgcaattcttaaaccatgggcgagtcgtgtgtggtttggctagttttccatccatcatgaaactgaagcgaaccacagcacacaagcgatgagcaaacccagcaaagctggtggtggaagcacaagataactgaaggcaggaattaatgggagggaaattccacattgcaaggatgaacaccttccatctttgcagccgcatgcattcggatccccgctcctccccaaatcccccttggccctgcaataaatctcacctccccctcgcactcgctgcattgctcttcgcccggaaatcgtctcgcttacttcgttccttctctgcctctgttgctccccagaggttcttggctggaaaacattgcagcaggagaagagatggacgcagacaccttcccagtggggctgcgcgtgctcgccgtcgacgatgaccgcgtctgcctcaagatcctagagaggcagctgaagtgttgcaactacaacacgacggtggtgacggatgcccagacggcgctggacatgctcagggagaggaaggacgggaaccagttcgacctggtgatcagcgacgtcgtcatgaccaaaatggacggcttcaagctcctcgagctcatcggcctggagatggatctcccagtcatcatgctatccgcaaacagcgagacacagactataatgaaaggtataaagcatggggcctgtgattatatggtaaagccagtgcgcctcgaacagcttaggggcatatggacacatgtggtgaagaacagtaagattgatccaaggaacaacatcggcagtgacagtgatgatgttgttcagaagttgccatctggggatggtgataaaggtgagaaggttggagaaacccgccaaaagaagtatccaaagaaaaacaaaaagactgtggatgttgctgatgaggataacgaaaaaacatcagcccagaagaagcaaagggtccaatggtgtggtgaactacatcagaagtttgtacaagctgtccgtcagattggcattgatagggctgttcctaagaaaatattagaaatcatggatgtggaaggccttactagagagaatgtcgccagtcatctgcagaagtaccgaatctaccttagaaagctcggtgatggcacactgaggagttctagtccatttgctgatgaaactgaagcatttcggagaaacatgaatgtcccatccttcattagctcttcgagctcaagcaaccattttgcaaagatgaattcctcatcactaattggaacggagacattgctacccacagagtcagtttatatcatgagcccccagaaaaacttgggcatttctcggtcaaacatggaaccagttagccatggtgttaacttacccaaagatgttattcctatgccagtgcaggatattagcagattcatttcttctggcaagtcctatgcacctgtatggagtgatgggctgctaggtagaagccagtgcttcccttctggtccttctggcagctcctttgcaaatatttcaaatagtgtggtgttgaacgcaagcaaacctttctctgttgatatttctgggagatcattagcaaatggctcaaatgacaggccaccattgacctcgaacatgtgcttttcttcgtctcattcttgcagctcctatgcgagcatattgggtggcaagattttgggatcaagcagacgtattcctttcgaagacatagcagatggtgagatgttggctcctggtaatttaccattgcagtctcctcagttggtgaaacagccttcttctgctggcctatttaacgaggttgccagagacgttcaccaatttgcaggacttagcaactcctggaaagttgctgtgccgccaaggttttctgatcttggtcataatgttggaacatctgaaggtcattcgcagggtaacattttcaagatcaaccggttgtcaagacttgcacgctcctctgcacagattccaacgttcagaaatgagtatcagaagaaaaccacaggaatcatggggaaagccgtaccagtggtgctgaatggcggtggtgcaaatgacaacctccatggagttagcaccgttaatcagcaagctgttaatgaccaagtgaataacgaattcttcatgggaacaaatgaggcacataatgcggagagtgatgatttggatgatttccttgcgtacttagttaatcaagatttcatcaacaatggtgattctttcattgacagggactgagaatctgccccttgactctggaagagagatgctgctgaccaattcatggttcttgcatgttgtatgaacaaatttgcactgtttgtagtaggctagctaggagcaggccatcttggatggaatccccatgtttctctagtgtagtcatgctggttctcttatgtatcagttgtagcttttaacctgtggtgttcagtttggtgggaggtgtgggtgccacccctgccaaactcagaactatgtgttcctctttggcttgaattttggtggtcacttttagttttatgtaaaacaacctactctctcatagtccttcggatgcatggggatcataaaggattgaggaggattaaatctcttcctattcaaaattaagtaggaaggaatttaatccactccaatccctctcaatccacccctaaccgaacaaggccttaggggtcttttgttaagtgtgatcatagacaaagttatgtcagttagatccagtggtatgattttcatgaactatttgaactgttgtatttcatcagttttgaatcaatgaaatgctgctatctcttgaaattat

SEQ ID NO: 215864 - DNA, 2199 bp, Zea Mays
ctaaattctaaactagtcggcgcctacggtctcgccggctccagggccagggcgtgcggctgagaaggcagggctcgccggcttcggacgacgtgtgtgtgcggcagcaggccggccggcagagctcggattcccggccggtgctgcagcagtgcatgtgcctcctgatccaccgcgcctaacgccgagcaagatgagatcagttcttttcttcgtgtgcatttgcttcctgttcgtgtcgacggcgagggcggaaggcccctaccagttcttcgattgggagatcacgtacggcagtatcagccctattggatctctacaacagggaatcctcatcaacgggcagttccccgggccgaagatcgagtgccaaacaaacgagaacctgatcattaacgtccgcaacaagttgcctgatccgttcttgctctcatggaacggtctgcagcaacgcaagaattcatggcaggacggcgtttctggcaccaactgcccgatcccgccgggccacaacttcacgtaccgcatgcaggccaaggaccagatcggtagcttcttctacttcccgtccttggccctccacaaggccgccggtggcttcggcgctatccgcatcgacagccgaccgatggtccccgtcccgttcccgccgccggccggcgagtacgcggtgctcatcggtgactggtacaccaccaatcacaagcggaaaggaattgcctcgccctgatggcgtcttgatcaacggcaagggtggtgcggacgttgtagatttcgccgtcgagcaaggaaagacgtacaggctgcgcatctcaaatgttgggctgcagaacacactgaacatccagatccaagggcacaagatgacgctggtcgaggtggagggcacgcacacggtgcagaacgcctacgcctccctcgacgtccacgtcggccagtcgctctcggtgctgttcaccgccaaccgccccgccaaggactaccgcatcgtcgtctccacccgcttcaccaacgccacccgcctcctctccaccgccgtcgtccgctacgccggctccagtggccctgctcccgggccactgcccgctgggcccggcgacgacgttgacttctccctcaaccaggcccgttccatcaggacgaacctgacggcgagcgggccgaggccgaacccgcagggctcctaccgctacggctccatcaacgtgacccgcaccatccggctggccagctcggccgggctggtccgcggcaggcgccggtacgcggtgaacggcgtctcgttcgcggaggccgacacgccgctcaagctggcggatcactacaacatcagcggcgtgttccggctcggcggcatccccgacgcgccgccgccggccaccgcggaggaggtgaggaacgagacggcggtcatggactcggaccaccgctccttcgtcgaggtcgtgctcgagaacggcgagggcggcggcgtccagagctggcacctcgacggctacagcgtgttcgtcgtcggaatggacgtggggacgtggagcaagaagagcagggatggctacaaccttgtggacgctgtctcgcgctgtaccgtgcaagtgtacccgagagggtggacggcggttctggtcgcgctggacaacgtgggcatgtggaacatgaggtcggaggtgtgggcgcgcaggtacctgggccagcagttctacctccgcgtgtacacgccgtcgcactcgttccgcgacgagctgcccatcccggacaacgcactcctctgcggccgcgccgccggccgtcaccacagccagtagccgccgccaacccctgccgcggcggtactagcacaggccacaggagcagcacgcagctgtatggtcgtctagtgtctaaaaggaaacccaacatataaacattttatataacattttatttgttagttggattattcttgttcttctctcatttgataacctgctaaattggatcccaaccaaattttggacgagtgccactgttatacgttgttcaaggctgaaatatacacaaattcgtgttgcccgtcactatcatcaaccgtgaagtgtgtcaatcccagatcgatcggccgccgtccacatatagactgatatatcaacatgcctgctggcttgctgttgtaaaagaaaaggttcaattccacgacatatggtcgttgggcttcttgat

SEQ ID NO: 215865 - DNA, 718 bp, Zea Mays
ctacatgatcatttgataatactgataacattcctcgtcgcagaagcttgtctcataggaggatcggtgaggaatgcaaagcacaccaagtatttaggctactacatgaagcatgatttggtgtcgtgcgccgcccttcgcaagggagtctttgcagcagctgctgcaatgatgatcatcaacctcctggcgtccctggtgtactactggagttactcaaaagctgcgacgggtgggttcatgaagcaccaaaatgaggttggtgtgggcatgacggattacggccttgacaagggtgtttctgggccctgagtgagatggaatcttattggcctctgtgcggtattaatactatcgtcgaaatgtatgtggatgaagttgagttgtttctctacggtgtgctgtgaatgatataccataactgtacaatggcatgggtggtgatattgtagggttcgtgctgtgaaaaatgcggtagcactagttgtgtttggtgtgctgcacgagcacgacaccgacttcttcctgctcgctgctggcggtggttgttcgcaacacaaatgcgggacttcaatgttcttggctgtcattaaattatgcaaggtggtactgtactgattttgcactaaaatggcatctgttaggcctgcaggcgaggcccggctgcatctttattcgccacatatagttttcttttgggacaattgcatggttgccc

SEQ ID NO: 215866 - DNA, 2597 bp, Zea Mays
gtgggcccatggcacagacggcttacagagatccctaccccacattccagagactactggaacgccaccatggccgacaccgaacagccgcgccatgtttcacacatcgggagcacttcgtcaacaatccaacggtccatgattattacggcccacatgtcatagaaccctctggcgccctctcgccgcttcgtcacctgtcccgtcgcttgtttcctctcgtttccacggccttctagactcccggcgaacactccactccgccttcttatgcgcatcccctccgcttccgaagcacacagttcaaccagaaaaactagccgaagcaaacccattccacaagcacctggtgggatcatctcatcatcagaaacaaagagagagattccgtgcccacttgttgtagtagattgtgaggattgaggagtagcaaagagaagcagccatgaatccggacaacttcacccacaagacgaacgaggcgatcgtgggggcgcacgagattgcggtggaggccggccacgcgcagctcacgccgctgcacctggccgcagtgctggctgcggacaagggcggcatcctgcggcaggccatcacgggggcgtcggggggcgacggagcggccggggactcgttcgagcgcgtgctgaacaactcgctcaagaagctgccgtcgcagtccccgccgccggactccgtcccggcgtccacggcactgatcaaggtcatccgccgggcgcagtccgcgcagaaaaaacgcggggactctcacctcgccgtcgaccagctgctgctcggcctgctcgaggactcgcagatctccgactgcctcaaggaggccggcgtgtccgcggcgcgggtgcgcgccgagcttgagaagctccgcggcggggaggggcgccgcgtggagtccgcgtcgggggacactaacttccaggcgctcaagacatacggccgggacctcgtcgagcaggccgggaagcttgatcccgtcatcggccgcgacgaggagatccgccgcgtggtgcgcatcctctcgcgccgcactaagaacaaccccgtcctcatcggcgagcccggcgttggcaagacggccgtcgtggagggcctcgcgcagcgcatcgttcgcggcgacgtgcccagtaacctcctcgacgtccgcctcatcgcgctcgacatgggcgcgcttgtcgcgggcgccaagtaccgcggcgagttcgaggagcggctcaaggccgtgctcaaggaggtggaagaggccgaggggaaggtcattctcttcatcgacgagatacacctcgtcctgggcgcgggcaggacggagggttccatggacgcggccaacctgttcaagccaatgctggcgaggggacagctcaggtgcatcggcgccaccacgctggaggagtaccgcaagtacgtggagaaggacgcagcgttcgagcggcggttccagcaggtgttcgtcgcggagccgagcgtgcccgataccgtcagcattctgaggggactcaaggagaagtacgaggggcaccatggcgtgaggatccaggaccgcgccctcgtggtcgcggcacagctctccgcgaggtacatcatgggtcggcacctgcctgacaaagccatagacctggtggacgaggcctgcgccaatgtgagggtgcagctcgacagccagccggaggagattgataacctggagaggaagagaatccagcttgaggtcgagctccacgcgctcgagaaggagaaggacaaggccagtaaagcccggctgattgaggtcaggaaggaattggacgatctgagggacaagctgcagcccctgaccatgaagtacaggaaggagaaggagagaatcgatgagatcaggaagctgaagcagcgccgcgaggagctccagttcaccctgcaggaggccgagcgccggatggacctggcccgtgtggccgatctcaagtacggcgccctccaggaaatcgacgccgcgatctccaagctggagagcgaaacaggggagaacctgatgctcaccgaaaccgtcggccctgaacaaattgcagaggtggtgagccgttggacgggtattccagtgacccggcttggccagaacgacaaggagaggctggtcggcctggctgacaggcttcaccagagggtggtcggccagacagaggctgtgagcgccgtcgcagaggcggtgctgaggtcgagggccggaggacgaggacggcatggacgaggagtaaaaggcgggccggaggacgcggagctgcgcccaggccgcaggtctggcgccggcatcatcgagtgtcttttgaataagcgtgtagataagcccgtgaatgtggaaacgaggatgagatgatgttcttgtaacgctgctgtttgtcaagcatggacgaatgctctcatatcatcatatggtgtcaaagtgacaaagtctctcaatcgatgtcttgatgtcattatttttatctccctgaatgtttttacatgttttcctctattcattgtatcctttatgcatacacgaagggagaactttcggctacctgtttggttctaccataatccatatagattttcatattttc

SEQ ID NO: 215867 - DNA, 1986 bp, Zea Mays
gttcatgtggtatcaacttgggatgtgttcacggccacatagttccttagatgagcgtttgcttaacgaccttattctttaaatgggacacatagatgcaagaagaagaagataaagaagaatacgactcgggagcagcaagagttacaacttgatttggattcaacattgacagcagaggcggagggacaagtagaggcaaagggaaacgaggtggaggagcaggatgccactgatgctgttgcttctggtattttgatggaggggacagcaaaatattatgaggaggactccaaggtgaaggtcagtctgatgcccgagaaggaagccaacaccactgttgtttcagtttctgagagtacaccaaaacacaagaagaggaggaaaaagaagaacaagattcaggggcaactagattctgcaaaggcatcatctagtgttgtttccatggatataattgcagctgataaatctgaaaatggttgcacagatgtggtaggggcatcaggacatgctgatatcaatatggatcccataaatggtgatgatctaagtagtgctcagtcaaaggcaaatgatgctgatgttttactgaagaataaggatggaaacaagggggataagaattgcgctgagaacagcgtcttgttgcaggagagctctgcaagaagaaaaagacggaggggaaaaagaaagtggggttcagccggtggaggaccaggcttctcttctgataatggaggcgtggttgctgagcatagcctgcattcttcagcaaaccatggtcttagctgcatatgtgctccatgtttagttgaggcacatgaaaagaagatccaaaatatctactcaccaagaggatcactggtaaggtttcaaaggaagaaactcctgatcttggaccttaatggtctgctagcagatataaatcaagattaccataatgcacacttggcacatgcaaaggttcgaaccaaattagttttcagaagaccatactgtgacgattttctgagattctgcttccagaattttgagctaggaatatggtcatcaaggaaaagggaaaatgttgaatcggttgttgatatccttatgaggggtcttaagcaatgcctactattttgttgggacatgtcttactgcactgttacagggtgcaaaacaattgacaacaaggacaaaccattagtgctgaaggaactaaaaagggtttggaataaggatgagccagacctcccatgggggcagggagagttttcaccttcaaatacattactggtggatgattcgccctacaaggctctgtgcaacccgccaaacactgcaatcttccccgaaccctacaattacatgaaccagagggatgattattccttgggacctggtggagatcttcgggtttatctgcagagaattgctgctgcagacaatgttcaaaattttgttcgggataacccatttggtcagaagtccatcacagagagtgatccaaactggaatttctatgtgaaaatagtcgataagatggagaagcaaatagttgatcaagtggaaacgaaaatagttgatgaagtggagaggtccttaggttaataggaacaaaggttcaatcaagagaaagttctgtatttgtttgtgttgattagcaggtgttttgcattgcgccagtgctatcatgtgtaatctaatttagtaattgttgtttcatagacaaaacatgatttgaagaatcttgataggttttgttgttccaaccgagggatgaatcattgtttgtcctgtatcgagtgttacaggctttctggtttgctaacttagctatttctggaagtttggttgactatgctggaggatgattcagttcgatggaactgttatatactcgaattgttgtaaatcatctcagtttcatggtttcttgccttgcctttcttatgtctaaacccttgaccttgccttgcgcaatgcccgttcaattcaaaa

SEQ ID NO: 215868 - DNA, 1451 bp, Zea Mays
ctacaatgcttaagataaagctcaaatgatggaggggacagcaaaatattatgaggaggactccaaggtgaaggtcagtctgatgcccgagaaggaagccaacaccactgttgtttcaggagagctctgcaagaagaaaaagacggaggggaaaaagaaagtggggttcagccggtggaggaccaggcttctcttctgataatggaggcgtggttgctgagcatagcctgcattcttcagcaaaccatggtcttagctgcatatgtgctccatgtttagttgaggcacatgaaaagaagatccaaaatatctactcaccaagaggatcactggtaaggtttcaaaggaagaaactcctgatcttggaccttaatggtctgctagcagatataaatcaagattaccataatgcacacttggcacatgcaaaggttcgaaccaaattagttttcagaagaccatactgtgacgattttctgagattctgcttccagaattttgagctaggaatatggtcatcaaggaaaagggaaaatgttgaatcggttgttgatatccttatgaggggtcttaagcaatgcctactattttgttgggacatgtcttactgcactgttacagggtgcaaaacaattgacaacaaggacaaaccattagtgctgaaggaactaaaaagggtttggaataaggatgagccagacctcccatgggggcagggagagttttcaccttcaaatacattactggtggatgattcgccctacaaggctctgtgcaacccgccaaacactgcaatcttccccgaaccctacaattacatgaaccagagggatgattattccttgggacctggtggagatcttcgggtttatctgcagagaattgctgctgcagacaatgttcaaaattttgttcgggataacccatttggtcagaagtccatcacagagagtgatccaaactggaatttctatgtgaaaatagtcgataagatggagaagcaaatagttgatcaagtggaaacgaaaatagttgatgaagtggagaggtccttaggttaataggaacaaaggttcaatcaagagaaagttctgtatttgtttgtgttgattagcaggtgttttgcattgcgccagtgctatcatgtgtaatctaatttagtaattgttgtttcatagacaaaacatgatttgaagaatcttgataggttttgttgttccaaccgagggatgaatcattgtttgtcctgtatcgagtgttacaggctttctggtttgctaacttagctatttctggaagtttggttgactatgctggaggatgattcagttcgatggaactgttatatactcgaattgttgtaaatcatctcagtttcatggtttcttgccttgcctttcttatgtctaaacccttgaccttgccttgcgcaatgcccgttcaattcaaaa

SEQ ID NO: 215869 - DNA, 1753 bp, Zea Mays
caatgcttaagataaagctcaaatgatggaggggacagcaaaatattatgaggaggactccaaggtgaaggtcagtctgatgcccgagaaggaagccaacaccactgttgtttcagtttctgagagtacaccaaaacacaagaagaggaggaaaaagaagaacaagattcaggggcaactagattctgcaaaggcatcatctagtgttgtttccatggatataattgcagctgataaatctgaaaatggttgcacagatgtggtaggggcatcaggacatgctgatatcaatatggatcccataaatggtgatgatctaagtagtgctcagtcaaaggcaaatgatgctgatgttttactgaagaataaggatggaaacaagggggataagaattgcgctgagaacagcgtcttgttgcaggagagctctgcaagaagaaaaagacggaggggaaaaagaaagtggggttcagccggtggaggaccaggcttctcttctgataatggaggcgtggttgctgagcatagcctgcattcttcagcaaaccatggtcttagctgcatatgtgctccatgtttagttgaggcacatgaaaagaagatccaaaatatctactcaccaagaggatcactggtaaggtttcaaaggaagaaactcctgatcttggaccttaatggtctgctagcagatataaatcaagattaccataatgcacacttggcacatgcaaaggttcgaaccaaattagttttcagaagaccatactgtgacgattttctgagattctgcttccagaattttgagctaggaatatggtcatcaaggaaaagggaaaatgttgaatcggttgttgatatccttatgaggggtcttaagcaatgcctactattttgttgggacatgtcttactgcactgttacagggtgcaaaacaattgacaacaaggacaaaccattagtgctgaaggaactaaaaagggtttggaataaggatgagccagacctcccatgggggcagggagagttttcaccttcaaatacattactggtggatgattcgccctacaaggctctgtgcaacccgccaaacactgcaatcttccccgaaccctacaattacatgaaccagagggatgattattccttgggacctggtggagatcttcgggtttatctgcagagaattgctgctgcagacaatgttcaaaattttgttcgggataacccatttggtcagaagtccatcacagagagtgatccaaactggaatttctatgtgaaaatagtcgataagatggagaagcaaatagttgatcaagtggaaacgaaaatagttgatgaagtggagaggtccttaggttaataggaacaaaggttcaatcaagagaaagttctgtatttgtttgtgttgattagcaggtgttttgcattgcgccagtgctatcatgtgtaatctaatttagtaattgttgtttcatagacaaaacatgatttgaagaatcttgataggttttgttgttccaaccgagggatgaatcattgtttgtcctgtatcgagtgttacaggctttctggtttgctaacttagctatttctggaagtttggttgactatgctggaggatgattcagttcgatggaactgttatatactcgaattgttgtaaatcatctcagtttcatggtttcttgccttgcctttcttatgtctaaacccttgaccttgccttgcgcaatgcccgttcaattcaaaa

SEQ ID NO: 215870 - DNA, 3824 bp, Zea Mays
ggcgaggatcggcgccgccatgtcccagatcctccgccaccgcctgtcggctcactaccacggagtctgcggccactgctgccgccgcctcagctccgccgtctacggcggcggcgggagtcgccgcgccgtcgccgcgccgccgcaggacggcgagggcagccgagcggtgagggtgtctgtgtggtgggacttcgagaactgccacatccccaacggcgtcaacgtccaccgcgttgccccgcgcgtttccgccgccctccgcgccgccggcatccgcgggccgctctccatcaccgccttcggggacgtgctgcagctcgcgcgctcctcccaggaggcgctcgccgccacgggcgtctccatctcccacgtcccaagcagtgggaagaatagttctgaccgctcttttatggctgatcttgtctactggattgctcagaatccgccaccagttcattttttccttatatctggcgatagagattttgcaaacatcttgcatcggttgagaatgagcaactacaatgtactgcttgcttgtcctagtagtgctaccagtgtactgtgcagtgcagcaacaatcatgtggccttgggaaggcttagttagaggagaggatttgtcaccaaaacgttttaacaacccgccggatggtttacatggatcttggtatggtcactaccgaggagcccttgacgacccccccctggagaaggaatcagaggaacccatcaaggttctcgattaggtgaaaacgaactatatgcaattgctgccaacaaaaaatttctgcagcctggtgatggggctcttgatgaccccttcctggagaagggagcagaggaacccatcaaggtatcatctgattcccagcattgttcagtaccatctgataccaagtctagttcaatccctaaatatgtaacagatgcaattctggaggcgctatgttcatatcctgaagggatcaacctttcactactccaggaagagcttgcgaagaaaaaaatttgtcttggtccagatttttttggccacaaggatttctcttgccttatacaatcaataccagatattgttgaattagtatgtcctcaaactggtggacaactatatgcaattgctgtcaacagaagatcactgcagcctggtgacggaagtactaagacccttagctcagctcaaggtaatgccagggagaataacccaactggaacagctcacagtaataagaagaatacactaagttctcttcgaagcatttacaagagcagaagcttcacagagacactaagtgaacatccacctacattttctgtcttaccttccccgtcaaatgggctatctgaggaccaaactgagtgcccagtggtggatgtgaatgggtcgacagagtcaccagcaaagcacagggaagttggtgaaatgactacccctggaactccctcttcctcaggggtggaaaatgctgctaatgaatatggcttctttaaaaggatctggacaatgtggaatggtcccaagaatgttaagtctgaggtttctcaaaattgtgaaagcacttctgctgaagtgattgatgatttgcaggtttctcagaattgtgaaagcacttttgctaaagtgattgatgatttgcgaactcctttggaagagtataatggtgatcaccgtataaagcttttgaggaggatacatgaaacctcttccaaaaatgatcgctcagatggtactgagggcatgttagcagtaagtgataatttatcgatttcattaggtgatgatcattctgaaaaaataaagagagatccatcaattcctgaaaacccagaaccatgcagaaaacctgctgctgtttccatgattaaatctggaaaaaaggatgatatttctgaaatgaataggggcatgtttaactgggcttcaaggtggtggccatttgggaaatcagatgcagatagtagtacaaccaacataaatgccactgatgaaccgaggactgactctattgaagaatttgaatcttcaaacgctccaactaatggaagtgcacaacaggtggttcatgaaatatttacaaagcctgacttgtggtctgttttggagcaacagttatcagaacctcttgggtctgaggttgttttgaaagcaaagacaaggcaggaattggcacacagattgcagaagttaaattgctggcctttgaaaggcctccttgataaagacctgcatcacctggtacatctgttaatttctgaaaagaaatggattgaagaaacttcttccagaattttccctttccgtcttaccctccctcgcaagagaagatgtgtcccatcaagttccagcaaatccaacggcctcagttacattttttcaagtgggaagccacaaaagggcagatacgttgacaataacagtaggaaaagcaggtccctcactagagaggagatactatcagattgtcacaagctggtgaaggagcttctttctgagcatgaatatggattcaacatcggaattttcaaacgccgtttttcccaggagtatggatacgagctcgaacaccggaagctcgggtatctggaccttgaaacgctgctgcatattatgcctgatgtaagggtgaaattcccaagggtcatgcgctcagaacacgggaacgggcaggctggcagcaagggagacggaaaccgaagcagcggcgatgacttgatctgggaggagcttggtcctgtatctgccacaactgaaaccgccgccgccgccgctgatgcaggggccgacaaggaaacatgctatcgtcctcccactccttcagacgacgagttctcggacagcgacagcataaaagaccggcagcctagaaggaacgccgagcagcagagctcgcttctccagatcattggagcttggaacagcagcaagggtggcgacgtctctagcaacaagcctcaggacatcgacgggttggtggactgttcgagaagcagcccgggcagtgctggcaccagcgcagcttcaggaaaggtgcagacgtcgtctccgaagctaccgcacaagcagtactccttcgtgtcggactccggagaggagagcgatccggataagctggtggagagcgtcttggacagcctgcagaaagcacggggcggctcgaagctgcacaactgagcgtctgctgccatcgaattattgtttttgcaacctaacgagtcgtgcttatggtggtggccatggctgactgtcaaggacagcggcgcctgcaagcatcagccggagagactggtgaataaagctcgtcttttacttggactaggccgtagtacaatcggaacagtccttggtaattggtatgttaacattggctagagaccgcctcccatttctgtttcttgtttctttcttttcatgcaggatggttgtccgcccaatctacacgctcattttcttaacaaattggttaacacggcggggcttagacggtcgttcgtcaccagtgttggtattccaagcccaatcttttttttgcttgtagtatagtaaacataaaatgacatggcacatgctggtgtctagagtattgctgtttctggagtcccaagcattcatgtgatggcacattggaatgccagttgtactgcaatagtgccaatgaatcctatctaacactagacctggtcacgttggtcaactgttgatggttgtgcttttctgtctgttgagtgccatctagtctagatataacaaacaaggcatcctgacattgcagcagcacattcacaggaccaggtggatatatttttttaatttgttaattt

SEQ ID NO: 215871 - DNA, 3587 bp, Zea Mays
ggcgaggatcggcgccgccatgtcccagatcctccgccaccgcctgtcggctcactaccacggagtctgcggccactgctgccgccgcctcagctccgccgtctacggcggcggcgggagtcgccgcgccgtcgccgcgccgccgcaggacggcgagggcagccgagcggtgagggtgtctgtgtggtgggacttcgagaactgccacatccccaacggcgtcaacgtccaccgcgttgccccgcgcgtttccgccgccctccgcgccgccggcatccgcgggccgctctccatcaccgccttcggggacgtgctgcagctcgcgcgctcctcccaggaggcgctcgccgccacgggcgtctccatctcccacgtcccaagcagtgggaagaatagttctgaccgctcttttatggctgatcttgtctactggattgctcagaatccgccaccagttcattttttccttatatctggcgatagagattttgcaaacatcttgcatcggttgagaatgagcaactacaatgtactgcttgcttgtcctagtagtgctaccagtgtactgtgcagtgcagcaacaatcatgtggccttgggaaggcttagttagaggagaggatttgtcaccaaaacgttttaacaacccgccggatggtttacatggatcttggtatggtcactaccgaggagcccttgacgacccccccctggagaaggaatcagaggaacccatcaagcctggtgatggggctcttgatgaccccttcctggagaagggagcagaggaacccatcaagatgcaattctggaggcgctatgttcatatcctgaagggatcaacctttcactactccaggaagagcttgcgaagaaaaaaatttgtcttggtccagatttttttggccacaaggatttctcttgccttatacaatcaataccagatattgttgaattagtatgtcctcaaactggtggacaactatatgcaattgctgtcaacagaagatcactgcagcctggtgacggaagtactaagacccttagctcagctcaaggtaatgccagggagaataacccaactggaacagctcacagtaataagaagaatacactaagttctcttcgaagcatttacaagagcagaagcttcacagagacactaagtgaacatccacctacattttctgtcttaccttccccgtcaaatgggctatctgaggaccaaactgagtgcccagtggtggatgtgaatgggtcgacagagtcaccagcaaagcacagggaagttggtgaaatgactacccctggaactccctcttcctcaggggtggaaaatgctgctaatgaatatggcttctttaaaaggatctggacaatgtggaatggtcccaagaatgttaagtctgaggtttctcaaaattgtgaaagcacttctgctgaagtgattgatgatttgatacatgaaacctcttccaaaaatgatcgctcagatggtactgagggcatgttagcagtaagtgataatttatcgatttcattaggtgatgatcattctgaaaaaataaagagagatccatcaattcctgaaaacccagaaccatgcagaaaacctgctgctgtttccatgattaaatctggaaaaaaggatgatatttctgaaatgaataggggcatgtttaactgggcttcaaggtggtggccatttgggaaatcagatgcagatagtagtacaaccaacataaatgccactgatgaaccgaggactgactctattgaagaatttgaatcttcaaacgctccaactaatggaagtgcacaacaggtggttcatgaaatatttacaaagcctgacttgtggtctgttttggagcaacagttatcagaacctcttgggtctgaggttgttttgaaagcaaagacaaggcaggaattggcacacagattgcagaagttaaattgctggcctttgaaaggcctccttgataaagacctgcatcacctggtacatctgttaatttctgaaaagaaatggattgaagaaacttcttccagaattttccctttccgtcttaccctccctcgcaagagaagatgtgtcccatcaagttccagcaaatccaacggcctcagttacattttttcaagtgggaagccacaaaagggcagatacgttgacaataacagtaggaaaagcaggtccctcactagagaggagatactatcagattgtcacaagctggtgaaggagcttctttctgagcatgaatatggattcaacatcggaattttcaaacgccgtttttcccaggagtatggatacgagctcgaacaccggaagctcgggtatctggaccttgaaacgctgctgcatattatgcctgatgtaagggtgaaattcccaagggtcatgcgctcagaacacgggaacgggcaggctggcagcaagggagacggaaaccgaagcagcggcgatgacttgatctgggaggagcttggtcctgtatctgccacaactgaaaccgccgccgccgccgctgatgcaggggccgacaaggaaacatgctatcgtcctcccactccttcagacgacgagttctcggacagcgacagcataaaagaccggcagcctagaaggaacgccgagcagcagagctcgcttctccagatcattggagcttggaacagcagcaagggtggcgacgtctctagcaacaagcctcaggacatcgacgggttggtggactgttcgagaagcagcccgggcagtgctggcaccagcgcagcttcaggaaaggtgcagacgtcgtctccgaagctaccgcacaagcagtactccttcgtgtcggactccggagaggagagcgatccggataagctggtggagagcgtcttggacagcctgcagaaagcacggggcggctcgaagctgcacaactgagcgtctgctgccatcgaattattgtttttgcaacctaacgagtcgtgcttatggtggtggccatggctgactgtcaaggacagcggcgcctgcaagcatcagccggagagactggtgaataaagctcgtcttttacttggactaggccgtagtacaatcggaacagtccttggtaattggtatgttaacattggctagagaccgcctcccatttctgtttcttgtttctttcttttcatgcaggatggttgtccgcccaatctacacgctcattttcttaacaaattggttaacacggcggggcttagacggtcgttcgtcaccagtgttggtattccaagcccaatcttttttttgcttgtagtatagtaaacataaaatgacatggcacatgctggtgtctagagtattgctgtttctggagtcccaagcattcatgtgatggcacattggaatgccagttgtactgcaatagtgccaatgaatcctatctaacactagacctggtcacgttggtcaactgttgatggttgtgcttttctgtctgttgagtgccatctagtctagatataacaaacaaggcatcctgacattgcagcagcacattcacaggaccaggtggatatatttttttaatttgttaattt

SEQ ID NO: 215872 - DNA, 1322 bp, Zea Mays
cggaaagggacggaacgaaggatagaaaaaaaagaagcggcggcggcggcaagagtcgagggagggccgctacaacctaggtacacgccaccggcaccaagatttccgtatcaactcggggtctttgtcttcagttccaagatccagtgcaaccaagatgtgtgaacctgatacacacacatctgatgatgagagggctggagaattgcttgttgccctatgtgctgtagacatatgggggagctcgcccagtggggtttctagaagaacaatggttgaaacaggtatccaatgggttgagcgaacattggagagtagtggcgactgtttcgacatgtttcacatgcggcgaactgtgttccgacgtttgcatgatacgttggtggaaagttatggtctgcttccaagccgaggtgtcagtacaacggaagctttaggtattttcttgtgggcatgtgggggtccacagtcatttaggcagataaggaataagtttggtcactctttggaaactattagtcgcaagtatagtgaagtccttaatgcactatataagatgtcttctgacgtaatcaagcccaaagacccaaatttcatagagattcaccctcgattgcgagagagtagattttggccccacttcaaggattgcataggagcaattgatggtagtcactttcccgcgtctgtcccggccacggagcaagccaaatatattggtcggcacggttacgcatcccagaatgtaatggtcatttgtgacttcgatatgaggttcacatttgttgtcacaggttggtcaggttcagtacatgacactaaagtattacaagatactttgataacttatgcggacaggttcccgcgtccaccggaaggtaaatactatcttgtgaattcaggttatccaaatagaaaggggtaccttgcaccttataagggtcagaagtaccacattttagaatgacaaaatgcgaggcaacctattgggagcaaagaagtattcaactttgcacactcttcgctacgcaatgttatagagcgatcttttggggtgcttaaaataaagtggagaattctcctaagtctcccttctttttcgcttaagaaacaatcgaagataattattgcttgtatgacattgcataacttcattaaagaaagtgctctacacgatagagactttgatcaacttggacctaatagccttggtcatgatgtacccgtaggtaagagtagtagtagcacatctgatgagttagacatgagtgcatttcgagatgaaattgctgatgcattagtgtcgtagtttaatatgtcac

SEQ ID NO: 215873 - DNA, 532 bp, Zea Mays
tagatggaacaacaattgactggaaagtgttcatgcaggtcctaaattcaccatgggatgtatgctacgatcccgcagaggaggccgtgtatattgcaatggctgggcaacaccagatctggaagcacaatttacatgatggagtaaccaaagttattagcggtgatggctatgagaggaatctgaatggctcaagcgccaccagcacatcgtttgcacagccttctgggattccattagcttttgaaatgcatgagttacttgttgctgatagtgaaagtagttccattcgagttgttaatctgaagacaggaggctcaagattgctggctggaggagatccagtatttccagaaaatttgtttaggtttggagattatgacgggactggctcagatgtgctacttcaacatcccttgggtgttgtttatgccaatgacaatcaagtatatatagctgattcctacaaccataaggtagtaaccttattttgacacccatcaagtgtaagatgtgtatagctaagttgtcc

SEQ ID NO: 215874 - DNA, 451 bp, Zea Mays
catgcaggtcctaaattcaccatgggatgtatgctacgatcccgcagaggaggccgtgtatattgcaatggctgggcaacaccagatctggaagcacaatttacatgatggagtaaccaaagttattagcggtgatggctatgagaggaatctgaatggctcaagaaatgcatgagttacttgttgctgatagtgaaagtagttccattcgagttgttaatctgaagacaggaggctcaagattgctggctggaggagatccagtatttccagaaaatttgtttaggtttggagattatgacgggactggctcagatgtgctacttcaacatcccttgggtgttgtttatgccaatgacaatcaagtatatatagctgattcctacaaccataaggtagtaaccttattttgacacccatcaagtgtaagatgtgtatagctaagttgtcc

SEQ ID NO: 215875 - DNA, 2290 bp, Zea Mays
caccattgtagttctcctgctttctctcgtcccccactaccctcagcaaacaaaagaatcctgaaccccttcttcgccgattcctctaacccaactcatctcatctccgctcccaaggcgagatctcaccaccccattcccaaatcaacccaaacaccgaattccaaacctggtgatcgatccaaaaacgccataaatcccaccgaatccaactcaaattcgcaatcaaatgccccagattggcacccaaaccccgcacccagcaattcaaatctgacctcgccattcccgctcctccccctctaccctccgctgcatgctccagactcccatagcaatggcgaccgcgctctccaaatctgccgtcaaatcccaccctaggtcgcctaccacagcgcagccgccgccgaaccccggctcaaacgccgcgtcggctggcgtaggggcggctcctccgcctccgccgccgttgtcggccgccgccggtgccacgccgtcgaagaacgccgcgatggtggagctcaagtcgcgcgtgctcgccgcgctggccaagctctcggaccgcgacacgcaccacatcgccgtcgaggagctggaacgcatcatccgcgcgccgccgttgaccgacgccgtgcccatgctgctcaacgcactggcatctgactccccggggttcgcctccccggccaggcgcgagtctctgcgcctcctcgccacgctctgcgcgtcgcacccggacgctgccgcgccgcacctccacaaggtgcttgcccacctagcgcggcggctcaaggacccggcgtccgacacctccgttcgcgacgcgtgccgagacgtcgcgggccagctcgcggcagtgtacctccgccctctgtctgcttccggcgttgccgaggcgggcaatgccaccgtgatgctgttcgtgaagccgctgttcgaggtgatgggggagcagagtaaagcggtgcagggtggagcggccgcatgcttggccaaggcagtggaaggggccgggcctgggcccggtgccatcgggatgtttgggaagctcggtcctaggatctgcaagttgctcggtgggcacggcgtgcaagccaaggcggcattgctcggcgtcatgggaagtttggcgcaggttacaggccaagaatttgctatgaatgttattctctactctggctagggcttccagcgggtccactcctgctttgtggtgggagcaatcagttcccataatatgccgcagacactccaaagtatccgtgactgccttgagaatagcgattgggctactagaaaagcagctgctgatacattatgtgtctttgctacacattctggtcacttgataggtgacggaatagctccaaccatttctgctcttgaagcttgccgttttgataaggtaaggcctgtcagagatagcatgattgatgcagtacagttgtggaaaaaactgactggagaagatgcaactgacggtagaaataaggatctaggtgatggtgaagggaaactggactcaagacggtcaatgcaaagtggtggaaaatcagaatgctttgatgattgctctccagattcacctagtaacatgaagggaagtagcatagctgaaaaggcagcagttcttttgaagaaaagaccaacattaactgacagggaactgaaccctgagttcttccaaaagcttgagacaaggaaaacagatgacttggcagttgaggttgtagtcccccgcaagactctacaatctcacttacgaagtgaagatgacacagaagaagatgatgatcctgttggtccagttgacagcaatggatcagctgaagatgaagcaaatctaacccaaatgcgtgctagctctaattttcaaaatattcgggatagatgggctagccaaaggggaaatagcaacaaagatgcaaaatctaggacagctgatgttgaagataggggtgaacccagtacaaaagattccacagctgcaaccatgaacattcctggagaaggcccttccgtaaataataaaacaaattggttagcaatacagaggcaattgtcacacttggagagacagcaaactagtctcatgaacatgttgcagtttcatttcctgtttaatgctaagggaaaaagaacctgattggtggcaaagaactaatccaggagtgctaactattaagactgcaaataagacttttctcaactcagtgaactatgtaggtgaaattatcagcctgattggttgccctacatccagtggctgcagcagctgtggaacattaaa

SEQ ID NO: 215876 - DNA, 2339 bp, Zea Mays
aaataaaaaatatacttagaaaaataaaaaagtatcttatagattaaaaaggaagaaatataatttagaattacgtataaatacgtaattgagaaaatggacagagtcctgccatgccaggccggtccaccattgtagttctcctgctttctctcgtcccccactaccctcagcaaacaaaagaatcctgaaccccttcttcgccgattcctctaacccaactcatctcatctccgctcccaaggcgagatctcaccaccccattcccaaatcaacccaaacaccgaattccaaacctggtgatcgatccaaaaacgccataaatcccaccgaatccaactcaaattcgcaatcaaatgccccagattggcacccaaaccccgcacccagcaattcaaatctgacctcgccattcccgctcctccccctctaccctccgctgcatgctccagactcccatagcaatggcgaccgcgctctccaaatctgccgtcaaatcccaccctaggtcgcctaccacagcgcagccgccgccgaaccccggctcaaacgccgcgtcggctggcgtaggggcggctcctccgcctccgccgccgttgtcggccgccgccggtgccacgccgtcgaagaacgccgcgatggtggagctcaagtcgcgcgtgctcgccgcgctggccaagctctcggaccgcgacacgcaccacatcgccgtcgaggagctggaacgcatcatccgcgcgccgccgttgaccgacgccgtgcccatgctgctcaacgcactggcatctgactccccggggttcgcctccccggccaggcgcgagtctctgcgcctcctcgccacgctctgcgcgtcgcacccggacgctgccgcgccgcacctccacaaggtgcttgcccacctagcgcggcggctcaaggacccggcgtccgacacctccgttcgcgacgcgtgccgagacgtcgcgggccagctcgcggcagtgtacctccgccctctgtctgcttccggcgttgccgaggcgggcaatgccaccgtgatgctgttcgtgaagccgctgttcgaggtgatgggggagcagagtaaagcggtgcagggtggagcggccgcatgcttggccaaggcagtggaaggggccgggcctgggcccggtgccatcgggatgtttgggaagctcggtcctaggatctgcaagttgctcggtgggcacggcgtgcaagccaaggcggcattgctcggcgtcatgggaagtttggcgcaggtgggagcaatcagttcccataatatgccgcagacactccaaagtatccgtgactgccttgagaatagcgattgggctactagaaaagcagctgctgatacattatgtgtctttgctacacattctggtcacttgataggtgacggaatagctccaaccatttctgctcttgaagcttgccgttttgataaggtaaggcctgtcagagatagcatgattgatgcagtacagttgtggaaaaaactgactggagaagatgcaactgacggtagaaataaggatctaggtgatggtgaagggaaactggactcaagacggtcaatgcaaagtggtggaaaatcagaatgctttgatgattgctctccagattcacctagtaacatgaagggaagtagcatagctgaaaaggcagcagttcttttgaagaaaagaccaacattaactgacagggaactgaaccctgagttcttccaaaagcttgagacaaggaaaacagatgacttggcagttgaggttgtagtcccccgcaagactctacaatctcacttacgaagtgaagatgacacagaagaagatgatgatcctgttggtccagttgacagcaatggatcagctgaagatgaagcaaatctaacccaaatgcgtgctagctctaattttcaaaatattcgggatagatgggctagccaaaggggaaatagcaacaaagatgcaaaatctaggacagctgatgttgaagataggggtgaacccagtacaaaagattccacagctgcaaccatgaacattcctggagaaggcccttccgtaaataataaaacaaattggttagcaatacagaggcaattgtcacacttggagagacagcaaactagtctcatgaacatgttgcagtttcatttcctgtttaatgctaagggaaaaagaacctgattggtggcaaagaactaatccaggagtgctaactattaagactgcaaataagacttttctcaactcagtgaactatgtaggtgaaattatcagcctgattggttgccctacatccagtggctgcagcagctgtggaacattaaa

SEQ ID NO: 215877 - DNA, 926 bp, Zea Mays
attgtagttctcctgctttctctcgtcccccactaccctcagcaaacaaaagaatcctgaaccccttcttcgccgattcctctaacccaactcatctcatctccgctcccaaggcgagatctcaccaccccattcccaaatcaacccaaacaccgaattccaaacctggtgatcgatccaaaaacgccataaatcccaccgaatccaactcaaattcgcaatcaaatgccccagattggcacccaaaccccgcacccagcaattcaaatctgacctcgccattcccgctcctccccctctaccctccgctgcatgctccagactcccatagcaatggcgaccgcgctctccaaatctgccgtcaaatcccaccctaggtcgcctaccacagcgcagccgccgccgaaccccggctcaaacgccgcatgcttggccaaggcagtggaaggggccgggcctgggcccggtgccatcgggatgtttgggaagctcggtcctaggatctgcaagttgctcggtgggcacggcgtgcaagccaaggcggcattgctcggcgtcatgggaagtttggcgcaggttacaggccaagaatttgctatgaatgttattctctactctggctagggcttccagcgggtccactcctgctttgtggtactgtagcttgtgtatctcacagagaaatgtgggcttgaacgcttgacacttgcaaatttcaaactgctggtgaaacattactgagaatggcaaatggagataggattttaaagcataagcactgtgatcacaatgtgattcctgataaagtgattagtgaatgtggaagttcaaccttcaacgcttgatgtcttcctggagaacaaagagtctgggtttacttgtttctgtttgacttgatggacaatggaaaatatcacattgttgtg

SEQ ID NO: 215878 - DNA, 1445 bp, Zea Mays
gccttgctggatcatttgtgccgccaaacggtaaggaaggaggcaggcgaggatgtcgcaccgtaaattcgagcacccgaggcacggttcccttggcttcctccccaggaagcgatcctctcccgccaccgcggaaaggtgaagtccttcccgagggatgacccaaagaagccctgtcacctcaccgccttccttggctacaaggctggaatgacacacattgtggtgaggtcgagaagcctggctccaaccccccgtggcctacgaaccctcaactctgtctgggcccaacaccttagcgaagaagtgcggagaaggttctacaagaactggtgcaagagcaagaagaaggctttctccaagtatgccctcaaatacgacagcgacgcaggcaagaaagaaatccagttgcagcttgagaaaattagaaagatgaagggtttgaagcagaagaaggctcacctcatggagatccaggtcaacggtggcactatagcagacaaggtggactatggttacaagttctttgaggaggtccctgttgatgctgtgttccagaaggacgagatgatcgacatcatcggagttaccaagggcaagggttatgaaggcgtggtcactcgctggggtgttacccggcttccccgcaagacccacaggggcctccgcaaggttgcctgtatcggtgcatggcatcctgctagggtgtcgtacactgttgctcgtgctggtcagaacggataccatcaccgcactgagatgaacaagaaggtttacaagattggcaaggccggacaggaaagccatgacgcctcaactgagtttgacaggaccgagaaggacatcactcccatgggtggtttcccccactacggtatcatcaagggcgactacctgatgatcaagggttgctgcgtcggccccaagaaaagggtggtgactctccgccagtctctgctgaagcagacgtctcggttggccctggaggagatcaagctcaagttcatcgacacctcgtccaagtttggacatgggcgcttccagaccacagacgagaagcagaggttctttggcaagctcaaggcctgagttgctgatggtgtcaagcgaaatggaaatgtattaccagatagttttttgtttttcagattcagctttgttggagatatcataagaacatgtttgatttgctagtctgagttgattctattgcgggcggctgaagttatattacctaatgaactcgaaagtcagcttgctagttgcgtgactttacctgcgctagcacttgccaattttgatggaatctcaaatcttcccgcacgcaatatgctcttgctcaattcagccgtttttttactgtaatcgttgtcagcacatctgtctacagtgaattaacgctgtaattgttctgaatttttaaaacaattatcttattattccat

SEQ ID NO: 215879 - DNA, 1407 bp, Zea Mays
atttgtgccgccaaacgtgaagtccttcccgagggatgacccaaagaagccctgtcacctcaccgccttccttggctacaaggctggaatgacacacattgtggtgaggtcgagaagcctggctccaagctccacaagaaggaaacttgtgaggctgtgactatcattgagactcctccccttgtcattgtcggacttgtggaatgtgaagaccccccgtggcctacgaaccctcaactctgtctgggcccaacaccttagcgaagaagtgcggagaaggttctacaagaactggtgcaagagcaagaagaaggctttctccaagtatgccctcaaatacgacagcgacgcaggcaagaaagaaatccagttgcagcttgagaaaattagaaagatgaagggtttgaagcagaagaaggctcacctcatggagatccaggtcaacggtggcactatagcagacaaggtggactatggttacaagttctttgaggaggtccctgttgatgctgtgttccagaaggacgagatgatcgacatcatcggagttaccaagggcaagggttatgaaggcgtggtcactcgctggggtgttacccggcttccccgcaagacccacaggggcctccgcaaggttgcctgtatcggtgcatggcatcctgctagggtgtcgtacactgttgctcgtgctggtcagaacggataccatcaccgcactgagatgaacaagaaggtttacaagattggcaaggccggacaggaaagccatgacgcctcaactgagtttgacaggaccgagaaggacatcactcccatgggtggtttcccccactacggtatcatcaagggcgactacctgatgatcaagggttgctgcgtcggccccaagaaaagggtggtgactctccgccagtctctgctgaagcagacgtctcggttggccctggaggagatcaagctcaagttcatcgacacctcgtccaagtttggacatgggcgcttccagaccacagacgagaagcagaggttctttggcaagctcaaggcctgagttgctgatggtgtcaagcgaaatggaaatgtattaccagatagttttttgtttttcagattcagctttgttggagatatcataagaacatgtttgatttgctagtctgagttgattctattgcgggcggctgaagttatattacctaatgaactcgaaagtcagcttgctagttgcgtgactttacctgcgctagcacttgccaattttgatggaatctcaaatcttcccgcacgcaatatgctcttgctcaattcagccgtttttttactgtaatcgttgtcagcacatctgtctacagtgaattaacgctgtaattgttctgaatttttaaaacaattatcttattattccat

SEQ ID NO: 215880 - DNA, 2634 bp, Zea Mays
cgtgctgcactgggcacacccaaagttcctaatgtcaaatgggaggatgttggtgggctagaggatgtgaaaaaggttattctagatactattcagttgcctctgatgtacaagcacctgttttcttctaaattgcgcaagcgatcaggtgtcctgctatatggacctccaggaacagggaaggtaggtttgaaaaggtttcatccggattcaattgtatttttgtttagctaccaataacaagtgcatccagaagaaacatgacacgagatcgctaaaataattgtcccttggacttctagactttacttgcgaaagcagtagcaacagaatgctcattgaactttcttagcgtcaaaggtccagaactgataaacatgtatgttggagaatcagagaaaaatgttcgggatatttttgagaaggtctgcacgcccatgtgtcattttctttgatgagcttgattccctcgctcctgcacgaggatcctcagcagattctggcggtgtcatggacagggttgtttcccagttacttgtggagatcgatgggttgagtgacaacagccaggaccttttcattattggggctaccaataggcctgaccttcttgattctgcccttcttcgccctggtcggtttgacaagcttctttatgtcggtgtaaatactgaggcatcatacagggaaaggatccttaaagcacagacgcgcaagtataagctgcacaagaacgtttctctcttgtcagttgcgcagcgttgtccaccaaacttcactggtgctgatatttacgcgctgtgtgcggatgcatggtttcatgcagcaaagcgatcagttgaaacattcgaaaccgatccttcaagaagtaatgacgccagtgccgaagaagtcattgtcgagatcgacgattttatcacatgccagcagcgatgcctccttgttcgtgctcggcaagtcggccggtgtgagcaaaatccgtacgtcatcgtctccagtggtgccattctccgtggctctgcacacggtcggggactcggcggccttgctggatcatttgtgccgccaaacgggtttacctgctccgcctccgcccagccagcgccgccgccgctgccgctagcgctcccctcaggtaaggaaggaggcaggcgaggatgtcgcaccgtaaattcgagcacccgaggcacggttcccttggcttcctccccaggaagcgatcctctcccgccaccgcggaaaggtgaagtccttcccgagggatgacccaaagaagccctgtcacctcaccgccttccttggctacaaggctggaatgacacacattgtggtgaggtcgagaagcctggctccaagctccacaagaaggaaacttgtgaggctgtgactatcattgagactcctccccttgtcattgtcggacttgtggaatgtgaagaccccccgtggcctacgaaccctcaactctgtctgggcccaacaccttagcgaagaagtgcggagaaggttctacaagaactggtgcaagagcaagaagaaggctttctccaagtatgccctcaaatacgacagcgacgcaggcaagaaagaaatccagttgcagcttgagaaaattagaaagatgaagggtttgaagcagaagaaggctcacctcatggagatccaggtcaacggtggcactatagcagacaaggtggactatggttacaagttctttgaggaggtccctgttgatgctgtgttccagaaggacgagatgatcgacatcatcggagttaccaagggcaagggttatgaaggcgtggtcactcgctggggtgttacccggcttccccgcaagacccacaggggcctccgcaaggttgcctgtatcggtgcatggcatcctgctagggtgtcgtacactgttgctcgtgctggtcagaacggataccatcaccgcactgagatgaacaagaaggtttacaagattggcaaggccggacaggaaagccatgacgcctcaactgagtttgacaggaccgagaaggacatcactcccatgggtggtttcccccactacggtatcatcaagggcgactacctgatgatcaagggttgctgcgtcggccccaagaaaagggtggtgactctccgccagtctctgctgaagcagacgtctcggttggccctggaggagatcaagctcaagttcatcgacacctcgtccaagtttggacatgggcgcttccagaccacagacgagaagcagaggttctttggcaagctcaaggcctgagttgctgatggtgtcaagcgaaatggaaatgtattaccagatagttttttgtttttcagattcagctttgttggagatatcataagaacatgtttgatttgctagtctgagttgattctattgcgggcggctgaagttatattacctaatgaactcgaaagtcagcttgctagttgcgtgactttacctgcgctagcacttgccaattttgatggaatctcaaatcttcccgcacgcaatatgctcttgctcaattcagccgtttttttactgtaatcgttgtcagcacatctgtctacagtgaattaacgctgtaattgttctgaatttttaaaacaattatcttattattccat

SEQ ID NO: 215881 - DNA, 2538 bp, Zea Mays
ctaatgtcaaatgggaggatgttggtgggctagaggatgtgaaaaaggttattctagatactattcagttgcctctgatgtacaagcacctgttttcttctaaattgcgcaagcgatcaggtgtcctgctatatggacctccaggaacagggaaggtccagaactgataaacatgtatgttggagaatcagagaaaaatgttcgggatatttttgagaaggtacagaatttacacagccatgtaattgtgtgaaacgttcatagtttttttttcagtttttcactgtcaatctcaggctaggtctgcacgcccatgtgtcattttctttgatgagcttgattccctcgctcctgcacgaggatcctcagcagattctggcggtgtcatggacagggttgtttcccagttacttgtggagatcgatgggttgagtgacaacagccaggaccttttcattattggggctaccaataggcctgaccttcttgattctgcccttcttcgccctggtcggtttgacaagcttctttatgtcggtgtaaatactgaggcatcatacagggaaaggatccttaaagcacagacgcgcaagtataagctgcacaagaacgtttctctcttgtcagttgcgcagcgttgtccaccaaacttcactggtgctgatatttacgcgctgtgtgcggatgcatggtttcatgcagcaaagcgatcagttgaaacattcgaaaccgatccttcaagaagtaatgacgccagtgccgaagaagtcattgtcgagatcgacgattttatcacagtgttaggagatatcgcaccgtcgctctctctggacgagctacaaaactatgaacagttgaggcagaagatcgaaggaccttctagatgaatgccagcagcgatgcctccttgttcgtgctcggcaagtcggccggtgtgagcaaaatccgtacgtcatcgtctccagtggtgccattctccgtggctctgcacacggtcggggactcggcggccttgctggatcatttgtgccgccaaacggtaaggaaggaggcaggcgaggatgtcgcaccgtaaattcgagcacccgaggcacggttcccttggcttcctccccaggaagcgatcctctcccgccaccgcggaaaggtgaagtccttcccgagggatgacccaaagaagccctgtcacctcaccgccttccttggctacaaggctggaatgacacacattgtggtgaggtcgagaagcctggctccaagctccacaagaaggaaacttgtgaggctgtgactatcattgagactcctccccttgtcattgtcggacttgtggaatgtgaagaccccccgtggcctacgaaccctcaactctgtctgggcccaacaccttagcgaagaagtgcggagaaggttctacaagaactggtgcaagagcaagaagaaggctttctccaagtatgccctcaaatacgacagcgacgcaggcaagaaagaaatccagttgcagcttgagaaaattagaaagatgaagggtttgaagcagaagaaggctcacctcatggagatccaggtcaacggtggcactatagcagacaaggtggactatggttacaagttctttgaggaggtccctgttgatgctgtgttccagaaggacgagatgatcgacatcatcggagttaccaagggcaagggttatgaaggcgtggtcactcgctggggtgttacccggcttccccgcaagacccacaggggcctccgcaaggttgcctgtatcggtgcatggcatcctgctagggtgtcgtacactgttgctcgtgctggtcagaacggataccatcaccgcactgagatgaacaagaaggtttacaagattggcaaggccggacaggaaagccatgacgcctcaactgagtttgacaggaccgagaaggacatcactcccatgggtggtttcccccactacggtatcatcaagggcgactacctgatgatcaagggttgctgcgtcggccccaagaaaagggtggtgactctccgccagtctctgctgaagcagacgtctcggttggccctggaggagatcaagctcaagttcatcgacacctcgtccaagtttggacatgggcgcttccagaccacagacgagaagcagaggttctttggcaagctcaaggcctgagttgctgatggtgtcaagcgaaatggaaatgtattaccagatagttttttgtttttcagattcagctttgttggagatatcataagaacatgtttgatttgctagtctgagttgattctattgcgggcggctgaagttatattacctaatgaactcgaaagtcagcttgctagttgcgtgactttacctgcgctagcacttgccaattttgatggaatctcaaatcttcccgcacgcaatatgctcttgctcaattcagccgtttttttactgtaatcgttgtcagcacatctgtctacagtgaattaacgctgtaattgttctgaatttttaaaacaattatcttattattccat

SEQ ID NO: 215882 - DNA, 1272 bp, Zea Mays
gaggatgtgaaaaaggttattctagatactattcagttgcctctgatgtacaagcacctgttttcttctaaattgcgcaagcgatcaggtgtcctgctatatggacctccaggaacagggaagcgtcaaaggtccagaactgataaacatgtatgttggagaatcagagaaaaatgttcgggatatttttgagaaggtctgcacgcccatgtgtcattttctttgatgagcttgattccctcgctcctgcacgaggatcctcagcagattctggcggtgtcatggacagggttgtttcccagttacttgtggagatcgatgggttgagtgacaacagccaggaccttttcattattggggctaccaataggcctgaccttcttgattctgcccttcttcgccctggtcggtttgacaagcttctttatgtcggtgtaaatactgaggcatcatacagggaaaggatccttaaagcacagacgcgcaagtataagctgcacaagaacgtttctctcttgtcagttgcgcagcgttgtccaccaaacttcactggtgctgatatttacgcgctgtgtgcggatgcatggtttcatgcagcaaagcgatcagttgaaacattcgaaaccgatccttcaagaagtaatgacgccagtgccgaagaagtcattgtcgagatcgacgattttatcacatgccagcagcgatgcctccttgttcgtgctcggcaagtcggccggtgtgagcaaaatccgtacgtcatcgtctccagtggtgccattctccgtggctctgcacacggtcggggactcggcggccttgctggatcatttgtgccgccaaacgggtttacctgctccgcctccgcccagccagcgccgccgccgctgccgctagcgctcccctcagattctagaaatcgtcgtgtcctgatcctggatctaattgttttatcggaaatgattgcttcaggtaaggaaggaggcaggcgaggatgtcgcaccgtaaattcgagcacccgaggcacggttcccttggcttcctccccaggaagcgatcctctcccgccaccgcggaaaggtgaagtccttcccgagggatgacccaaagaagccctgtcacctcaccgccttccttggctacaaggctggaatgacacacattgtggtgaggtcgagaagcctggctccaagctccacaagaaggaaacttgtgaggctgtgactatcattgagactcctccccttgtcattgtcggacttgtggaatgtgaag

SEQ ID NO: 215883 - DNA, 861 bp, Zea Mays
gcggtgtcatggacagggttgtttcccagttacttgtggagatcgatgggttgagtgacaacagccaggcctgaccttcttgattctgcccttcttcgccctggtcggtttgacaagcttctttatgtcggtgtaaatactgaggcatcatacagggaaaggatccttaaagcacagacgcgcaagtataagctgcacaagaacgtttctctcttgtcagttgcgcagcgttgtccaccaaacttcactggtgctgatatttacgcgctgtgtgcggatgcatggtttcatgcagcaaagcgatcagttgaaacattcgaaaccgatccttcaagaagtaatgacgccagtgccgaagaagtcattgtcgagatcgacgattttatcacatgccagcagcgatgcctccttgttcgtgctcggcaagtcggccggtgtgagcaaaatccgtacgtcatcgtctccagtggtgccattctccgtggctctgcacacggtcggggactcggcggccttgctggatcatttgtgccgccaaacgggtttacctgctccgcctccgcccagccagcgccgccgccgctgccgctagcgctcccctcagattctagaaatcgtcgtgtcctgatcctggatctaattgttttatcggaaatgattgcttcagtgaagtccttcccgagggatgacccaaagaagccctgtcacctcaccgccttccttggctacaaggctggaatgacacacattgtggtgaggtcgagaagcctggctccaagctccacaagaaggaaacttgtgaggctgtgactatcattgagactcctccccttgtcattgtcggacttgtggaatgtgaag

SEQ ID NO: 215884 - DNA, 931 bp, Zea Mays
gcggtgtcatggacagggttgtttcccagttacttgtggagatcgatgggttgagtgacaacagccaggaccttttcattattggggctaccaataggcctgaccttcttgattctgcccttcttcgccctggtcggtttgacaagcttctttatgtcggtgtaaatactgaggcatcatacagggaaaggatccttaaagcacagacgcgcaagtataagctgcacaagaacgtttctctcttgtcagttgcgcagcgttgtccaccaaacttcactggtgctgatatttacgcgctgtgtgcggatgcatggtttcatgcagcaaagcgatcagttgaaacattcgaaaccgatccttcaagaagtaatgacgccagtgccgaagaagtcattgtcgagatcgacgattttatcacatgccagcagcgatgcctccttgttcgtgctcggcaagtcggccggtgtgagcaaaatccgtacgtcatcgtctccagtggtgccattctccgtggctctgcacacggtcggggactcggcggccttgctggatcatttgtgccgccaaacgggtttacctgctccgcctccgcccagccagcgccgccgccgctgccgctagcgctcccctcaggtaaggaaggaggcaggcgaggatgtcgcaccgtaaattcgagcacccgaggcacggttcccttggcttcctccccaggaagcgatcctctcccgccaccgcggaaaggtccttcccgagggatgacccaaagaagccctgtcacctcaccgccttccttggctacaaggctggaatgacacacattgtggtgaggtcgagaagcctggctccaagctccacaagaaggaaacttgtgaggctgtgactatcattgagactcctccccttgtcattgtcggacttgtggaatgtgaag

SEQ ID NO: 215885 - DNA, 2123 bp, Zea Mays
atcacatccttgtagcagcatctgcattgacatcagaatgacattttctctgaagagaaacatcctgtcattcttcgttagcagctctgcaactattttgaagccttttttttgcagatgatgcgaatcaactttgtatagttagtttcgttgatgtacgcctgtaccatgttgtagtaaatgataaagagaataggagtcctcggatcatctgctcgtttgaaccattcagtcatcagccatcgaaaatagctgtctgctatattttttttcgtcagcgacgatctgtcagggtcagggacttttcattgcaacgagtgggacgaacttgtccactgaaaatgatgaggcccgacccgaagggacgcatcaaatccgaatgagcctgtgaagtcaagcactcgaagccttatctgggaaacaaaatgctattcctgatctgacggaagcatccaccaatacagctagtttggtgccagcagcgatgcctccttgttcgtgctcggcaagtcggccggtgtgagcaaaatccgtacgtcatcgtctccagtggtgccattctccgtggctctgcacacggtcggggactcggcggccttgctggatcatttgtgccgccaaacggtaaggaaggaggcaggcgaggatgtcgcaccgtaaattcgagcacccgaggcacggttcccttggcttcctccccaggaagcgatcctctcccgccaccgcggaaaggtgaagtccttcccgagggatgacccaaagaagccctgtcacctcaccgccttccttggctacaaggctggaatgacacacattgtggtgaggtcgagaagcctggctccaagctccacaagaaggaaacttgtgaggctgtgactatcattgagactcctccccttgtcattgtcggacttgtggaatgtgaagaccccccgtggcctacgaaccctcaactctgtctgggcccaacaccttagcgaagaagtgcggagaaggttctacaagaactggtgcaagagcaagaagaaggctttctccaagtatgccctcaaatacgacagcgacgcaggcaagaaagaaatccagttgcagcttgagaaaattagaaagatgaagggtttgaagcagaagaaggctcacctcatggagatccaggtcaacggtggcactatagcagacaaggtggactatggttacaagttctttgaggaggtccctgttgatgctgtgttccagaaggacgagatgatcgacatcatcggagttaccaagggcaagggttatgaaggcgtggtcactcgctggggtgttacccggcttccccgcaagacccacaggggcctccgcaaggttgcctgtatcggtgcatggcatcctgctagggtgtcgtacactgttgctcgtgctggtcagaacggataccatcaccgcactgagatgaacaagaaggtttacaagattggcaaggccggacaggaaagccatgacgcctcaactgagtttgacaggaccgagaaggacatcactcccatgggtggtttcccccactacggtatcatcaagggcgactacctgatgatcaagggttgctgcgtcggccccaagaaaagggtggtgactctccgccagtctctgctgaagcagacgtctcggttggccctggaggagatcaagctcaagttcatcgacacctcgtccaagtttggacatgggcgcttccagaccacagacgagaagcagaggttctttggcaagctcaaggcctgagttgctgatggtgtcaagcgaaatggaaatgtattaccagatagttttttgtttttcagattcagctttgttggagatatcataagaacatgtttgatttgctagtctgagttgattctattgcgggcggctgaagttatattacctaatgaactcgaaagtcagcttgctagttgcgtgactttacctgcgctagcacttgccaattttgatggaatctcaaatcttcccgcacgcaatatgctcttgctcaattcagccgtttttttactgtaatcgttgtcagcacatctgtctacagtgaattaacgctgtaattgttctgaatttttaaaacaattatcttattattccat

SEQ ID NO: 215886 - DNA, 2223 bp, Zea Mays
atcacatccttgtagcagcatctgcattgacatcagaatgacattttctctgaagagaaacatcctgtcattcttcgttagcagctctgcaactattttgaagccttttttttgcagatgatgcgaatcaactttgtatagttagtttcgttgatgtacgcctgtaccatgttgtagtaaatgataaagagaataggagtcctcggatcatctgctcgtttgaaccattcagtcatcagccatcgaaaatagctgtctgctatattttttttcgtcagcgacgatctgtcagggtcagggacttttcattgcaacgagtgggacgaacttgtccactgaaaatgatgaggcccgacccgaagggacgcatcaaatccgaatgagcctgtgaagtcaagcactcgaagccttatctgggaaacaaaatgctattcctgatctgacggaagcatccaccaatacagctagtttgggtacacacgctgaaccagctagttcgcctgggagaggtctctgtcttgtttacatgccatcgtctagaagttgtctcggaaaaattttaagcgaatgttgcaatgaacagagttccttttgttgctgtgatttgtcattggtcgaagaggactaactgcagcgtttgtctacctacaatacttgtttctttgttgttgctgtcttgtagtgccagcagcgatgcctccttgttcgtgctcggcaagtcggccggtgtgagcaaaatccgtacgtcatcgtctccagtggtgccattctccgtggctctgcacacggtcggggactcggcggccttgctggatcatttgtgccgccaaacgtgaagtccttcccgagggatgacccaaagaagccctgtcacctcaccgccttccttggctacaaggctggaatgacacacattgtggtgaggtcgagaagcctggctccaagctccacaagaaggaaacttgtgaggctgtgactatcattgagactcctccccttgtcattgtcggacttgtggaatgtgaagaccccccgtggcctacgaaccctcaactctgtctgggcccaacaccttagcgaagaagtgcggagaaggttctacaagaactggtgcaagagcaagaagaaggctttctccaagtatgccctcaaatacgacagcgacgcaggcaagaaagaaatccagttgcagcttgagaaaattagaaagatgaagggtttgaagcagaagaaggctcacctcatggagatccaggtcaacggtggcactatagcagacaaggtggactatggttacaagttctttgaggaggtccctgttgatgctgtgttccagaaggacgagatgatcgacatcatcggagttaccaagggcaagggttatgaaggcgtggtcactcgctggggtgttacccggcttccccgcaagacccacaggggcctccgcaaggttgcctgtatcggtgcatggcatcctgctagggtgtcgtacactgttgctcgtgctggtcagaacggataccatcaccgcactgagatgaacaagaaggtttacaagattggcaaggccggacaggaaagccatgacgcctcaactgagtttgacaggaccgagaaggacatcactcccatgggtggtttcccccactacggtatcatcaagggcgactacctgatgatcaagggttgctgcgtcggccccaagaaaagggtggtgactctccgccagtctctgctgaagcagacgtctcggttggccctggaggagatcaagctcaagttcatcgacacctcgtccaagtttggacatgggcgcttccagaccacagacgagaagcagaggttctttggcaagctcaaggcctgagttgctgatggtgtcaagcgaaatggaaatgtattaccagatagttttttgtttttcagattcagctttgttggagatatcataagaacatgtttgatttgctagtctgagttgattctattgcgggcggctgaagttatattacctaatgaactcgaaagtcagcttgctagttgcgtgactttacctgcgctagcacttgccaattttgatggaatctcaaatcttcccgcacgcaatatgctcttgctcaattcagccgtttttttactgtaatcgttgtcagcacatctgtctacagtgaattaacgctgtaattgttctgaatttttaaaacaattatcttattattccat

SEQ ID NO: 215887 - DNA, 2650 bp, Zea Mays
gtattaactgctccgtggaggcgtggacggtggtctctctcggtccctgcctgcgtctgtgtctgtgcgtgtggccgtggcccgcgattctttttattttgttttctgccggccctttatgttcgcctttctccctttcgctgcaccaaaccgcggagaaatttagatgcacaccgcccccgagttgtagttgtagccgactataaatagttgggggctgggagggcgagctcctcactgccaaccacacgttcccaagccagccattggttggtagcaagccaagctaatcaagctagctttagatacccgctcccgctcttcttccctccgacgaagtcagctgacgatatatacagcaggctagcttcggagttcggggcactcagcgatggccattgccggcgctcttctcctcctgctcggactcctcgcgcgggaggccgctgccggcgggtggcagagcgcgcacgccacgttctacggcggcggggacgcgtccggcacaatgggcggcgcctgcgggtacggcaacctgtacagcacggggtacggcacgagcacggcggcgctgagcacggcgctgttcaacgacggcgcggcgtgcgggtcctgctacgagctgcggtgcgacaacgacgggcggtggtgcctgccgggcaccatcaccgtcacggccaccaacttctgcccgcccaactacggcctccccagcgacgacggcggctggtgcaacccgccgcgcccgcacttcgacatggccgagccggccttcctccgcatcgcgcagtaccgcgccggcatcgtgcccgtcgcgttcaggaggtacttcagttgctcttcacatgctgtgctgcctgcgactcggcggtggtcacgcacactgcactgcactgcacacgtgacacatgcacgccggcccccagctgctacgacggctcgcaccaccaccacctacgtcctggctcgatcaattcgatttcaaaacgacccaaacgcgtcggacgtcggttcgaaggttggtgggcccggagcctaagttcggcccattagtttagtgggccaccctgcagatttgatacgggcgtggggataggctagtctgtggctgcagctgcagctgcagctgcaggcggcgcgcatgtgccctcagccctgccactgctgccagtgtcgcacctcgctcccataccaactctcggccgtcccaacccagtaaaacctcagtcacgcacgcacgtacgtagtgaccgttatttgcatgtgacgcgctgacctacgtagacagtaccagcaccgacgatttacttaatgttgttatatagctaacgtcgtataacttgccaacgctcgatcccattagctaacgtcgttcttaacccgacattaattaatctacatgtctatggcgcagagtgccgtgcgtgaagaagggcggcatccggttcaccatcaacgggcactcctacttcaacctggtgctggtgaccaacgtggcgggcgccggcgacgtgcgctccgtctccatccggggctcccgcacggggtggcagcccatgtcccggaactggggccagaactggcagagcaactcgtacctggacaggcaggcgctctcgttccaggtcaccgccagcgacggccgcaccgtcaccagcaacggcgccgtccccgctggctggcagttcggccagaccttcgagggcggccagttctgaggatgaacagctagcgcgcgcgcggctagctattggataattagttacggtactgtcgatttgtttgtttttttttttttttttgcgcgtgatgatcgagtgcatgcaagagaaagagacgacgaggagaacgacgaagacgaagacgaagcctctctccgggtatattgaaggaaggagaaggctttgcgcgcgctatgctgaggctgctaatctagcacccgcctagacgtttcccttttctcttctctggtggattacggactggatcggaccaaagatcgatccagctcctagtactaataatatagttgtacttgagaaaaatgaaataattgtaatttattgtttttttggggacctttgatattattgtactcgcgcgcgccggccttgcgtggaaattgaagttcgcaataaggccggccgccggcttttattcagcgtgccctctcgtcccttcagtagcttctggtgtgtagcagcgcggtggtgacttttggtgtttgctagggtgtaagtaacgccaccacgtacgtatcttcgcacatgggtggggcaagcatgtcctgtgtgctgacttgaattcccgcggccgcgaccggtgtcggctgcgtctgccggtgtggaatgcagccgtcgtgcactagcactactggtcctcttcagtagcctctattgacttattgagaagctagcttgtgtgcatcatccgtagatttgcttacccacggttcattacccctttctctgcgctgctgggcctgcctgtctgatgtgatgcatctctcgggcgacgcgcttactttgatcgacgttctgttcaggcttctctgtctctaactctctctatgtatatactccttccgtccctcaaatatcaatgtatgtgttatatatctatatatgtctatatttattctcatttattt

SEQ ID NO: 215888 - DNA, 5783 bp, Zea Mays
cccggataggtggaaaactggaaatgtgatggaagaagaatgatggatcagtgtgtcgtgtactcgtgtgcaagccgtaagttttggtttgtggtaggtgtaggccctgggccaaggaaggaaccgggcacccgccactcctttgaccgccatggccgcgtcgccgtcacgacgactgacgccatgtgccaccgcctttgtcgcccctgtataaaagtccgcacatgtcagtcacgggcctctgccgctgcagcgatggcagcaacaccggcctgggactgggaggaatcgcttgtattcttcctgcagccgttcttcctccacggcgtgagcgccgcggcccaccttatcctggcgctcgccgtcgcgggacgcttgctctttcgccgcctctccgccagccggaccaaggacggggaggtgggcggaggagatgctagccgcggcgttggccggtttcggtactggtacggggtctctgtctgcaccacgtgggctatgggtgcgttcgaggtcctcctcgccgtctactcatggtacgcgaacggcggcgccgggtggtcgcgcgacgcggtcgttgaacaggtggacgcggccgcgcgcgcggtgtcgtggctgctgctcgccgcgtacctgcagttcgatttctggtggcgtcggcagcgccaggagcggttccccgtggcgctcaggctttggttggcgctcttcatgctgctctccgtagtcaccgtcggcgttcacgcggcgatgatcctcgacgggtcccttgtgcccggtcgatcgtgggcgctcgacgcagtctctgttactgcagcagcggttctactctcagtctcagctgggttcttcggaaggaaggagggagagggaggcggccatgcttccgaggcgcatgaacctctgctgaacggcgcgcacgaggggtccggtgacgacgacgagaacagcagcagcgccgccgacgcatccttgttcactggcgccggctttcttagcgtgctcaccttctcttggatgacgcccctgctcggcgtgggtcacaggaagaccctcgtcccggaggatgtcccgggcctcgaaccaggcgacagcgttgctggcgtcctcccgcccttcaaggccaaccttgaggcgctcaccggcgacggcggcaggtcgagccggaaggccgtcactgcgttcaagctcaccaaggccctgttgcgcaccctacggtggcacgtcgcggtgaccgcgttctacacgctggtctactgcgtcgccgtctacgtcgggccgtacctcatagactccctggtccagtacctgtacctcaacggcgacgagaggtacgcgagcaaggggcagctcctcgtactcgccttcgtcgtggccaaggtgctcgagtgcctgtcgcagcggcacttgttcttccggttgcagcaagcggggatacgagcgcggtcggcgctcgtcgcagtcctgtaccagaagagcctcgcgctttccagccagtcgaggcggagccacacgagcggagagatgatcaacatcgtcagcgtcgacgccgaccgcgtcggcatcttctcatggtacctgcacgaggtctggcaggtaccgctgcaagtagtcatggcgatgttcatcctgtactccaccctcggggtggcctcgctcgccgcgctcggtgccaccgtggccaccggcctcgccaccgtgcccctgggaagaatgcaggagcggttccaggagaagctgatggacagcaaggacgggaggatgaaggcgacgtcggagatcctgcacagcatgaggatcctgaagctgcaggggtgggagatgaggttcctgtccaagatcatcgagctgaggaagacagaggcgaactggctaaagagatacctctacacgtcggccaccatgaccttcatcttctggggcaccccaaccttcgtcgccgtggtgaccttcggagcctgcatgctcatggggatccccttggagacggggaagatgctgtcagcactggccacgttccgcgtgctggaggaacccatatacgaacttccgggcactatcgcgatggtgatcaagaccaaggtgtctcttgacaggatagcatcgttcctgtgcctcgacgagctacccagtgacgccgtgcagaggcttccacgtggaagctctgccgacttcgcagtcagcgtcggcaacgggtgcttctcatgggaagcctcgcctgatgctccaacactgaaggacctcaacttccaagctaggccaggcatgcgcgtcgcggtctgtgggacagttggctccggcaagtccagcctgctatcctgcattctcggcgagattccgaagttgtcgggagaggtccggacctgtgggacgacagcgtacgtcagccagtcggcgtggatacagagcggcaaaattcaggagaacatactgttcggtatggagatggacagagacaagtacgacagggtgctcgagtcgtgcgcgctcaagaaagacttggagaacctgccgtttggcgaccagacagtcatcggcgagcgaggcatcaacctcagtggaggccagaagcagaggatccagatagcacgcgctctgtatcaggacgccgacgtctatctgttcgacgatccgttcagcgcagtcgatgcgcatacaggatcccacattttcaaggaatgcttgcttgcggatttggcttcaaaaacagtggtttatgttactcatcagattgaattcctacctgccgccgatctcatccttgtcatgaaagatgggaggatagcacaggcaggaagatacgacgaaatactgggttcaggcgaagagttcatggagctggtgggtgcccacgaggagtctctaacagcactggatgtggtcgatgccatgaacgagaacgaagccaacgtgtcatcctctcccagcagcaggatagagacgccgaacctgtccagatccctgtcgttagctgagaagaaacatggcgccaccaacgaggctgaaggggacgacgacgatgctcggagcgggcagctggtgcaggaggaagaaagggagaaaggcagggtggggttctgggtctactgggagtacctcacgcaagcctacaagggcgccctcgtgccgttggtgttgctggcgcagacgctctttcagatcatgcagattgccagtaactactggatggcttgggctactccggcgtcgaaggatgccgagcctccggtgagcgcgcccacgctgctcttcgtctacgtcgtgctggctctcggaagctcgctgtgcatcctcgtaagatcgctgctccttgcgacggctgcgtacaagacagcgactctgctgttcaacaagatgcacctgtccatattcagagctcccatgtctttcttcgattccactcccagcgggcgcatcttgaacagggcttcaactgatcaaagcgaggtggacaccaacatcgctgaccagatgggcaccgttgcattctccatcatccagctcgtcggaattactgcggtgatgtctcaggtcgcatggcaggtctttgtggttttcgtccctgtatttgctgcatgtgtctggtaccagcggtactacattgacacggcaagggagctgcaaaggctagtaggagtgtgcagagctccaatcatacagcacttcgcagagtcgatagcggggtcgagcaccatcagaagtttcggcaaggaagaccagttcgtgtcgactaacagccgtctaacagatgcctactcccggcccaagttctacaacgccggagcgagggagtggctttgctttcgcttggacgtgctgtcctctcttgcgttcgccttctccctgatctttctgatcaacctaccggccggtctcatcgatccaggcattgctggccttgcgatcacgtacgggcttactctgaacacgctgcaagcacaggttgtctggagcatgtgcactttggagaacaagatcatatcagtagagagaatcctacagtacatgggcgttcctgcagagcccccgcttgtcatgccagaaaacaagttggctcagagctggccatcgaatggagaaatccagcttcagaatctccatgtgaaatatgcgccgcagctgccgttcgttctgaagggccttacggtcgcttttccgggcggcgtgaagactggcattgtcggaagaacagggagcgggaaatcaaccctaatccagtccctcttccgcatcgtcgaccctgctgtcggccagatagtgatagacggcatcgacatccgcacggttgggctgcatgatctgaggtccaggctgagcatcattccacaggagccgacgatgttcgaaggaactgtcaggagcaaccttgaccctcttggggagtactccgacgatcagatctgggaggctttggattgctgtcagctaggggacgaagtcaggaagcaggagctgaagctcgactcaccagtggtagagaacggtgagaactggagcgtgggccagcgccagctcgtgtgccttggcagggtgatcctgaaacggagcaaggttcttgttctggacgaagccactgcctcggtggacactgcaaccgacggcttgatccagagaacgctgaggcggcagttcaaggagaccaccgtcatcacgatagcgcacaggatcacgtcggttcttgacagccacatggtgctgctccttgacaacggcgtggccgtcgagcacgacaggccggacaagttgctggaggacaagtcgtctctgttctcaaagctcgtagcagaatacaccatgcggtcggtgcttacatagcagaccacagaccagcatacaagagacgactgaagatggggtcataaatatatgatgacaccttttaagttttactagaaaccaaaaaggtctcgcgaaaggccttggacccattattacgcaatgtcatctcttcgtgggccaggggaggaatgtctgacaaaatggatcgacatgagatcggatcaactcaagctcgtgcgactcactaaattcaaacgttatccacagcagtgatacgattctcccgcgtagcgccctcaaacgtcggaactgaatgatgataagtcggcaggattatagaaagataagctcagtcggttcactattacttaggcgcacattgttatcatatccacatgtaacaccccacggtcaaatatataaggcttagggggcaccccatcaaacaactcactcattagccgtctacccagctctctagcatccctcgtactagagaactcccctctaaccaaccacataaaagatccacaccaggaagtagggtgttacgcctctctaagcggcccgaacctgtataaaattatccactatctctcgtgcatctagcacgaaccatcgagctacaatcggtaacaccgtcctactccaaaaagcacctcgagccctcgtggggcaacctcaggtgtgcggtcggacccaaaacaccgacagatggagagatagaatgtcagccattcagatctgaaatcaccaaaaacaagtgacaaaaccaacatacgtggaatgaacatgctatagactctgacctgcccccagttgaaagggaaatgtgccattgggacatttccaagtattttggtgattgagtgccaacacaagtgcttaagtgctaatctatgccaattgatggacaaagtgcaaatcaagaggaaaggtatgtttctaagacttagtacattgttttggagactaatgtattgtgtctaagtgctagaaacagg

SEQ ID NO: 215889 - DNA, 1787 bp, Zea Mays
tcctcctcctgtgcgaaactgggcaccccagccctaattcaacctatttgcctatctttgctaggactacatgaatggatcatatactagctcgttaagcctccatgatgtcagtgtcgacgatggacaatcagctcttgataacagcagtagaacctctagtccttttgatatcctgactcctcaagatgttatccctatcgaaacggcaaggtctagattcttggacctcgttgttgaaagctttatctgtgagcatgttactgagttggtggaatgctctagctctgactgcagccaggtggatggcaaatcaagcaagagaaagcagcaggaggttcgatacgagggtgacccaagggttgctttgccattgatgtatatagcaaacctgtacgaaaccttgataagtgatgtcaatgtgcgtcttgcggcactgattgggttccgtgagaaaactataggtctagctcttgaagcttcaggtggcttgtacaggaaactgatccagaggttcccaaagagaggccactgcagcttcaagaggagggagttagcgacttctcatgcaaccaggacaaagtttcctgaacttgtggtacaagaagaaaaacgagttcgttttgttgttattaacggattggcgattgtagagaggccagaaaatatgagaatggaagatgcggaatggttcaaaaggttgactggtcgaagtgaagttgctatttgttcaagagattacaaattctattcaccccggcataagatcaggcgttccccacaggcagcatttgacatccctgatacaagtgctttggcagaggatgagaactcttcattggtttgttcttcaggatttcgctcaccaaacgagatacaaaatcagcatcagtcaacatcaaagagacctatcgaacatctagaaaatcaaccctttttacaccttttccatcaagcagaagatgatagcatgcagcaagttcaacattgtgctcagttcccacccattcatcaatgtacgagcactccacatctatcagataacccccaacaccagcaacaggcttatttatctcaacatatatcttgcttgcaagttgggcaaggtcatcttggaggacgcatgcatattattccaaccagccctgcgaagttctgtgatgagtgtggctccccatatttgagggcgacatcgaagttctgctcagagtgtggtaccaagaggctaggaatgtgaggtgacttgatcaatgtgtatatgaatctgatgatgtagcaattgtagtcttatgtttgtaaaagggtctctagcgtaatggttaaggcagcccggcgaagttctgtgatgagtgtggctccccatatttgagggcaacatcaaagttctgctcagagtgaggtaccaagaggctaggaatgcgcggtgacttgatcaatgtgtatatgaatctgatgatgtagcaattgtagtcttatttgtaaaagggttatttgtaaaagggtctctagcgtaatggttaagttttcttttaagttttctgagtagcaactctggttgggccgttttagagtgggcggtgatatcttactagtgatgggggccagggtttggaaattttctcgagaccatgttttggtctcctttttaatataatactggaatgacggtcttttggaatgacggtctttctcttcccgaggagttttttttatgcctttaaagttgtgtgagaagtgtattcttgagatgatgactcagcagagagtatgcagccacctttactaga

SEQ ID NO: 215890 - DNA, 1655 bp, Zea Mays
ctcgcgggagctgtacgccgccgctccactcccaggctcccagctgcccttggcgaccgtcgccgccggccgccctactccgagctgttcaggacgctttgctggcgagcacccaccacaccagttgctaggactacatgaatggatcatatactagctcgttaagcctccatgatgtcagtgtcgacgatggacaatcagctcttgataacagcagtagaacctctagtccttttgatatcctgactcctcaagatgttatccctatcgaaacggcaagctctgactgcagccaggtggatggcaaatcaagcaagagaaagcagcaggaggtctagctcttgaagcttcaggtggcttgtacaggaaactgatccagaggttcccaaagagaggccactgcagcttcaagaggagggagttagcgacttctcatgcaaccaggacaaagtttcctgaacttgtggtacaagaagaaaaacgagttcgttttgttgttattaacggattggcgattgtagagaggccagaaaatatgagaatggaagatgcggaatggttcaaaaggttgactggtcgaagtgaagttgctatttgttcaagagattacaaattctattcaccccggcataagatcaggcgttccccacaggcagcatttgacatccctgatacaagtgctttggcagaggatgagaactcttcattggtttgttcttcaggatttcgctcaccaaacgagatacaaaatcagcatcagtcaacatcaaagagacctatcgaacatctagaaaatcaaccctttttacaccttttccatcaagcagaagatgatagcatgcagcaagttcaacattgtgctcagttcccacccattcatcaatgtacgagcactccacatctatcagataacccccaacaccagcaacaggcttatttatctcaacatatatcttgcttgcaagttgggcaaggtcatcttggaggacgcatgcatattattccaaccagccctgcgaagttctgtgatgagtgtggctccccatatttgagggcgacatcgaagttctgctcagagtgtggtaccaagaggctaggaatgtgaggtgacttgatcaatgtgtatatgaatctgatgatgtagcaattgtagtcttatgtttgtaaaagggtctctagcgtaatggttaaggcagcccggcgaagttctgtgatgagtgtggctccccatatttgagggcaacatcaaagttctgctcagagtgaggtaccaagaggctaggaatgcgcggtgacttgatcaatgtgtatatgaatctgatgatgtagcaattgtagtcttatttgtaaaagggttatttgtaaaagggtctctagcgtaatggttaagttttcttttaagttttctgagtagcaactctggttgggccgttttagagtgggcggtgatatcttactagtgatgggggccagggtttggaaattttctcgagaccatgttttggtctcctttttaatataatactggaatgacggtcttttggaatgacggtctttctcttcccgaggagttttttttatgcctttaaagttgtgtgagaagtgtattcttgagatgatgactcagcagagagtatgcagccacctttactaga

SEQ ID NO: 215891 - DNA, 1651 bp, Zea Mays
ctcgcgggagctgtacgccgccgctccactcccaggctcccagctgcccttggcgaccgtcgccgccggccgccctactccgagctgttcaggacgctttgctggcgagcacccaccacaccagatgttatccctatcgaaacggcaagctctgactgcagccaggtggatggcaaatcaagcaagagaaagcagcaggaggttcgatacgagggtgacccaagggttgctttgccattgatgtatatagcaaacctgtacgaaaccttgataagtgatgtcaatgtgcgtcttgcggcactgattgggttccgtgagaaaactataggtctagctcttgaagcttcaggtggcttgtacaggaaactgatccagaggttcccaaagagaggccactgcagcttcaagaggagggagttagcgacttctcatgcaaccaggacaaagtttcctgaacttgtggtacaagaagaaaaacgagttcgttttgttgttattaacggattggcgattgtagagaggccagaaaatatgagaatggaagatgcggaatggttcaaaaggttgactggtcgaagtgaagttgctatttgttcaagagattacaaattctattcaccccggcataagatcaggcgttccccacaggcagcatttgacatccctgatacaagtgctttggcagaggatgagaactcttcattggtttgttcttcaggatttcgctcaccaaacgagatacaaaatcagcatcagtcaacatcaaagagacctatcgaacatctagaaaatcaaccctttttacaccttttccatcaagcagaagatgatagcatgcagcaagttcaacattgtgctcagttcccacccattcatcaatgtacgagcactccacatctatcagataacccccaacaccagcaacaggcttatttatctcaacatatatcttgcttgcaagttgggcaaggtcatcttggaggacgcatgcatattattccaaccagccctgcgaagttctgtgatgagtgtggctccccatatttgagggcgacatcgaagttctgctcagagtgtggtaccaagaggctaggaatgtgaggtgacttgatcaatgtgtatatgaatctgatgatgtagcaattgtagtcttatgtttgtaaaagggtctctagcgtaatggttaaggcagcccggcgaagttctgtgatgagtgtggctccccatatttgagggcaacatcaaagttctgctcagagtgaggtaccaagaggctaggaatgcgcggtgacttgatcaatgtgtatatgaatctgatgatgtagcaattgtagtcttatttgtaaaagggttatttgtaaaagggtctctagcgtaatggttaagttttcttttaagttttctgagtagcaactctggttgggccgttttagagtgggcggtgatatcttactagtgatgggggccagggtttggaaattttctcgagaccatgttttggtctcctttttaatataatactggaatgacggtcttttggaatgacggtctttctcttcccgaggagttttttttatgcctttaaagttgtgtgagaagtgtattcttgagatgatgactcagcagagagtatgcagccacctttactaga

SEQ ID NO: 215892 - DNA, 1706 bp, Zea Mays
cttggcccgactcgcgggagctgtacgccgccgctccactcccaggctcccagctgcccttggcgaccgtcgccgccggccgccctactccgagctgttcaggacgctttgctggcgagcacccaccacaccagttgctaggactacatgaatggatcatatactagctcgttaagcctccatgatgtcagtgtcgacgatggacaatcagctcttgataacagcagtagaacctctagtccttttgatatcctgactcctcaagatgttatccctatcgaaacggcaagctctgactgcagccaggtggatggcaaatcaagcaagagaaagcagcaggaggttcgatacgagggtgacccaagggttgctttgccattgatgtctagctcttgaagcttcaggtggcttgtacaggaaactgatccagaggttcccaaagagaggccactgcagcttcaagaggagggagttagcgacttctcatgcaaccaggacaaagtttcctgaacttgtggtacaagaagaaaaacgagttcgttttgttgttattaacggattggcgattgtagagaggccagaaaatatgagaatggaagatgcggaatggttcaaaaggttgactggtcgaagtgaagttgctatttgttcaagagattacaaattctattcaccccggcataagatcaggcgttccccacaggcagcatttgacatccctgatacaagtgctttggcagaggatgagaactcttcattggtttgttcttcaggatttcgctcaccaaacgagatacaaaatcagcatcagtcaacatcaaagagacctatcgaacatctagaaaatcaaccctttttacaccttttccatcaagcagaagatgatagcatgcagcaagttcaacattgtgctcagttcccacccattcatcaatgtacgagcactccacatctatcagataacccccaacaccagcaacaggcttatttatctcaacatatatcttgcttgcaagttgggcaaggtcatcttggaggacgcatgcatattattccaaccagccctgcgaagttctgtgatgagtgtggctccccatatttgagggcgacatcgaagttctgctcagagtgtggtaccaagaggctaggaatgtgaggtgacttgatcaatgtgtatatgaatctgatgatgtagcaattgtagtcttatgtttgtaaaagggtctctagcgtaatggttaaggcagcccggcgaagttctgtgatgagtgtggctccccatatttgagggcaacatcaaagttctgctcagagtgaggtaccaagaggctaggaatgcgcggtgacttgatcaatgtgtatatgaatctgatgatgtagcaattgtagtcttatttgtaaaagggttatttgtaaaagggtctctagcgtaatggttaagttttcttttaagttttctgagtagcaactctggttgggccgttttagagtgggcggtgatatcttactagtgatgggggccagggtttggaaattttctcgagaccatgttttggtctcctttttaatataatactggaatgacggtcttttggaatgacggtctttctcttcccgaggagttttttttatgcctttaaagttgtgtgagaagtgtattcttgagatgatgactcagcagagagtatgcagccacctttactaga

SEQ ID NO: 215893 - DNA, 1862 bp, Zea Mays
ctcgccttggcccgactcgcgggagctgtacgccgccgctccactcccaggctcccagctgcccttggcgaccgtcgccgccggccgccctactccgagctgttcaggacgctttgctggcgagcacccaccacaccaggactacatgaatggatcatatactagctcgttaagcctccatgatgtcagtgtcgacgatggacaatcagctcttgataacagcagtagaacctctagtccttttgatatcctgactcctcaagatgttatccctatcgaaacggcaaggtctagattcttggacctcgttgttgaaagctttatctgtgagcatgttactgagttggtggaatgctctagctctgactgcagccaggtggatggcaaatcaagcaagagaaagcagcaggaggttcgatacgagggtgacccaagggttgctttgccattgatgtatatagcaaacctgtacgaaaccttgataagtgatgtcaatgtgcgtcttgcggcactgattgggttccgtgagaaaactataggtctagctcttgaagcttcaggtggcttgtacaggaaactgatccagaggttcccaaagagaggccactgcagcttcaagaggagggagttagcgacttctcatgcaaccaggacaaagtttcctgaacttgtggtacaagaagaaaaacgagttcgttttgttgttattaacggattggcgattgtagagaggccagaaaatatgagaatggaagatgcggaatggttcaaaaggttgactggtcgaagtgaagttgctatttgttcaagagattacaaattctattcaccccggcataagatcaggcgttccccacaggcagcatttgacatccctgatacaagtgctttggcagaggatgagaactcttcattggtttgttcttcaggatttcgctcaccaaacgagatacaaaatcagcatcagtcaacatcaaagagacctatcgaacatctagaaaatcaaccctttttacaccttttccatcaagcagaagatgatagcatgcagcaagttcaacattgtgctcagttcccacccattcatcaatgtacgagcactccacatctatcagataacccccaacaccagcaacaggcttatttatctcaacatatatcttgcttgcaagttgggcaaggtcatcttggaggacgcatgcatattattccaaccagccctgcgaagttctgtgatgagtgtggctccccatatttgagggcgacatcgaagttctgctcagagtgtggtaccaagaggctaggaatgtgaggtgacttgatcaatgtgtatatgaatctgatgatgtagcaattgtagtcttatgtttgtaaaagggtctctagcgtaatggttaaggcagcccggcgaagttctgtgatgagtgtggctccccatatttgagggcaacatcaaagttctgctcagagtgaggtaccaagaggctaggaatgcgcggtgacttgatcaatgtgtatatgaatctgatgatgtagcaattgtagtcttatttgtaaaagggttatttgtaaaagggtctctagcgtaatggttaagttttcttttaagttttctgagtagcaactctggttgggccgttttagagtgggcggtgatatcttactagtgatgggggccagggtttggaaattttctcgagaccatgttttggtctcctttttaatataatactggaatgacggtcttttggaatgacggtctttctcttcccgaggagttttttttatgcctttaaagttgtgtgagaagtgtattcttgagatgatgactcagcagagagtatgcagccacctttactaga

SEQ ID NO: 215894 - DNA, 1798 bp, Zea Mays
gtttgttactatttcccactgatgccttgctcttcttgagtcagtcggataatagctattattatttttctcatgccttttggtttggaatatgaatattcaattttttttcttgaacacagaatatccatgatgttaaaacttgccactttgtcttttacagtgagctagcaatatactctagagcttatgtatttgttttaaaatcatgttcatcattcatcttatttttataagtcaataagtttgctaatagttttttttctgcatgactgcaactattttgaggggttggatgcaatgccaacctgttaatctctctttgtagcagggttgggttttactgaggttgcaaaagcccgtgcgagtacaaacaaagttgtttgttgccatttctcattggatgggaaacttcttgccaccggagggcatgataaaaaggtgtggatgccaagatgaaacgaatttgcctttacgcgataaagaaatttcatgctacatgtttctttttcaggtcgttttatggtttacagatgtgctaaaacgtaaatccgcattagaagagcactcttccctaattacagatgtccgattcagccctggcatgacccgccttgccacatcttcctttgacaaaaccgtgcgggtttgggacgctgacaatccagattattcgctacgcacttttacaggtcattcagcatctgtcatgtcacttgattttcatccgaacaaagaagacatcgtttgttcgtgtgatagtgatggtgaagtgcggtgttggagcataaataatggtagttgtgtgacctgcgttagggttttcaatggaggagctactcggttaagatttcaacctcgccagggtaaatatctggcagctgcctcagaaaagggaatatccatactggatgcggagacattacaagtttgtagaactcctttgcagggccacgtacagattattcagtcagtatgttgggatgccgcgggcaactatctggcgtctgtcagtgaagattctgtcagggtgtggtcatttacctcagggaactacatcgaatgcatacatgagctgatctgcagcgggaacaagttccattcgtgtgtttttcacccaaattacccgaatttgcttataatcggttgttatgagtccctagagctttgggacataagggagaagaacacggtgacaatcagcaacgctcatgacggcatggttgctgccctagccgcgtcaagtgcatcggggctggttgcatcagtgagtcatgatcagctcgttaagctctggaggtgacactgaacacagcaacgctcgtctgtgtcattctcatttccagtgtcgtggcaaaagcgaaagggcagctgatctgatctcctaggttgatttgcgactgtggcatgcgcaaactattcaaatagttgtcagtaatgtgcttcccttatttctttgtttgtttatccatgccgggtgatactatgttacaattttatctatttagagaactgctattataatttgacctcccacttaggcctatttggctactctagtatttattccaatccatgtgtattgaagtgggttagggtgtaaattagtttaatttatacacaattcaactcaatacatgtggatttagttgaatactagggattaatgtaaatactatagtatccaaataaagtaggcttatgttcatttcatcccctagtccacggggattgaaggagattggagtggactgatagtggttttgagtttatcccccatgagtttgataaaaacgaa

SEQ ID NO: 215895 - DNA, 3306 bp, Zea Mays
ctctcgcctcccgccgttacagcttgcagctccagccccaacccccgtccctctctccctgagccgtcgccttcgccttcgctgcgaaatctagggtttacgccgcgcatcgggtaccgcgcacgcaccgaccgaccacccggcggtcggcgccgctacacgcgggctcgctctcaggtggttgagcgtggccggagaaggggaggggcgacactgctcgtgggtgggtcagccagtgtgccccacgaggaacggcaatcatgtcgcagacgaactgggaggcggataagatgctggatgtgtacatatatgactattttgtcaagagaaacctgcaggcaaccgcaaaggccttccaagcagaaggcaaggtctcatcagatccagttgctattgatgctcctggtggctttctctttgagtggtggtctgtattttgggatatattcatagcaagaacaaatgagaagcattcagatgttgcagcatcatatatcgagactcagctaattaaagcaagggaacaacaacaccagcagccacctcaacaacagcaacagcagcagcaaatacaaatgcaacaaatgctgttacatagagctgcacagcagcagcaacagcagcagcgtagagatggttctcttctcaatggtactgcaagtggattttctgggaatgatcctttaatccgacaaaatccagctaatgcgaattcgatggcagcaaaaatgtatgaagagaggttaaagctccctccccagcgggattctctggatgaggcgtcaataaagttgcagcaaagatatggagaaaatgtgggacaagtaattgatccgaaccaagcactattgaaagcagctgcagctggacaatcctctgggcaaattttgcatgggactgctagtggtttgtcaggtactccgcaacaagttcaggcaagaagcccacaacaaccacctacagcagaacagaatatcaggaccgagatcaatccagtgttgacaccaagagcagcaggcactgagggttcattgattggtatccaaggatctaatcaggctggaaacaatttaactctgaaaggctggccgctcacgggacttgatcattttcgctctggaattctgcagcagaagccatttatgcaatctccacagcaatttcagcagctccagtttctgaccccacagcagcagcagcagcttttgctgcacgctcagcaaaatctgtcgtcctcgatgtcaagcgatgttgataccaggagattaaggatgcttcttaacaacaggaatgtggtccttggacaggatgggcagacaaatagcggcggtgatgttatcccaaatattggttcgccagggcaaagtggtggatcgcgtaatgatatagatatactaataaagaagaaatttgctcttctacagcagcagcagcagcagcaaagtcatagccagcagcagcagcttcagcaacctgcgctctctggacagcaatctcaaagttcaaaccagcttctccatcagcatggaaaaccaggagttgggagcttgcctattgatggaaacttgccaaactcttttggatttcctgaacaaggatcaaagaagagaaagaaacctgtctcatcctctggtagagctaatagttcaggaacagcgaacactgctgggccatctcctagctctgcaccctcaacaccatctactcacacgccaggagatgcaatgtccattccacagctgcagtataatggtggcccttcaaaaccattgatgatgtttggctctgatggcactggaagcttgacttctccagcaaacccgctgggtgatgttgaacgtctgttggaagatggttccttggatgaaaatgtagaatcttttttatcgcaagatgacatggatcctcgagaaacaatgggacgctgcatggattctagtaaagggttgggttttactgaggttgcaaaagcccgtgcgagtacaaacaaagttgtttgttgccatttctcattggatgggaaacttcttgccaccggagggcatgataaaaaggtcgttttatggtttacagatgtgctaaaacgtaaatccgcattagaagagcactcttccctaattacagatgtccgattcagccctggcatgacccgccttgccacatcttcctttgacaaaaccgtgcgggtttgggacgctgacaatccagattattcgctacgcacttttacaggtcattcagcatctgtcatgtcacttgattttcatccgaacaaagaagacatcgtttgttcgtgtgatagtgatggtgaagtgcggtgttggagcataaataatgggaggagctactcggttaagatttcaacctcgccagggtaaatatctggcagctgcctcagaaaagggaatatccatactggatgcggagacattacaagtttgtagaactcctttgcagggccacgtacagattattcagtcagtatgttgggatgccgcgggcaactatctggcgtctgtcagtgaagattctgtcagggtgtggtcatttacctcagggaactacatcgaatgcatacatgagctgatctgcagcgggaacaagttccattcgtgtgtttttcacccaaattacccgaatttgcttataatcggttgttatgagtccctagagctttgggacataagggagaagaacacggtgacaatcagcaacgctcatgacggcatggttgctgccctagccgcgtcaagtgcatcggggctggttgcatcagtgagtcatgatcagctcgttaagctctggaggtgacactgaacacagcaacgctcgtctgtgtcattctcatttccagtgtcgtggcaaaagcgaaagggcagctgatctgatctcctaggttgatttgcgactgtggcatgcgcaaactattcaaatagttgtcagtaatgtgcttcccttatttctttgtttgtttatccatgccgggtgatactatgttacaattttatctatttagagaactgctattataatttgacctcccacttaggcctatttggctactctagtatttattccaatccatgtgtattgaagtgggttagggtgtaaattagtttaatttatacacaattcaactcaatacatgtggatttagttgaatactagggattaatgtaaatactatagtatccaaataaagtaggcttatgttcatttcatcccctagtccacggggattgaaggagattggagtggactgatagtggttttgagtttatcccccatgagtttgataaaaacgaa

SEQ ID NO: 215896 - DNA, 3706 bp, Zea Mays
aatcaatagcacatcattactctactatacccaagtgagtgaaggcatttctgcactattgcaaaaaggtaccaccatgtatattactcaaccaaaaaaaaaggtaaatgaacacttgaaaaatatatacccagagttaactgcagagtattatatagtatctcctgagcaaccaacgcaatagtcatccaaccaaccccaagtgcactcacatttattctgctgcgccccgacccactgaaagaaagaaagaaagaaagaaagaaagaaagaaagaacaggctcccctagctccgcctgcccaaggcgcattgagtttgtcagtttcactgcccacggcatgggatcttggagacaaaaactgcctgggttaggcgagggctcaggctcaggctcacaggctgctgaggccggcggtggtgggagaggtttccgtggccgtggtggcttctaccatcaacagcagtccccacaaggtggtcgtggtcgtggaactggctactacagtggtggtggtggtggtagaggtggacgtggggcagtcccgtccgccatagctcccgagctgcgccaagcaatgcaaacttcaaatgaacctgataacatcccagcgccagaggcaggctcccagtcccaggatgcgccgtcaccaagcgaagaggctgtggatcagctgaaaggcttgtctgtacaggacattgtgcaggcgtttccagtgtcgagcaagttccctcaccgcccaggaaatggaagcgttggcaccaggtgtttggtgaaggcaaatcacttctttgctgaattattacctgccaagaaggatcttcatcagtatgatgtttcagttaccccggaagtgacatcgcgaattgtgaaccgttctgtcatggaggagctggtgaggctgcacaagctgtcatatttgggaggtcggcttccagcctatgatggtagaaagagcctgtacacggctggacccctgccattcacttcgaaagaatttcacatcactctactcgaggaagacgatggttctggagtagagaggcgtaagaagacatacaaggtagtgattaaatttgccgcaagggctgacctccggcgtctggagcagtttttagctggaaggcaggcagaggctcctcaagaagccttgcaagttcttgatattgttctgcgggagctgccgacaacaagatatgcaccgtttgggcgatcgtttttctctcctgacctggggaggaggcgttcccttggtgagggaatagaaagctggcgtgggttttaccagagcattcgccctactcaaatgggcttgtcattgaatattgatatgtctgcaactgctttctttgagccattacctgtcatagattttgttgcacagcttttaaacaccgacgacatctactcgaggcccctcttagacgctgaacgtgtcaagataaagaaggccttaagaggcgtgaaggtggaagttacgcaccgtggtaacatgcgacgcaagtatcgaatagctggtttaacatctcaggaaactcgggagctaacttttcctgttgatcaaggtggcacagtgaagtcagttgtacagtattttcaagagacctatggctttgccatccagcacacctacctgccctgtctgcaggttggcaaccagcagcacccaaattaccttccaatggaggtctgcaagatagtggagggacagaggtactctaagagattaaaccagagtcagataagagctcttttagaggagacatgccaacgcccacatgatcgtgagcgcgacattattcagatgatgaatcataactcttaccatgaggatccttatgctaaagagtttggcattaagatcagcgagcgtttggcttcgattgaggcacggattttacctgctcctcggctcaaatataatgaaaccggcagagagaaggactgtttgcctagagttgggcagtggaatatgatgaacaagaaaatggtaaacggtggcagagtgaggagctggacctgtgtgaattttgctcggaatgtgcaagagaatgttgctattggattctgccgtgaacttgctcggatgtgccaggcctcgggaatggacttcgcgctggagcctatccttccgcctatatacgcgcatcctgataaagtggagagagctctgaaagccaggttccatgacgcgatgaacttgctcggaccacagcgcagagaacaactcgacttgctgctcattggaatactccctgataacaacggttctctttatggtgatctgaagcgtatctgtgaaatcgaccttggattagtttcccagtgctgctgcgcaaagcaagtctttaagatgaacaagcagatactggcaaaccttgcgctgaagataaatgtcaaggtcggaggaaggaacacggtgctggctgatgcggtgtcaagacgcattcccttggtgactgacaggcctaccatcatattcggtgccgatgtgacccatcctcatcctggagaagatagcagcccttccattgctgctgttgtggcttcccaagactggcctgaggtgacaaagtatgctggtctagtttctgctcagtctcataggcaagagctgatagaggatctctacaacgtcacacacgatcctcagaaaggaaccgtttgtggtggcatggtcagggagcttcttatatccttcaaaaaatcaactggtcaaaagcctcagaggatactattctacagggatggtgtgagtgaagggcagttctaccaagttctactgcatgaactggatgctatccgaaaggcgtgtgcatcgctggaagcaaactaccaaccgcaggtgactttcatcgtcgtccagaaacgccaccataccaggctgttcgcgcacaaccacaacgaccagaattcggtcgacaggagcggcaacatacttcctggaactgtcgtggactcgaagatctgccaccctacagagttcgacttcttcctgtgcagccatgctggcatcaagggcaccagccgtcctgctcactaccatgtcttgtgggacgagaacaacttcacagccgacgcactgcagaccctcaccaacaacctttgctacacctacgcgaggtgcacgcgctctgtgtccattgtcccgccggcgtactacgctcacctggccgcattccgcgcccggttctacatggagcctgacagctcagacagcgggtcgctggcgagtggcgcccgtggaggcggagcgccctccagctcgtcaacgtcccgcagcacccgcgccaccgccggcggagccgttagacccctccccgcgctcaaggacagcgtcaagaaggtcatgttctactgctgatgaaccggagcatgaagatagtaggcagccctgcctgaaatctgatccgcttggtgctgttgtttggtcagtaataatctgcttgctattgacaaagccgtgctcagaagacatttgcttggtgtttgtttgatgaagggtggctagagtggtggattcgcttcctgcttgtactgagggacgaccgtacgtgaaagaatctaggtctttatttgtgtttggacgattaatagtaaaacacaagagtattttgttaagataaattatgagtttgtgtggtatttatggtcttattaatggagattaatcatcggttttcaaaggatgagcgaccaagtcaat

SEQ ID NO: 215897 - DNA, 850 bp, Zea Mays
ggtcgtccggagcttcagtcgggaagagaatagcaaggaagataaggaggctctcgccgtctcgcacaggctcgttgttcctcttatccgcggaggaagaaccttggcccgacaccatgctcccaatggccgtccaccccaccaccacgccggccttgtccccgcgcgcccgcgtctcgccgcacaggcctcccatctcctccctggcggacccctcgtcctccccctgccatcgcatcgtcagtttcaaaagcaggaggctgccacttcgctctctccacatcgccgctgccgctgccgccggggcagaggaagaagaggcgcaactaggtggaagtgtgaacgcggtcgacgaggaggaagcggagaataaggtggtggtgcccgagagacaggacccgatgctggtactcaagttcatctggatggagaagaacatcggcatagcactcgaccagctggttcctggctatggcagcatcccgttgagcccgtactacttctggccgcggaaggacgcgtgggaggagcttagagccaagttggaagagaaagagtggatctcgcagaagcagatgatcatccttctcaaccaggccaccgatatcatcaacctctggcagcagggtggtgggaacctgtcgacatgagtccctccccgccctgttctttcaaccgtgcaaagcttgcgttttgttggtttcactacaggctctctctgttgttaatgttaaaagtatggtacatggccttgtagatcggttcaaactgttctcaggttgtcctcctgacaaggaggtggagttccaatctgaattccagaatggacgcgtttggtgttgggaatccg

SEQ ID NO: 215898 - DNA, 3095 bp, Zea Mays
tctgtagatttttcaatggccgaggaggacaagggactgattgctattagagatctatttggtagtggtcagcagctgagggtgaaccgaagatgagcgttgtgggattcgacctcggcaatgagagctgcatcgtggcagtcgcgcggcagcgcggcatcgacgtggtcctcaacgaggagtccaagcgcgagaccccagccatcgtctgcttcggggacaagcagcggtttatcggtacggccggtgccgcgtcctcaaccatgaaccccagaaactccatctctcagatcaagcgcctgctcggccgcaagttctccgacccggaggtgcagagcgatatcgcctccttcccgttccgtgtcacggaggggcccgatggatttcccctggtccatgtacggttcctgggtgaggagcggacgttcacccccactcagctgcttgccatggtgctgtccaatctgaagagcattgccgaggggaacctgaagactgcggttgttgattgctgcattggcatccctgtgtacttcactgatttgcagcgcagggctgttcttgatgctgctactattgccggcctccggcctttgcggctattccatgagacaactgccacggcgttggcttatggcatttataagactgacctcccagagcatgaccagctaaacgtcgcgtttgttgatgttggtcatgctagcatgcaggtcagcattgtcggttacaagaagggacagctcaagatgctttcacatgcatatgaccgttctcttggcggcagggacttcgatgaggtcctcttcaagcactttgtggcaaagttcaaagaagagtacaagcttgacgtctaccagaatgcccgcgcatgccttaggttgcgtgtggcgtgtgagaagattaagaaggtgctgagtgccaacccagaggctccactgaacattgagtgcttgatggatgagaaggatgtgagagggtttattagaagggacgagtttgaacacatcagtgcacctgtgctggaacgtgtcaaaggacccttggagaaggccttgactgaagctggcttgacaactgaaaatgtgcacattgttgaggttgtcggatctggttctcgtgttccggccataatcaagataatcactgaattttttgggaaggagccaaggcgaaccatgaatgcaagtgagtgtgttgcacgaggatgtgctcttcagtgtgctatgctcagccccactttcaaagtgcgggaattccaggttaatgatgggtttcctttctcagttgcgttgtcatggaaacaagaatcccagaacagtgcaccccaacagacccttgtattcccaaaggggaatgcaattccgagcattaaatctctaacgttctataaattgagtacatttgaagttgatgttttgtatgtgggtacaggcgactcgcaaattccacaaaagataagcacttacacgattggccctttccaaccctccaaatgtgagaagaccaagctgaaagttaaagtgtgtctcagcatccatggcattgtcacagtggattcagcaatgatgctggaggaggatgtggaagttccagtctcatctgctaatgaagctctaaaggatactacaaagatggacacggatgatgcaccaagtgatcatgtttctggaactgatgcgaatatgcatgagcatagaagtgctgacactactgaggctcctgctgaaaatggagcacaagattctgaggaaaaatctgttccaatggaaactgatgcaaaggttgagccatcgaaaaggaaaattaagaaaacttctgttccgatccatgagttggtctacggcgcattgtctgccactgacctgcagaaggctgtagagaaagagtatgagatggctctgcaggacagagtaatggaagagaccaaagaaaagaaaaatgctgtggaagcttatgtctatgacatgcgtaacaagctgtacgacaagtataacgattttgtcacacccgaggagaaggaagggttgattgcaaagcttcaggaggttgaagattggctgtatgaagatggtgaggatgagacaaagggagtatatatttctaaactggaagagcttaaaaagattggcgatccaattgaggcacggcacaaggagtggacggaaaggggttcctctgtagatcaactggtgtattgtatcaatagtttcagagaggctgcatcgtccagtgaccagaagtttgaccatatcgacatatctgagaaacagaaggtcatcaatgaatgctctgaagcagagaactggttaagagagaggaaacagcagcaggatgccctaccgaagcatgctaatcctgtgctgctcgtatcggatctgaagaagaaagctgaaacacttgaccggttctgcaaaccgatcatgacaaaaccaaagccggctccaaagccacagactccgccaccacaacctgaaacccaagcatctgagcctcaaacaccagagcaacaacaaagccggtctggcggaactggtgagccgaggagtgagggaggtgtgcagcaggcctccggtgagcaaatggacatggacaatcctgaatctgctgatgctgccgcataagtttggttgccatctctatcttatgatcgatcaaaattttctgttagtgtctggtaggtggatgagttaaggcgacactagcattctcacaagcgatttcgttttaggcagttggattgaggtatatgcatcttgtccagcgttgtttagaaaaaaagttaggcaaaatatagcaagttttacataaacgttacatgatcgaaatgcaccatcggctataatcggatgtcgtggatgattcggtcaattataatttgcacttagattccttgagttaggctgcgtcacagctcaggtcatacatgtttctttgaagactacatgttctcgacagaacggaaagctattggtttttgtgcggatagaatttaagccttttttacgtggtgcacgttgtgaagtaattgctttgagtctcttgtgagctggtttaaccgtttatgttatcctttatctttgcctatgtacgag

SEQ ID NO: 215899 - DNA, 519 bp, Zea Mays
ggaggaggttgacagtagattgcaagaatatgagcaaggttttacctgaggggggcactggaacggtcggcgtggtccggcgaggccacgctgtcgcgtctggttggcgcgctcatcgcgttcaagccgctctactcggtattgaagctcgcctcccgggaggtcatcatcaggacgacggagaagtcgaacatcccgtggagggagatgacgaaggaggtgctggagtcggacgtgtacgaggtgttcgagagaatccaagacccaaacctcgtgtaccctgactactatctcaacctgtttcatgcctacgacgaagggaatctatcatggctggctgcaacagaggctgagcctgcaacaatgtcgatcgcaaagagggccatacctgaggctacatcaatcgaagaggccaaccaaatcgtctgcggcaactggctgaatgtaattgaggagcatcgtctgaagtacttggggagctctcaggtaacctggacattggctgctctgttggagtaa

SEQ ID NO: 215900 - DNA, 3028 bp, Zea Mays
cgctaggcaccgttgtggctgtgcggaactgcacaagagcgtttcgcctcggccaccacgaacggagaaggcggcagccatggccatggaggaagcggggaagatgacatgcaggaagaagggtggtctgagaacaatgcccttcatcttcgcaaacgaggtggcggagaagctcgccgtggtgggtttctcgaccaacatgctgacgtacctgaccactcagctgcacatgccgctggcgaaggccgccaccacgctcaccaacttcggcggcacctccgccgcgacgcccctcatcggtgccttcctcgccgacgcctgcatcggccggttctggaccatcgccgccgcgtccgtcgtctaccaagccgtacgtgcactgtggaaccctcttgccaagaaatgcatacagcatacgtcgtgggcgtggtgaactgcgcgcggctgcgagtgaatgaatgatcactgacgtccgtcgcgcacagggcatggcgctcctgacggtgtcagcggcgctgccgcggttccggccggcgccgtgcaagcccggcggcgcggtggcatgccaggaggccgcgccgtggcagctggcggtgctgtacgtgtccctgctcctgaacgcggtgggcgcgggcgggtaccgcccctgcatcgtggcgttcggggcggaccagttcgacgagtcgcgggcggcggagcgcgcgcggagctggggcttcttcaactggtactacttctgcaacggcgcgtccatgctgctggccgtcacggcggtggtgtacgtgcaggacaacgtgggctggggctggggcctcggcgtgccggccttctgcatgggcgtctccgtcgccgccttcgtggccgggtacccgatgtaccggaggctggagcccgcggggagcccgttcacgcggctcgcgcaggttgtcgtcgccgctgtcaagaagcggcggctgccggcggcggacgtcgaccccgcgttgctgtacgaggacgacgagctcgacgcgcccatctccatgtacggcaagcttgtgcacacggatcagctcagcttctttgaccgcgcggcgatcgtcaccgacggcgacctggtcacgctgacggacgcggactccggcaagccgtcgacggcccccgtcccggacctgtggcgcctgagcaccgtgcaccgcgtggaggagctcaagtcggtgatccgcatgggtcctatctgggcggcgggcatcctggtgatcacggggtcgtcgacgcagaacaccttctccctgcagcaggcgagcaccatggaccgccgcctcgcgccgggcctctccacgttcgagatccccgcggggtccatgaccgtcttcgggctgctggccatgctcttcaccctcttcgtctacgaccgcgcgctcatccgcgtggcgcgccgcttcacggggctggaccgcggcatctccttcctgcaccgcatgggcgtcggcttcgccatcagcgtgctcgccaccctggtcgccggcttcgtggagcggcaccgcagggacgcggcggcggcggccggcgccacggacgccggcacgtccccgctgtcggcctactggctggtgccgcagtacgcgctgcacggcgtggccgaggcgttcacctccgtggggcacctcgagttcatgtacgaccaggcgcccgagagcatgcgcagcacggcgacggcgctcttctggctgtccatctcgctgggaagctacgcgagcacgctgctggtggacgctgtgcaccgctggagcgcggggcccggcggcgccaactggctgccggacaacatcaatcacggcaagctggattacttttactgggtcgtcacggtactgcaggtcatgaacctggtgtactacgccatttgcgccaagcggttcacgttcaagccagtgcagctccacaagaaagaggaagaagaaggcggcaaggcacttgtggagttgcaagagaaggtttaatttgagcagcatgcactttcagctatgtgcaggtacatgtctaatagaaaggaagtactcatcagtgctaggaagatcctcagaaaaactcccaaggtattactatataaatctatgtgagcatcttcccctgtattagtcaagtagatcaagaatgcaggaaggttgttcaggcaagcaacctcagaaattgtcaaggatcacatgacagctttgtggatggcagaagctatctggtctggtcctgagacttggcacagattcgcagtagtagtgcacgaatagaccgttcaagaccgcgcggcgagacgcgaacctgtcgcgggacggggggtcagacggtgaacttgatctcgaagccggtggacggatccacgggctcggccgtggacgggacgacggcggtgacggtggcggctggggggccgacggggaggcggcgggttatcatgtcttcgatcttcgcggggtctccggagaggagggcctccacactgccgtcacggcggttgcggacccagccggcgaggccgagcgactcggccgtggacgcagtccagtcgcggaaccccacccccgtgacgcgccccttcaccaccacgcggactgccttccgtgcgggctccggctgcggcgcggatggtggcgtggcggcatcgggatcggcggaggacgccatggcgcggtggtgctggtacggttgtggacttgtggaagcagcgagactggagaccggagacggagagggacgagacgagacgagacggctgaagcaaggaactgctggaacattttggaaagtcaaggcctgccctagtaggacaacccaagcccggcccaaaaaaaatcgtgaccctgcgcggctgggtcgcactcgcggctcgtggcagaggctgtgatgggctacagttgtgggctttttaaccttcttttaaaaatgtgttattatttttctatattcgtagtgtcccttttccatggttacttctctccagcattgctacatatatttcttgcctttcggcttctgtcttttctatgcgttgatg

SEQ ID NO: 215901 - DNA, 1042 bp, Zea Mays
gttgaatatttatttcggcagcccagcagctaaggtagttgtttcgttgggctgagacctcccacgctatgttgggccgtgtgtgccatacgcgggcctcttcgtgacatccaatgcggttcccctcccctcctacagtcccacagcagacagcaccaccggataaggcaggcaaccgctgcccgctcacgtctggcgtctgggagcctccgattctgagagcagcccatggcgcggggcgcccacgtcgtccgagcactctcccagccacctcgttttgtccgagccagcagctgcgccaggccggtgccgggagcctcgcggcggcggcggcggggccggctcatggtggtgcgggccggtgggccgcccagcaccaacgcgctcatcctcgccttcgtgcttccgctctccctcttcgtcggcacgctcgtcaccgccgcccgcgtcgccgacgacctcgacgaccgcttcctgagggagatggagataaaccgagcgatactggaagagaacgaggcgtccgacgaggacggtgccggtgaggaagacgacgatggggaggaggaagagggggtcgacctgccggtggtggtggaggaggagcccgccgttgtcggtccacgcaccaggaacaggccgagaagacgagtgttctcttctcaatagtgttggttctgatttacaggattatgtgcaccaaaggttcgtgacgacgtagtgttttgaattcttgtaaggctcctcttcaaagcccacgccgaagcacatctgagtacttcaaatttaatgtatatccatatgagcaatctaacgagttcaagaattttaatttatcgcctgtgcaatcatagtggacagaagcgtggtccgggtcagtggccgatccaggggtaatttagatggaaaaattcctactatgccatcagattttatactcattccttatgtattattgagtaacatgtatgtatacttttttgtgtatgacatgtggggccgatgacatagaagtaacgagctctcgactacctgtagtctg

SEQ ID NO: 215902 - DNA, 1823 bp, Zea Mays
aataaattgttgtcatttgttaagcatattgcaaatctattaggacaatcgcggtctgcgccgtcagcctgccaagctcagcggggcggaggcaggccaaaccaacccacctccaacacaagcgaataaaagtctcgcgtctatcttcttccttccttccttcctaccaacctcccctccctccccacgcccaccgccccgcatccaccccgaaaccctagtggatcgtcgccatggccgcagccgccctcattcgccgcctccccgctgcccgggcccaggccccggcattcatggcggcgcgaccgatctccgactccacggcagcgttcaccatcgagacatctgtccctttcacctcccacctcgtcgacccaccctcgcgtgatgtcaccaccacccccgctgagctcgtcaccttcttccgcgacatgtccctcatgcgccgcatggagatcgcggccgactccctctacaaagccaagcttatccgtgggttctgccacctctacgacggccaggaggccgtcgccgtcggcatggaggccgccatcacccgctccgattccatcatcaccgcctaccgcgaccactgtacctacctcgcccgcggaggggacctcgtctccgccttctccgagctgatgggccgcgaggctgggtgctcccgcgggaagggcggatccatgcatttctacaagaaggacgccaatttctacggtgggcacggcatcgtaggcgctcaggtgcccctcggatgcggcctggccttcgctcaaaagtacaagaaggaggacacggccacgttcgcgctctatggtgacggtgcggctaaccagggacagctctttgaggctctcaacatttcggccctctggaagctgcctgccatattggtctgcgagaacaaccattatgggatgggaacagcggagtggagggcagcaaagagccctgcctactacaagcgtggcgactatgtgcctggattgaaggttgatggaatggatgttcttgctgtgaagcaagcgtgcaaatttgcaaaagatcatgctgtcgcaaatggcccaattgtccttgagatggatacctacagataccatggccactctatgtcagatccaggaagcacttaccgcaccagggatgagatttcaggtgtcaggcaggaacgggatccaattgaaagggttagaaagttgcttttgactcatgacctggcaaatgctgctgagctcaagaatatggagaaagaaatcaggaaacaagtagatgacgctattgctaaagcaaaggaaagttctatgcctgatacttctgaactcttcacaaatgtttataagaagggcttcggcgtggagtcatttgggccagacaggaaggagatgagagcttctcttccgtaggttggcagcatgatgaggcagtcctcattacatggtatgatagccaggaaaaataatttttgatgaaggcctcaggcattattggaatattttatcgggaaatgaacctgtatagagatgcgttgtctggaggatcagcttcgttgtttcgcccttttttcatttctacaattcagttttaactgctgctggctggcttcttattgaagctaatatcaccatccaagaaaaccgaagctagaggattataaatttgatcacacgtatcgtctagcactgcacggtgtttgcttgatcagtttctaactagcatggtacatgtaggacagtgcgtcattacacttccacctgtggattaatttttctacccagcgtggtgcatatgttgataaactgattttttttactaaaaaaaat

SEQ ID NO: 215903 - DNA, 1823 bp, Zea Mays
aataaattgttgtcatttgttaagcatattgcaaatctattaggacaatcgcggtctgcgccgtcagcctgccaagctcagcggggcggaggcaggccaaaccaacccacctccaacacaagcgaataaaagtctcgcgtctatcttcttccttccttccttcctaccaacctcccctccctccccacgcccaccgccccgcatccaccccgaaaccctagtggatcgtcgccatggccgcagccgccctcattcgccgcctccccgctgcccgggcccaggccccggcattcatggcggcgcgaccgatctccgactccacggcagcgttcaccatcgagacatctgtccctttcacctcccacctcgtcgacccaccctcgcgtgatgtcaccaccacccccgctgagctcgtcaccttcttccgcgacatgtccctcatgcgccgcatggagatcgcggccgactccctctacaaagccaagcttatccgtgggttctgccacctctacgacggccaggaggccgtcgccgtcggcatggaggccgccatcacccgctccgattccatcatcaccgcctaccgcgaccactgtacctacctcgcccgcggaggggacctcgtctccgccttctccgagctgatgggccgcgaggctgggtgctcccgcgggaagggcggatccatgcatttctacaagaaggacgccaatttctacggtgggcacggcatcgtaggcgctcaggtgcccctcggatgcggcctggccttcgctcaaaagtacaagaaggaggacacggccacgttcgcgctctatggtgacggtgcggctaaccagggacagctctttgaggctctcaacatttcggccctctggaagctgcctgccatattggtctgcgagaacaaccattatgggatgggaacagcggagtggagggcagcaaagagccctgcctactacaagcgtggcgactatgtgcctggattgaaggttgatggaatggatgttcttgctgtgaagcaagcgtgcaaatttgcaaaagatcatgctgtcgcaaatggcccaattgtccttgagatggatacctacagataccatggccactctatgtcagatccaggaagcacttaccgcaccagggatgagatttcaggtgtcaggcaggaacgggatccaattgaaagggttagaaagttgcttttgactcatgacctggcaaatgctgctgagctcaagaatatggagaaagaaatcaggaaacaagtagatgacgctattgctaaagcaaaggaaagttctatgcctgatacttctgaactcttcacaaatgtttataagaagggcttcggcgtggagtcatttgggccagacaggaaggagatgagagcttctcttccgtaggttggcagcatgatgaggcagtcctcattacatggtatgatagccaggaaaaataatttttgatgaaggcctcaggcattattggaatattttatcgggaaatgaacctgtatagagatgcgttgtctggaggatcagcttcgttgtttcgcccttttttcatttctacaattcagttttaactgctgctggctggcttcttattgaagctaatatcaccatccaagaaaaccgaagctagaggattataaatttgatcacacgtatcgtctagcactgcacggtgtttgcttgatcagtttctaactagcatggtacatgtaggacagtgcgtcattacacttccacctgtggattaatttttctacccagcgtggtgcatatgttgataaactgattttttttactaaaaaaata

SEQ ID NO: 215904 - DNA, 1823 bp, Zea Mays; identical to SEQ ID NO: 215902

SEQ ID NO: 215905 - DNA, 864 bp, Zea Mays
ctagtgccggccacatgagtggggtctggggaaggcataaaccgaggtccttgagatggatacctacagataccatggccactctatgtcagatccaggaagcacttaccgcaccagggatgagatttcaggtgtcaggcaggaacgggatccaattgaaagggttagaaagttgcttttgactcatgacctggcaaatgctgctgagctcaagaatatggagaaagaaatcaggaaacaagtagatgacgctattgctaaagcaaaggaaagttctatgcctgatacttctgaactcttcacaaatgtttataagaagggcttcggcgtggagtcatttgggccagacaggaaggagatgagagcttctcttccgtaggttggcagcatgatgaggcagtcctcattacatggtatgatagccaggaaaaataatttttgatgaaggcctcaggcattattggaatattttatcgggaaatgaacctgtatagagatgcgttgtctggaggatcagcttcgttgtttcgcccttttttcatttctacaattcagttttaactgctgctggctggcttcttattgaagctaatatcaccatccaagaaaaccgaagctagaggattataaatttgatcacacgtatcgtctagcactgcacggtgtttgcttgatcagtttctaactagcatggtacatgtaggacagtgcgtcattacacttccacctgtggattaatttttctacccagcgtggtgcatatgttgataaactgattttttttactagttgcacagtgatatttatttatgtagcatgcggcagtttaattgatgtagctgttcgggcctgcgagtccggagt

SEQ ID NO: 215906 - DNA, 1411 bp, Zea Mays
cttcatcaatatcctcatctctataatggagaatggaagtggtgcggttgtaccttctaattcttcagataggtccgacaggtctgataaacctttggaccaaaagacaatgcgacggcttgcccaaaatcgtgaggcagcaagaaaaagtcggctgaggaaaaaggcatatgtgcagcagctggagagcagtaagctgaaacttgcacaactggaacaggaactccagaaagctcgccagcagggaatcttcatttctagctctggagaccaaacccatgccatgagtggaaatggagctttgacttttgacatagaatatgctagatggctagaggaccaaaataagcagataaatgagttgaggactgcagtgaatgctcatgcatgtggaagacacctgctgaaaggtgcttcctatggcttgggggttttcgtccatctgagcttttaaagctcctagcgaatcacctcgagcctctaactgagcagcaaatgctgggtttgaccaacctccagcaatcttcccaacaagcagaggatgcgttgtcacagggcatggaagcactgcagcaatctttggcagagactttggctggatctctcggtccagcaggttcttcaggaaatgtggcaaactacatgggtcagatggccatggccatgggcaaactcgggacgctagagaattttcttcgccaagccgacaacctgcgacagcagacgttgcatcaaatgcaacgtatcctaacgatccgacaggcttctcgtgctcttcttgcaatccacgactatttttcacgattgcgcgctttaagttctctgtggcttgctaggccacgtgaataacgaagggccgtcagtattttgagttccctctgccttacggtgctgctgcgtcgttcgcagcgatgcatcacagatctttggtggtactgtttttgttgtacaattacttttggccgctgcttggtccaaattgtactcaggtgggtgtacaagtaggtcaatataatcctgtaagttatggtgatttatgggtgtgttagcaatgcaataataattagagagggcaggatcagggtttctgttgtttgtactggttagagatttagtcctaatgtaacttcctgggacatggggggcggaatgggaagagagtaacaagaatcttcctttggttactgtagtatatgttggtattgttgcatcccattttctcattttgctgttaggagaatgattattctgtccatttgtgtactttttgattaatgttgtttgtagccccaacatgattatggatatgactgctagttcattcccattcataccactgcagtagctggccttattattaatatcatcatccatacaagagcagtggttgaagttgaaggcggcattcctg

SEQ ID NO: 215907 - DNA, 1410 bp, Zea Mays
gtcaactcacatgcgaattcggagatggagaatggaagtggtgcggttgtaccttctaattcttcagataggtccgacaggtctgataaacctttggaccaaaagacaatgcgacggcttgcccaaaatcgtgaggcagcaagaaaaagtcggctgaggaaaaaggcatatgtgcagcagctggagagcagtaagctgaaacttgcacaactggaacaggaactccagaaagctcgccagcagggaatcttcatttctagctctggagaccaaacccatgccatgagtggaaatggagctttgacttttgacatagaatatgctagatggctagaggaccaaaataagcagataaatgagttgaggactgcagtgaatgctcatgcatgtggaagacacctgctgaaaggtgcttcctatggcttgggggttttcgtccatctgagcttttaaagctcctagcgaatcacctcgagcctctaactgagcagcaaatgctgggtttgaccaacctccagcaatcttcccaacaagcagaggatgcgttgtcacagggcatggaagcactgcagcaatctttggcagagactttggctggatctctcggtccagcaggttcttcaggaaatgtggcaaactacatgggtcagatggccatggccatgggcaaactcgggacgctagagaattttcttcgccaagccgacaacctgcgacagcagacgttgcatcaaatgcaacgtatcctaacgatccgacaggcttctcgtgctcttcttgcaatccacgactatttttcacgattgcgcgctttaagttctctgtggcttgctaggccacgtgaataacgaagggccgtcagtattttgagttccctctgccttacggtgctgctgcgtcgttcgcagcgatgcatcacagatctttggtggtactgtttttgttgtacaattacttttggccgctgcttggtccaaattgtactcaggtgggtgtacaagtaggtcaatataatcctgtaagttatggtgatttatgggtgtgttagcaatgcaataataattagagagggcaggatcagggtttctgttgtttgtactggttagagatttagtcctaatgtaacttcctgggacatggggggcggaatgggaagagagtaacaagaatcttcctttggttactgtagtatatgttggtattgttgcatcccattttctcattttgctgttaggagaatgattattctgtccatttgtgtactttttgattaatgttgtttgtagccccaacatgattatggatatgactgctagttcattcccattcataccactgcagtagctggccttattattaatatcatcatccatacaagagcagtggttgaagttgaaggcggcattcctg

SEQ ID NO: 215908 - DNA, 1507 bp, Zea Mays
agacactgctcgatgcaagctcctcctgttcgattgcgggaatggaagtcaactcacatgcgaattcggaggtcatatgattgcaatgaatcctgacatggtactactgtcttggaaacaaatggagaatggaagtggtgcggttgtaccttctaattcttcagataggtccgacaggtctgataaacctttggaccaaaagacaatgcgacggcttgcccaaaatcgtgaggcagcaagaaaaagtcggctgaggaaaaaggcatatgtgcagcagctggagagcagtaagctgaaacttgcacaactggaacaggaactccagaaagctcgccagcagggaatcttcatttctagctctggagaccaaacccatgccatgagtggaaatggagctttgacttttgacatagaatatgctagatggctagaggaccaaaataagcagataaatgagttgaggactgcagtgaatgctcatgcatgtggaagacacctgctgaaaggtgcttcctatggcttgggggttttcgtccatctgagcttttaaagctcctagcgaatcacctcgagcctctaactgagcagcaaatgctgggtttgaccaacctccagcaatcttcccaacaagcagaggatgcgttgtcacagggcatggaagcactgcagcaatctttggcagagactttggctggatctctcggtccagcaggttcttcaggaaatgtggcaaactacatgggtcagatggccatggccatgggcaaactcgggacgctagagaattttcttcgccaagccgacaacctgcgacagcagacgttgcatcaaatgcaacgtatcctaacgatccgacaggcttctcgtgctcttcttgcaatccacgactatttttcacgattgcgcgctttaagttctctgtggcttgctaggccacgtgaataacgaagggccgtcagtattttgagttccctctgccttacggtgctgctgcgtcgttcgcagcgatgcatcacagatctttggtggtactgtttttgttgtacaattacttttggccgctgcttggtccaaattgtactcaggtgggtgtacaagtaggtcaatataatcctgtaagttatggtgatttatgggtgtgttagcaatgcaataataattagagagggcaggatcagggtttctgttgtttgtactggttagagatttagtcctaatgtaacttcctgggacatggggggcggaatgggaagagagtaacaagaatcttcctttggttactgtagtatatgttggtattgttgcatcccattttctcattttgctgttaggagaatgattattctgtccatttgtgtactttttgattaatgttgtttgtagccccaacatgattatggatatgactgctagttcattcccattcataccactgcagtagctggccttattattaatatcatcatccatacaagagcagtggttgaagttgaaggcggcattcctg

SEQ ID NO: 215909 - DNA, 1858 bp, Zea Mays
ctcgctctctgcaagagtgatttgcttgtgcgtgttattaattagttagtgctacaacaatcatgagacactgctcgatgcaagctcctcctgttcgattgcgggaatggaagtcaactcacatgcgaattcggaggtcatatgattgcaatgaatcctgacatggtactactgtcttggaaacaacttccaccaacggtcgatcctgtgaaacactaagacacccgttgccactggaaaggagagagcaaagtgatttgctgtctcctggcgatcgttgctcgtgaggcctagtgatggcagatgctagctcaaggactgacacctcaattgttttagacgacaacgacaagaatcatagggatctcactacgcattggcacctctgaaggtcttcgttggatatgaccaaactatttcaaccaattttgaacaagcttttcttcaattagtgctacccctagcctatcagatggagaatggaagtggtgcggttgtaccttctaattcttcagataggtccgacaggtctgataaacctttggaccaaaagacaatgcgacggcttgcccaaaatcgtgaggcagcaagaaaaagtcggctgaggaaaaaggcatatgtgcagcagctggagagcagtaagctgaaacttgcacaactggaacaggaactccagaaagctcgccagcagggaatcttcatttctagctctggagaccaaacccatgccatgagtggaaatggagctttgacttttgacatagaatatgctagatggctagaggaccaaaataagcagataaatgagttgaggactgcagtgaatgctcatgcatgtggaagacacctgctgaaaggtgcttcctatggcttgggggttttcgtccatctgagcttttaaagctcctagcgaatcacctcgagcctctaactgagcagcaaatgctgggtttgaccaacctccagcaatcttcccaacaagcagaggatgcgttgtcacagggcatggaagcactgcagcaatctttggcagagactttggctggatctctcggtccagcaggttcttcaggaaatgtggcaaactacatgggtcagatggccatggccatgggcaaactcgggacgctagagaattttcttcgccaagccgacaacctgcgacagcagacgttgcatcaaatgcaacgtatcctaacgatccgacaggcttctcgtgctcttcttgcaatccacgactatttttcacgattgcgcgctttaagttctctgtggcttgctaggccacgtgaataacgaagggccgtcagtattttgagttccctctgccttacggtgctgctgcgtcgttcgcagcgatgcatcacagatctttggtggtactgtttttgttgtacaattacttttggccgctgcttggtccaaattgtactcaggtgggtgtacaagtaggtcaatataatcctgtaagttatggtgatttatgggtgtgttagcaatgcaataataattagagagggcaggatcagggtttctgttgtttgtactggttagagatttagtcctaatgtaacttcctgggacatggggggcggaatgggaagagagtaacaagaatcttcctttggttactgtagtatatgttggtattgttgcatcccattttctcattttgctgttaggagaatgattattctgtccatttgtgtactttttgattaatgttgtttgtagccccaacatgattatggatatgactgctagttcattcccattcataccactgcagtagctggccttattattaatatcatcatccatacaagagcagtggttgaagttgaaggcggcattcctg

SEQ ID NO: 215910 - DNA, 950 bp, Zea Mays
actcaccaccaccaaaaagaaagaccgtgtttatgaagcctggctaactagaaatactggagggctgaacactatcagcaacgatagctctccagacgccagttcaaaggacttgcgtgctaagttggtattgctgggagactcaggtgttgggaaaagttgcattgttcttcgttttgttcgtggtcagtttgatcctacttccaaggtaactgttggcgcatcttttttatcacaaacattggcattggaggattcaacaatagtgaagtttgaaatttgggatactgctgggcaagagaggtatgctgccttggcgccactttactacagaggagctgctgctgcaattgttgtctatgatataacaagtccggaatcatttagcaaagcacagtattgggtaaaggaacttcagaagcatggtagtcctggtattgtaatggttttggttggtaataaggctgatctacatgataatcgaagtgtatcctcgcaggatgcgcaggactacgcagagaagaacaatatgtttttcattgagacgtcggccaagacagctgataatataaaccaactgtttgaggaaattgcaaagaggttgcctaggccaacggcatcgtgacagaacacttttgtgtattgcttgtaccatgtaatgcatgccagtccatatacacgggtactgtatggactacggaagacctctcatgtaaagatatttcccccattctgttatagttgtggatgacaattggtattgagaatatcctctgatgtcgcaaattggtcttctgatgaccaagtgtttttcttttcttttacctcgttctaggcattctaagggcctggagcatctggtttttaaggaactggtttataaaagttagtgtggttccaaatatatcggcttatatttcagtttatagaaattggatttatagtttctt

SEQ ID NO: 215911 - DNA, 2495 bp, Zea Mays
ctaccaaacactctttgccaatgcatctgcatgtaacctactaaagccctgcctagtgctagtgcctactcacactcgaagctcaaatccgtctccgtctctccccctcgtaagctcggcgccgatgagatgtgaggcgaggaggggagaggcttctccggtcggtggcgcgggtgcgtgggttcgagggaggggggcagtgccggagcgccggttgatcggcctgcttggcggtggtgccatggctatggaggatgcggtggcggaggcggaccttgcggacccgaacccggacgtgggggacctgttccaccactacgacagcctctacttccagggcgcgctggctgccgccggcttcaccgtccagtggacctcctcgttgccgtttgccagaaggtcttttggatcttgctccttttcaaaacaacaaaataccattatactctcggagtcatttctgaagtatcgctcatgtactgaccggaagaatgcattgcttcattatatgatccacgcaatcatatacgtgaagcatcacaagaaggacagcaatcatggccctgcttttcgtgcttggatggatgccattaactcatgctgtgtagaagatcaccagagaccaaatggtgggtacaatatcaccacccgccatgatttcatcccagaagagccccgtagcttgaagggtattgtatggaagtgtaggtcttgtggtgatacacttctgaggttcacaaaccagggtcctccatctgatgcctgctgcattgagaacgatgacatcaatgcatcctgtgggaacatgctttgttattggcacaaccacaagaatgactgttctggtacatatgaaaaaacgatgaagttagaagcaccatctcaaaagaaagttgcaggaggtgctcagttgcttctgactttgccatcagaaatgtccaacattcaagaatccagttcatctatattgcagttagagtggagtactaaatccacagaaccaaatgctgaagacaagcatctttgtctagggagtggcagcaatgggaaacctcagggaagtagctcctcgaagaaagcaggtaagaggaacagtcctgaaatggttggggaaacaagtgttctgcctgctgcggcccaaggaaaacccaatcaaaaccatggattggttgcgatggcgaagcaagcgcctgcgtctgtggaaggctacagtgatgcagaatcaccggggagacatacatcaaagaaagctggcaagcgacataagcctgatgatcttcagaaaagcagtgttctcccttctgtaccccagggaacaacaaaaccaaagcatgcgttggttgcgacagagaataaccctctctcctcagcagagcgccgcaacgatgcaaaatcgccaaaaaccaatacctcgaagaaaccaggagactggcatgagctccagattgctcagaaagcctgttctcagccagctgaccctcacaaaaaactgaagcaagacctgggtgcaccggaaaagaaagaagttttctctttgatgggccccagcaatgagaagttactgggcaggagctcctcaaagaaggcaagcaggcagcatgaccgcgaagacattcaggaaaaaaacaccatcctgccaactgcccctggaatcagacccaaagcatcagcctttgctgcaccagagaagcggcgaaagggaaaatgcaaaaggaagcctgtggaggaaaaggagtacgctgtgatgagtgcgtggctgaactactacgaatcagacaggtcaagtggatcgcccgagccccttgtaaacaaaagaacagagcgaaggagaagagaaagggcaagaattctgacttattcacgatcaaagaagaacaaaactgagccattggccagctccgggacacatgcctctgtcagtagccacaaaatcgagatggcaccgcaagaccatgcagttgttactactggtaaccaggtggcggtggctccagcaactgtacatcaggcgcagccatctgctgattctgctccatgcctggatcttgttccatttcttcagccagcagatccattgacttctccagatcaaagcactgcccgagacatgatagtgatttctgatgacgactgacccttttcgatgatgatatcctctatcacattttggatggttgccgggctaattcagtggatgtggcgagtatgccatactatattagaagtgacatgctgtgcttgttcttactatagagtagtgtctgagggccccaccgaagtcccttaaactctttcgcgaacatgacgcgagaatgcaggtgctgcagcttgaacttgatttcttgaacaaaattcttggagttcagtactctcctgtgcttctgctggtgcttctaaagcctagtgtgcatatgcatgtggtacttgcatgaaagaaacatcaagtagtatccccgaatcgatcggtccggcataaagtcgtccgagacgtttcg

SEQ ID NO: 215912 - DNA, 2329 bp, Zea Mays
ggatccgcaacgacgagccgtggtgactgcgcagcgacgtccgagggagggagcgaccgctggtgtgcggaacacactgtcggcatggccgccgccctccgcctgcaacgccagagtctcgccgccagcccctttctcttctccgcccatggcctccgcaccgcaagctcgaggtcatcctcactacgctcgatccgggtgacttctctacatgtccgcggcaattgggttatggcttctgctgttgggtacaacgtcaccatgagcgcaggcgtggacacctacaccaagtcttgggaggcccctactgccacgggtgtcagtttttatccagattataataatctgtacactgttggatgtggtgtctacgtctacgtgttcggtgataatatgacagatatcattggttcttgcacgagtatttgcacagataacagagagatcatggagagcgcaaacactggttctggtgcctgtgaagggttaggctgctgcagcattccaatacgtggcggccaaggcttcactctcaaactaggtcgcctcaatagtaccattccacagttcggtgaagcgctctccaatgtcaagattatcttttcgcaaaactatgacttcgttacagatgatgtttacgcaagttgggtggtgaatacaagcaatgttcacggcatgctacttaacattgcaatcacggaccaaccaagctgcgcgagtgcccagtcccaagagaacaaggatacctacgcatgcagtagtgaaagcatctgcgacgacgatctatcaccatcagggtttaacttaccgtatcgtgtgaccaatttgtcacttgatgatgggcttctgatggttacaaacatgctgaatgacacaagctccaacaatatggagagggtagtcctcgttaactatgacggttacaaccagaacggcttctattcaaccgacttctattcaaccgatgaggacgttgtggatggtaattatgatttctctcaggaggatacaacaataaaatgggttatagcaaacataacttgtcacaaagcaatgcaaaataatgctacatatgcgtgtgtaagtgacaacagtatatgcaaagatgtcatgcgagggaatatacgtgacgggtaccgctgcaagtgttccaatggcttccaaggaaacccataccttcaaaataactgtacagatattgatgagtgccttattccaaataaatgcaatggaatatgccacaatgttgatggcggtttcaattgtacaagttgccctcatgggaaagagtatgatccaaaaaagaaaaaatgtgtcatgtcagctaagcagcgtattctaatttttgggattgtaattgggcttgtttgtggtcttggatccataagttttgcacttggtgcaattatactcaccggtaagtggaaaaaaggcatccaaaggagaattcgaagagagtacttcaagaaaaatcaaggtctactcttggagcaactaatatcgaatgaaaatgctacaaccaaaacaaagatattcactttggatgaactagaggaagcaaccaacaagtttgatgctactcgtgttctaggtcatggtgggcatggcactgtttacaaagggattttgtctgatcagcgtgtcgtggctataaaaaaatctaaaatagtggagcaaatagagatagatcagttcatcaatgaggttgctattttatctcaaatcattcaccgcaatgtggtgaagctttttggttgttgcctagaagatgaggtacccttgctagtctatgagttcatatcgaatggcactctgtatgacattcttcatgaaaatattgcaacaaaatgcttgttgtcatgggatgatcgaattaggattgcaacggaagcatcaggagcacttgcttatctacactcagctgctgcaataccaattttccatagagatgtgaagtcttctaatatactcttggacgacaacttcactgtaaaggtttcagattttggtgcttcaagatctttatcccttgatgaaacacatgtggtgacaattgtccaaggaacattcggttatttagatccagagtattattatactggttctctaactgagaagagtgacgtgtatagttttggagtgatacttgtggaacttttgacaagaaagaaaccaatttttatcaatgaattgggtgccaaacaaaacttatctcattacttcattgaaggatacaggaagggactctcgtggaaataatagattctcaagttgtggaagaggcagaccaagaagagattaatgatatctcctcacttatagaagcgtg

SEQ ID NO: 215913 - DNA, 2027 bp, Zea Mays
ccaaagacaacccccgccccacgtccccacccactcctatattcccttctccacgattacgaacgaccccaactccctctggagtgctctggaccgccctccccaaccaacggacgacgcctccatccagaattattccagatcacgcctctctctctctctctctctctctctctctctctctctctctctccgcgtcgtcctcggtctcctcgctcgccgaccctgccccctactgaactgccgcgcgcgcgtcgtggagtagagatccctccgtccggccatgaagtgatcccgtggccttcttcatcgtctcttcattgatttcatcagcactgcgtgcatacaaggaggagaggagtccggccgctggcagcgaagatgtcgtcctctaactctccatgcgccgcgtgtaagctgctgcggcgcaagtgcacccagggatgcgtcttcgcgccctacttcccgccagacaacccagcgaagtttgctagtgtgcaccgtatctttggtgccagcaacgtctccaagctgctcaacgatcttccggcggtgcagcgggaggacgccgtcaactctctcgcatacgaggcggaggcgcgcatccgcgaccctgtctacggctgcgtctcccacatctccgtcctacaggtcaggatcaggcaggtgcgcgacgagctcgtcgccgcgcgcaaggaactggccgcctacattgggcccgccgcctttacgcctttcgtcgcgacgccgcagcagtaccaccaccagtatgccgcaggcgctggcggcggcgtgcctctcgcgacgggcatgggtctcgcagtcggcgtcgggccgcagccgcaccagcagcacggtcacccgcaccagcagcagatgatggcgcacgggcagcacctccaccaccagcaccatctgatggctgctgctgaggcgcagcagcagctcgctctggccgcgcaggtcgcgcgcgagcaggatgtcatgatgaggcaggcggtggtctacgcgcacgccgtgcccgggagcggcgccacggtggccgttgggccgcccgacgcggtgccgtacgagggcggcttcctcttccagcagcagcaccaccagcaaccgccgtcgcaggcgcagacgaccgtggcgctcacgtaccagatggagcagtccccgccgccgtcgtccccgggccagtctcactctcaccccgaggtgtcgcagcagaagaacacggatggcagcgacgagggcagcggtggcggcggtctcgttccgccgccggcctgatctgatgagtccgatggccgcgcctgcctctgattcgtgcttccttcggccttttcctttcttgtttggtgttcgttcgcccttgttcgttatgaattcttttcccctcgtcgatctccatcatgttcatatggcgtcgcgtcgcggcatcgtcgatctctcggatccatgcacgcctcccgaaggcaggctatagctggattattatatcaaggttcctcatgatcagttgccttccttgctcaagagttagggccaaaataaatgcaagacagaaggagtggtatgaaatggggccgggacagaggtgctcatcatatatatggatcagcgtaacacagagaaatcaatggtgggaaggcggatcggagggggagcggcaggcatgaattgatgaaggaattaacacaccaatgcaacttggaggagcgctcagctaaacatgtatcttcgttcacttgtgcatttatttggtgtcgttgaacatgtggatcttctttctttcttcacccctctcgttagtattcttcgcctttaatttcactcctttttccgtttccctttcacaatttctttctgccgtgagtacgtcttcagagagagagaaacggttctgcccgtattgcttgcattgtgtctataaataaatagaagtatttatttggacatgaatggatggagggcaaggagctacctattcatcattttagtttatattgtgttactatcgattttgtttgaattat

SEQ ID NO: 215914 - DNA, 9973 bp, Zea Mays
tctttttttttttttttgcaaagcacctctcttgttccttcgtcctcgtgtctcgctcctcgcccattccgcgctctaaacaataggcctgccatcgctcgcggaagtctccattcctgcgcgcgaatctccctcccctcccaagcgatccccattgtcgaggcccgattcggatcacctaggttttctcttcgcgaccgggcaggcggtggcgaggatgcggcgctaggctcggctctgtggtgatgaacatcgtgcggggagtcgccgaccttctccgcaaggcgccgccacctccccccgcaccggacgctggtgcggcgcctaccgcctccttctccgccggtgacttcgacgacgcgcccaccccgcgcgtcgtcttcagtggtagtctggaggagggagctctgaatgcactctggaagaattacgagaatgcgcttgataaggtcgagaaggaaaaatctcttcaaatttttgtcttgcaatttgtagagacattcagagattgggatccaaacccaattgagcaattggttgatcaagaattgggaaacaatgaaacagttgtaggatgctcttgcgggcatccttctgaggtcattcttattttgattcaggagatttctctaattacatcaacttttactgaaagtggcaacagtcctgtatctcctacaaatcattattcagggcaacaaaataacctgggtttaagctcacaaatattgcaagttctggagtgtttggaaattctgactcgctccttgcataactgtagagtattcagctactatggtggtgtacagaagattacttctctactaaaagctgctgttgctcagctcaaaaacttgaactgtttgctggctgcagaagaccaatctgcagatgaagcagtgaaaaattctagggtgatgctaaatatacttgtatgcataatcaccataatttcaaacttcatgaagttggacataactgttggaaggattccccatattaccgataccacaaagcataccccatcatgcaaccatttggctgcagtcacgtctagctctcctgatagaaccatttctgatacacttcgacattggcagcagaaagcaactgttcttgtgatggaagccagatgtgtcaactggttagtagaactattacacaccgttcaaaggttgaatttgaaagagcaatgcattgacctctcactccattttattactttgtgcattctgcgatcgactgtttctggtactcgtgctcagaatcatctcagaagcattggtgggctggaaattctattggatggacttggacttccttctagtaaattttcagttccgaggcaatcttctatctcaaaaaatgaaagggatgaaatacttctgctccagatacagtatttgcaaactctgagtgaggcagtatttggcaacgtcaacaatttgcaaattttatttgaaaatggacgggtacacaaatttgcaaactgcatttgttggcctgcatttatgattcagatgttccattggcaaaatgacagtaccaaagcttcacttacactagattctgtctctggtccaacttattctcttgatagaactgaatggattgactactctataaaattgagcaatgccttttgttcttttgttcttccttcggaggatatcggatactgttccgatgaaatagctgtcagccaaattgtattatccatcccactggcatacctggagcaatctgtgagatggatcataaggattcttatgactgtctttctatgtatcagagcgtgtaccaaggaaactgagctgccacaccacatcaagatttttgcaaagaccctacaatattatgtgattcgtatgttcaaaagagttcttatttcaacaccagctctactcccagcttttcgagaggaaggtgtatgggacctgttattctcagggaattttttctactttggttcatctatagaagacacttgttttcatactgttacggatattcaaaatggtaatgttagcagtaaccgaatatctattcattctgaaagcttgtatcgtaccgatgttaaaattcttcaagtggaagctatttccttcttggagtttgctgcaacactccatgaaaacacatataacatgccagaatgctcagcactgctagatgcacttgagcattgcatttctgatcctttgctagtcagcactcttctcaaaagcttccgtgttattctacaactcgcgacagaacatactctagcttcatttgaatcattggatgtaattacaagagtccttaaggctgcttgccgtcaggcacaagagctacggaacttcagcaattttctttgttctaatgtcagcatcagtcaagatagttctcaatttaaaaatattgaaggcagaactgaggacactcttatatgtacagagttagctttgagcctctttatggaatatgtcactatatcgatagatggaaggattctcgttttacacaatgctgattgtattgattgtttatttgacttgttccatgaacagaacattcgagaacatgtgctggagcaagttcttgccttatttaggttgccttcatcgtcagcagaagatcatacagcaaagttgcagttatgttcaaagtatttagagaacttagcacgggcaaatgaaaaagaaaaggtcaacacagagttattaattgatcttctggtcaacatgagagagatcataatgatggatcacatgtactatcaaaatctattccgcgacgaagggtgctttctgcatattatttcattattgaatggaaatttcaataaggtgactgatgagcggcttgtccttaacgtccttcagaccttaactttattacttgaagggaatgatgcatctaagaatgaagatgctgttgtattacttctaaatattttgcagaagagcagcacgtcacttcagcactatgggcttgtaatcttacagcagttgctcaaacaatccattacaaatagaacatcttgtttcagagccggcttgctaagttttcttcttgattggttttcggtagaggaaagggatgatacagttattgcaatcacagagttaatacaaatacttggtgcacacagtatatgtggcaaggacatcaggaaaatctttgcccttttgcgctgtgagaagattggtgccaaacacaagcacacatctttgcttctgacaagtctcagtcacatgctgaaggaaaaggggccagaagctttctttgagttcagtggccatgattctggtatagatataaaatcaccctttctatggccttacaatagagggatatctttttcttgctggttaagggttgaaaacttcccagacagtggtatgatgggccttttctccttttttaaagaagacgggaaggggtgctcagctgttcttaacagaagtgctttagtatatgagtctatctatcaaaaacatcagtgtgttctgttaccactcaagctcccaccaaagcaatggagattcctttctattactcatacaattgggagggctttctccggaggaagccagttgaggtgttatgtagatggggagctagtatcatccgagaagtgtgggtatccaaaattcaacgaagcaatgacttactgcaccattggcacaaaattgatacctgttggtgatggacctatctcaattggtttcgaaaaaacttctgccttcacaggtcaaatgggcccagtctatgtattttctgatgcactttcttcagagcaagtaaagggcatatattttctgggaccaagttacatgtactctttccatggcgatgattcactctacaggggaattgttgatgctagagatggcctttcatcaaagataatttttggtttcaatgcacaggctagtgaaggtcgtagtttgttcagtgtgtcatcagcactcgataatgccgacaaaaatacatttcaagcaacaattatgggggggacaaagttatgctcacgacacttgcctcaggatattatttactgtgttggtggtgtctccgtatttttcccactcttcactcaattttttgatgctgcaagtgatattgagaaatgttgccatacatctgttgtcaatgataaattggtggctgaggtcattgagctagttgctactgttctggatggaaatgtgtcaaatcagcaacagatgtatcttctttctgggttatctattctaggcttcttgcttcaatcagctaccccacagctcttaaccaccaaaactctttctgcactgaagtatatgtttgacattctgaggaactgcagcatgtcaaaagtcctcctcaaagatgctatctcacaaatttatttgaatccacaaatatgggtatatgcaagctatgaagtacaaagagatctctatatgtttgtgataaactattttgaaacagatggaaggcttttaccacttctatgtggacttccttgggttattgatattgtgtgccgatattactgggaaaaggcagattctaggcatgttgttgcttccaagcctttgtttcattcagttaccaaacaagttattggagagagacctgaggtagttgaaattcgcaagcttcgtcttctcctcctgagtttagcagaaatgagcttaaagataaaagtttctcctgatgacataagagcgcttgtagcttttattgagaggagtcaagacatagcatgtatcagcgatgtactggacatgatcatccgtgctctttcacagggagaagttttttcatcatttgttgggaacgtaaattaccttggtggttgttgcattttcattaatcttctcaagagggaatttgagccagtccgtttgttggggcttcagctccttggaaaacttttgactgggattccatctgagaagaaagaaacgaaactatttgccctacccttagggcagtctagacccatctctgaaaacttaacaaaagaaataacagcggcacctcagtttttcttgaatacaatgtctgaaaggctattcaaatttccactatcagataacttatgtgcagcacttttcagtgttcttagtggaaccagtgcacaacaggttccccaggaaaattctgagcctgatccatcaagggatagaaattgcaatattttaagcttgccacccttttcccttcctcagattttgatatgcatctttagatttatgcattcttgtaaagattcctcagcacgcacaagaatcttaaatcttcttcttggtttgctggattcaaactcttcaaacatcgaggcattaatggagcacagttggaactcttggcttgaaacatccacaaaacttgaggtattcaaggactacaaatcagtttctaaaggcgaccctgacgatgtgaaggcagatgaaataagtcttgttaggaacttgtattctttggtcctttcatactacctgcgctttgttagaggtggctggcatcaacttgatgatactgctaattattttctcttaaaaactgaccagggacaactatcatgttctgatttgcttagggacatacttgatgatattgctgggagcctgcttcacaaatctgtggaagataatattttccttttacagccttgctgtgataatgttttacattttttgaaccttatacaggagctgcttatcagtcaaatgggaattaggctattgtttctctctcccagtatttcggaggaatcttcacatgataacatatggaaagaagatattaagtcaacagtaaatgatattttaaataccgagagccatggtcaatttacaagattttctgatgtaaatgaagtcagtgatgattggtggagtttctttgacaaggtgtggagtattatacgtaatttgaacggaaaaggaccaagcaaatttataccaaaggatccaaatgttgaggttgcatctttggggcaaagggcgcgtggactggtggagtctatgaatgtccctgctgccgaaaaggtagctgttgtatctggaggcggaggtattggtactgcattaggtataaaagtgaacagatttgctgagaaagcgacaacgtcgagggaagagataatcccaagaattttcttccaccttgtgattctgtacctctgcaaagctggattggagaatgcatccaagtgtgttatacagttcatgtcgttgcttccgattcttcttatttcagaagatgaccaaagcaaaaataagttgcactttttgatatggtctctactaattgtaagatctcagtatgggcaacttgacgatagcgctcgtttccatgttttctcgcacttgattcttgaaactattatatatgggaagtccatgttggtcactaatatcttagagagagatgattcggtggacgtcaacaacaaggagactggattcatccttagctttatacagaagaatcgtgttcttgctgcggctgctaatgaggttaagcacatgaaggctgttcaggctgatcgtttaaagaagctgcaggatcttcgcatgaagcttaacgagtgttctgctacggagataaagctagcgcaggccattgaagatgagatacatttaactattactgctgtgctttcagcggatgacaatagaaagacagcttgtcaacttgctttccgcgaggatcagcaaattatcagggataagtggatacatatttcccgtgctctgatggatgagagaggaccatggtctgctaacccttttccaaatgatgttgtgactcactggaaacttgacaagacagaggatagatggaggcggcggttcaagttcaaacgtaattacaaatttgatgaacgattatgtcagccttcacagtcaaggaatgaaagtacagcaactttagctgaccagctgtacattagtgccaaaattactcagaaaatgaagcaattccttgttaaaggagtgcggggaatcacagaggatagtagttacgaacaatttgaagacactaatgacgcgagtgaatcttcccagagtaatccttcagagagccaaaaccttaataatgctgcagatacctctgatcatcatgcttctgcacattataagaaagagccatcatctactaatggagataatgattatacaaaggtgctatgttcagttcgttgtgtttttgttaccccaaagcgaaaattagcaggacaactggatatcacacgaactgtcatgcatttttcttttgaatttttggttgaaggaactggaggatcatctgtttttagcaagtttaaagacaaaaaagattcagactgcaagaacgagctgggaggtgtggacagacttgacggatgccgagacagtatgattgaaaccaatggtgttttgatgcaaaaccagtctaacaagatcaaacgtcacaaaaggtggaacataactaaggcgagttggacttgaaatggctgagaatgccagggaaagatggaaaaggagggaaatcagtaactttgagtatcttgtgattttaaatacccttgctggaagatcttacaatgacttaactcagtatcctatatttccatgggtattggctgattacacctctgaaaagcttgatttcaacaagtcatcgactttcagggatctttcaaaaccagttggtgcgttggatgaaaaccgcttcaaggtttttgaagatagatatcttagtttctgtgaccctgatataccaagtttttattacggatctcactactctagcatgggaatcgttcttcattacatgcttaggcttgagccatttacaactctgcatctaaattttcagggtggcaagtttgaccatgcagatcgtttgttccaaagcattgagagcgcttacataaatagcttatcaaatacaagtgacgtcaaagagcttattccagaattcttttacatgcctgagtttcttgaaaattcaaattcatatcatcttggtgtcaagcaggatggggaacctataggcgatgttgctctccctccatgggcaaagggatcgcctgaagaattcatccacatcaacagagaagcccttgaaagtgaatatgtgagctctaatctgcataactggattgacctcatatttggttacaagcagcgtggacaaccagctgttgaggcagcaaacatattttactacgtgacatatgaaggtgcagttgatctggaaaatatggatgacatgttacataaatctgctattgaggatcagatagcaaattttggacagacaccaatccagattttccggacgaagcatccaagaagagggcctcccatcccaattgctcatccactgtattttgcaccacagtcgctaacattaacatcaagtgtttgtagtacggccagccacatgtgtgctatactatttataagtttgttggagaacactgttgtattgatgaatgagggactcatattgtcagtaaagctgtggttgacaacacacctgcagtcaggtggaaatttcacatattccggaccacaggaacattcctttggaattggttcagatgttatctctcctcgtaaaattggcactttccttgctgaaaacgttaagtttggaagacaattcttagcaacgatgcaaaatagtcgtgataattatttgattttatgtggaaactgggagaacagttttcaaataatttctcttagtgatggaagaattatgcagagcatcaggcaacacaaggatgttgttagctgtgttgcagtttcgtctgacgggaacgtggttgcaactggtagttatgacacaactgttatgatctggcatgcatttcgtggaagaccaattgataagaaaatcaggggtgccaattttgaactttcagaaaaggaacaagttatagtggaaaggcctgttcatatcttatgtgggcatgatgacatcataacatgcttatttgttagcacggaacttgacattgtaatcagtggttcaaaagatgggacttgtatttttcatacactgcgtgaagggagatatgttcggtccatccagcatccttctggtgttggtttatcaaaattggtagcatcgcagcatgggagggtggtattgtattctgagaatgacctctctttgcacatgtactccatcaatggacggcatattgcttcttcagctacccttggacgtctcaattgcatagaacttagttgttctggcgatttcattgtttgcgctggtgagcttggacagatagtcttacgctcaatgcattctcttggtattgtttggaggtacgatggaaatggcaagacaattacttccctagctgtgacccctgaggagtgcatcctagcaggaaccaagaatggcagcctcttggtgttttcaacagaaacttctcttcttcgaagggggagcatgcaacgaaataaaataaaaccctccacatctggttaagtcattggctgcaagatatccaacgaatgtaaaacaaatgactgcttcatgctgaggtcattaccagcttatagaactgttctcacgaccatgtagtctgtacataatgaaacacacttttgtcatttgttttcactaccaaaagtgaagctggcattcaggaatgagggttgtcaagatattcagctggtgataatccttgagcacccaatctgacgaaggaacactggttagccctagatccaagcatcttcacttagccttcacttggtaggcattgacatctatcacaatgttattgtagcatttgacttcgttggtgttctgtgcgacagtttgtgtttgtgtagtatttatattagattccagtgcttttgtaaatgtgccatttttgtgatctaaagtgttagaaagcatcttcatatatcatatgccctcatctatctattgataatggcgttctgtattttccaaatcattatggactttcgag

SEQ ID NO: 215915 - DNA, 3745 bp, Zea Mays
cggagattccccttcgtctgacggacgggtgcgcggacgacgaattcccgtgctgctaatgaggttaagcacatgaaggctgttcaggctgatcgtttaaagaagctgcaggatcttcgcatgaagcttaacgagtgttctgctacggagataaagctagcgcaggccattgaagatgagatacatttaactattactgctgtgctttcagcggatgacaatagaaagacagcttgtcaacttgctttccgcgaggatcagcaaattatcagggataagtggatacatatttcccgtgctctgatggatgagagaggaccatggtctgctaacccttttccaaatgatgttgtgactcactggaaacttgacaagacagaggatagatggaggcggcggttcaagttcaaacgtaattacaaatttgatgaacgattatgtcagccttcacagtcaaggaatgaaagtacagcaactttagctgaccagctgtacattagtgccaaaattactcagaaaatgaagcaattccttgttaaaggagtgcggggaatcacagaggatagtagttacgaacaatttgaagacactaatgacgcgagtgaatcttcccagagtaatccttcagagagccaaaaccttaataatgctgcagatacctctgatcatcatgcttctgcacattataagaaagagccatcatctactaatggagataatgattatacaaaggtgctatgttcagttcgttgtgtttttgttaccccaaagcgaaaattagcaggacaactggatatcacacgaactgtcatgcatttttcttttgaatttttggttgaaggaactggaggatcatctgtttttagcaagtttaaagacaaaaaagattcagactgcaagaacgagctgggaggtgtggacagacttgacggatgccgagacagtatgattgaaaccaatggtgttttgatgcaaaaccagtctaacaagatcaaacgtcacaaaaggtggaacataactaagataaaaggagttcattggacacgctacctactgcaatatactgcaatggagatcttctttgatgattcaactgcacctatatttttaaacttttcttcccaaaaggatactaaaaatgctgggactttgttagtttctcttaggaatgaagctttgttccctaaaggaagtaccaaagacaaaaataatatcatttcattcgtggacaggcgagttggacttgaaatggctgagaatgccagggaaagatggaaaaggagggaaatcagtaactttgagtatcttgtgattttaaatacccttgctggaagatcttacaatgacttaactcagtatcctatatttccatgggtattggctgattacacctctgaaaagcttgatttcaacaagtcatcgactttcagggatctttcaaaaccagttggtgcgttggatgaaaaccgcttcaaggtttttgaagatagatatcttagtttctgtgaccctgatataccaagtttttattacggatctcactactctagcatgggaatcgttcttcattacatgcttaggcttgagccatttacaactctgcatctaaattttcagggtggcaagtttgaccatgcagatcgtttgttccaaagcattgagagcgcttacataaatagcttatcaaatacaagtgacgtcaaagagcttattccagaattcttttacatgcctgagtttcttgaaaattcaaattcatatcatcttggtgtcaagcaggatggggaacctataggcgatgttgctctccctccatgggcaaagggatcgcctgaagaattcatccacatcaacagagaagcccttgaaagtgaatatgtgagctctaatctgcataactggattgacctcatatttggttacaagcagcgtggacaaccagctgttgaggcagcaaacatattttactacgtgacatatgaaggtgcagttgatctggaaaatatggatgacatgttacataaatctgctattgaggatcagatagcaaattttggacagacaccaatccagattttccggacgaagcatccaagaagagggcctcccatcccaattgctcatccactgtattttgcaccacagtcgctaacattaacatcaagtgtttgtagtacggccagccacatgtgtgctatactatttataagtttgttggagaacactgttgtattgatgaatgagggactcatattgtcagtaaagctgtggttgacaacacacctgcagtcaggtggaaatttcacatattccggaccacaggaacattcctttggaattggttcagatgttatctctcctcgtaaaattggcactttccttgctgaaaacgttaagtttggaagacaattcttagcaacgatgcaaaatagtcgtgataattatttgattttatgtggaaactgggagaacagttttcaaataatttctcttagtgatggaagaattatgcagagcatcaggcaacacaaggatgttgttagctgtgttgcagtttcgtctgacgggaacgtggttgcaactggtagttatgacacaactgttatgatctggcatgcatttcgtggaagaccaattgataagaaaatcaggggtgccaattttgaactttcagaaaaggaacaagttatagtggaaaggcctgttcatatcttatgtgggcatgatgacatcataacatgcttatttgttagcacggaacttgacattgtaatcagtggttcaaaagatgggacttgtatttttcatacactgcgtgaagggagatatgttcggtccatccagcatccttctggtgttggtttatcaaaattggtagcatcgcagcatgggagggtggtattgtattctgagaatgacctctctttgcacatgtactccatcaatggacggcatattgcttcttcagctacccttggacgtctcaattgcatagaacttagttgttctggcgatttcattgtttgcgctggtgagcttggacagatagtcttacgctcaatgcattctcttggtattgtttggaggtacgatggaaatggcaagacaattacttccctagctgtgacccctgaggagtgcatcctagcaggaaccaagaatggcagcctcttggtgttttcaacagaaacttctcttcttcgaagggggagcatgcaacgaaataaaataaaaccctccacatctggttaagtcattggctgcaagatatccaacgaatgtaaaacaaatgactgcttcatgctgaggtcattaccagcttatagaactgttctcacgaccatgtagtctgtacataatgaaacacacttttgtcatttgttttcactaccaaaagtgaagctggcattcaggaatgagggttgtcaagatattcagctggtgataatccttgagcacccaatctgacgaaggaacactggttagccctagatccaagcatcttcacttagccttcacttggtaggcattgacatctatcacaatgttattgtagcatttgacttcgttggtgttctgtgcgacagtttgtgtttgtgtagtatttatattagattccagtgcttttgtaaatgtgccatttttgtgatctaaagtgttagaaagcatcttcatatatcatatgccctcatctatctattgataatggcgttctgtattttccaaatcattatggactttcgag

SEQ ID NO: 215916 - DNA, 3277 bp, Zea Mays
tctttttttttttttttgcaaagcacctctcttgttccttcgtcctcgtgtctcgctcctcgcccattccgcgctctaaacaataggcctgccatcgctcgcggaagtctccattcctgcgcgcgaatctccctcccctcccaagcgatccccattgtcgaggcccgattcggatcacctaggttttctcttcgcgaccgggcaggcggtggcgaggatgcggcgctaggctcggctctgtggtgatgaacatcgtgcggggagtcgccgaccttctccgcaaggcgccgccacctccccccgcaccggacgctggtgcggcgcctaccgcctccttctccgccggtgacttcgacgacgcgcccaccccgcgcgtcgtcttcagtggtagtctggaggagggagctctgaatgcactctggaagaattacgagaatgcgcttgataaggtcgagaaggaaaaatctcttcaaatttttgtcttgcaatttgtagagacattcagagattgggatccaaacccaattgagcaattggttgatcaagaattgggaaacaatgaaacagttgtaggatgctcttgcgggcatccttctgaggtcattcttattttgattcaggagatttctctaattacatcaacttttactgaaagtggcaacagtcctgtatctcctacaaatcattattcagggcaacaaaataacctgggtttaagctcacaaatattgcaagttctggagtgtttggaaattctgactcgctccttgcataactgtagagtattcagctactatggtggtgtacagaagattacttctctactaaaagctgctgttgctcagctcaaaaacttgaactgtttgctggctgcagaagaccaatctgcagatgaagcagtgaaaaattctagggtgatgctaaatatacttgtatgcataatcaccataatttcaaacttcatgaagttggacataactgttggaaggattccccatattaccgataccacaaagcataccccatcatgcaaccatttggctgcagtcacgtctagctctcctgatagaaccatttctgatacacttcgacattggcagcagaaagcaactgttcttgtgatggaagccagatgtgtcaactggttaatgttccattggcaaaatgacagtaccaaagcttcacttacactagattctgtctctggtccaacttattctcttgatagaactgaatggattgactactctataaaattgagcaatgccttttgttcttttgttcttccttcggaggatatcggatactgttccgatgaaatagctgtcagccaaattgtattatccatcccactggcatacctggagcaatctgtgagatggatcataaggattcttatgactgtctttctatgtatcagagcgtgtaccaaggaaactgagctgccacaccacatcaagatttttgcaaagaccctacaatattatgtgattcgtatgttcaaaagagttcttatttcaacaccagctctactcccagcttttcgagaggaaggtgtatgggacctgttattctcagggaattttttctactttggttcatctatagaagacacttgttttcatactgttacggatattcaaaatggtaatgttagcagtaaccgaatatctattcattctgaaagcttgtatcgtaccgatgttaaaattcttcaagtggaagctatttccttcttggagtttgctgcaacactccatgaaaacacatataacatgccagaatgctcagcactgctagatgcacttgagcattgcatttctgatcctttgctagtcagcactcttctcaaaagcttccgtgttattctacaactcgcgacagaacatactctagcttcatttgaatcattggatgtaattacaagagtccttaaggctgcttgccgtcaggcacaagagctacggaacttcagcaattttctttgttctaatgtcagcatcagtcaagatagttctcaatttaaaaatattgaaggcagaactgaggacactcttatatgtacagagttagctttgagcctctttatggaatatgtcactatatcgatagatggaaggattctcgttttacacaatgctgattgtattgattgtttatttgacttgttccatgaacagaacattcgagaacatgtgctggagcaagttcttgccttatttaggttgccttcatcgtcagcagaagatcatacagcaaagttgcagttatgttcaaagtatttagagaacttagcacgggcaaatgaaaaagaaaaggtcaacacagagttattaattgatcttctggtcaacatgagagagatcataatgatggatcacatgtactatcaaaatctattccgcgacgaagggtgctttctgcatattatttcattattgaatggaaatttcaataaggtgactgatgagcggcttgtccttaacgtccttcagaccttaactttattacttgaagggaatgatgcatctaagaatgaagatgctgttgtattacttctaaatattttgcagaagagcagcacgtcacttcagcactatgggcttgtaatcttacagcagttgctcaaacaatccattacaaatagaacatcttgtttcagagccggcttgctaagttttcttcttgattggttttcggtagaggaaagggatgatacagttattgcaatcacagagttaatacaaatacttggtgcacacagtatatgtggcaaggacatcaggaaaatctttgcccttttgcgctgtgagaagattggtgccaaacacaagcacacatctttgcttctgacaagtctcagtcacatgctgaaggaaaaggggccagaagctttctttgagttcagtggccatgattctggtatagatataaaatcaccctttctatggccttacaatagagggatatctttttcttgctggttaagggttgaaaacttcccagacagtggtatgatgggccttttctccttttttaaagaagacgggaaggggtgctcagctgttcttaacagaagtgctttagtatatgagtctatctatcaaaaacatcagtgtgttctgttaccactcaagctcccaccaaagcaatggagattcctttctattactcatacaattgggagggctttctccggaggaagccagttgaggtgttatgtagatggggagctagtatcatccgagaagtgtgggtgagcaaattcatctatatt

SEQ ID NO: 215917 - DNA, 869 bp, Zea Mays
gatcctttacttctgtggaaagggttgattcaagtcctccagttctttgagaccaacatacataattcaaaggtatatccgatacgtggtaagagatacaaatgccaggactgcactgagttaataggctttgacctttgcgaagcctgctacaactccagttcaaagctcccaggacgctttaaccagcggcacacccctaatcacagaatggaagttgacaattcagcactcgtgcataggatactgagacaccatggcatacccgaggaaggccctgagggactgatgatggaagtggttggtcctgatgcaatggtgcagatactcattgataatcaaggaatggaggagggcaatgacgagggcccaggagaggcggccattgaagaaccagttggttctcttggctcaatgtcgcgtctgtcgcatctattcatgtataatccagaaatggaggatggcaatgacgaggactcaggagaggaggcggccattgaagaaccagttggttctcttggcgcaatggcgcctctattcatgtatgatcaagaaatggaggacaacgaggaggatcaggcacactagatgcagattgcaccagctgcagcgaagcctttgttttgtgttgctggggcggctctacttatgtaatgtggaatggagggattgcgcaagcttaaaagtatggctggatcggccttgttttttaactggttctctagttactgccatctaatagccaacatttttcccgcttttgtaaatccgtgcagttgtttgtttcaaaggaaaatgcaataaggatatgcagaactatattccttattttaaactctactcctttcgtcccgtgaagcaagtcattt

SEQ ID NO: 215918 - DNA, 1354 bp, Zea Mays
ttgcgccttcctctctgtctgcacaggaagagaagcgcatgcaaacatactctccccaaatcattgagttcttaaactacaagactaacgttggaagctataaggagaacagaaatgaagacagtaaagctagacctccacaagaagttccattgaatgacagcgttccagatgagcatttgaagaaaattaaattggaggatgtttcatgccctctctgtatggagatgctgtatcaacctgctgttcttaattgtggtcatgtgtattgtgtatcctgtttgtcatccttgaatgaggaaacgctgaagtgccatgtttgtggaagtcttcaccctggagatttccctaatgtttgcctggaccttgatcatttccttgaagaatattttccagcagaatatgaattgagagggcagaaagttcaatttaagaaggatcagtgcaatcgtgaaacatcatcttcaggtacttcaggcagaaaaggaagcactagggcactgcatgctgaagacccgtcaaatattcacattggagtaggatgcgactcatgtggggtatatccgatacgtggtaagagatacaaatgccaggactgcactgagttaataggctttgacctttgcgaagcctgctacaactccagttcaaagctcccaggacgctttaaccagcggcacacccctaatcacagaatggaagttgacaattcagcactcgtgcataggatactgagacaccatggcatacccgaggaaggccctgagggactgatgatggaagtggttggtcctgatgcaatggtgcagatactcattgataatcaaggaatggaggagggcaatgacgagggcccaggagaggcggccattgaagaaccagttggttctcttggctcaatgtcgcgtctgtcgcatctattcatgtataatccagaaatggaggatggcaatgacgaggactcaggagaggaggcggccattgaagaaccagttggttctcttggcgcaatggcgcctctattcatgtatgatcaagaaatggaggacaacgaggaggatcaggcacactagatgcagattgcaccagctgcagcgaagcctttgttttgtgttgctggggcggctctacttatgtaatgtggaatggagggattgcgcaagcttaaaagtatggctggatcggccttgttttttaactggttctctagttactgccatctaatagccaacatttttcccgcttttgtaaatccgtgcagttgtttgtttcaaaggaaaatgcaataaggatatgcagaactatattccttattttaaactctactcctttcgtcccgtgaagcaagtcattt

SEQ ID NO: 215919 - DNA, 1358 bp, Zea Mays
tttatttccatgtttgcgccttcctctctgtctgcacaggaagagaagcgcatgcaaacatactctccccaaatcattgagttcttaaactacaagactaacgttggaagctataaggagaacagaaatgaagacagtaaagctagacctccacaagaagttccattgaatgacagcgttccagatgagcatttgaagaaaattaaattggaggatgtttcatgccctctctgtatggagatgctgtatcaacctgctgttcttaattgtggtcatgtgtattgtgtatcctgtttgtcatccttgaatgaggaaacgctgaagtgccatgtttgtggaagtcttcaccctggagatttccctaatgtttgcctggaccttgatcatttccttgaagaatattttccagcagaatatgaattgagagggcagaaagttcaatttaagaaggatcagtgcaatcgtgaaacatcatcttcaggcagaaaaggaagcactagggcactgcatgctgaagacccgtcaaatattcacattggagtaggatgcgactcatgtggggtatatccgatacgtggtaagagatacaaatgccaggactgcactgagttaataggctttgacctttgcgaagcctgctacaactccagttcaaagctcccaggacgctttaaccagcggcacacccctaatcacagaatggaagttgacaattcagcactcgtgcataggatactgagacaccatggcatacccgaggaaggccctgagggactgatgatggaagtggttggtcctgatgcaatggtgcagatactcattgataatcaaggaatggaggagggcaatgacgagggcccaggagaggcggccattgaagaaccagttggttctcttggctcaatgtcgcgtctgtcgcatctattcatgtataatccagaaatggaggatggcaatgacgaggactcaggagaggaggcggccattgaagaaccagttggttctcttggcgcaatggcgcctctattcatgtatgatcaagaaatggaggacaacgaggaggatcaggcacactagatgcagattgcaccagctgcagcgaagcctttgttttgtgttgctggggcggctctacttatgtaatgtggaatggagggattgcgcaagcttaaaagtatggctggatcggccttgttttttaactggttctctagttactgccatctaatagccaacatttttcccgcttttgtaaatccgtgcagttgtttgtttcaaaggaaaatgcaataaggatatgcagaactatattccttattttaaactctactcctttcgtcccgtgaagcaagtcattt

SEQ ID NO: 215920 - DNA, 1822 bp, Zea Mays
aatttatctagaggaaaaagtcaaaacaaacagcgctacgccatcggtcccctgcccctccccgacgcttccggctttccgtgcgaccgtgcccttttcctcctctcgcagctcgcaggcgcaacagattccacccgttccttcgggtggccggacggaacgaggaaggaggcaggatggcctccgatggccacccgccggagccggggaagaaggaggatgtcgccaccacggccgccgggcctggagcaaacgatctggacgacccgcaattcatgtgctgcgtatgtctggatcttctgtacaaaccagttgttatatcatgtggtcatatgtcatgtttctggtgtgtccacaaagctatgcatattttccgggaatcgcattgtgctgtgtgtaggcagccctatatacacttcccgagtatttgtcagctcttgcatcatttgcttctaaagcttgaaactaatgattacaaaagaagggaaaaagaagtactagaggaagagaagcgcatgcaaacatactctccccaaatcattgagttcttaaactacaagactaacgttggaagctataaggagaacagaaatgaagacagtaaagctagacctccacaagaagttccattgaatgacagcgttccagatgagcatttgaagaaaattaaattggaggatgtttcatgccctctctgtatggagatgctgtatcaacctgctgttcttaattgtggtcatgtgtattgtgtatcctgtttgtcatccttgaatgaggaaacgctgaagtgccatgtttgtggaagtcttcaccctggagatttccctaatgtttgcctggaccttgatcatttccttgaagaatattttccagcagaatatgaattgagagggcagaaagttcaatttaagaaggatcagtgcaatcgtgaaacatcatcttcaggcagaaaaggaagcactagggcactgcatgctgaagacccgtcaaatattcacattggagtaggatgcgactcatgtggggtatatccgatacgtggtaagagatacaaatgccaggactgcactgagttaataggctttgacctttgcgaagcctgctacaactccagttcaaagctcccaggacgctttaaccagcggcacacccctaatcacagaatggaagttgacaattcagcactcgtgcataggatactgagacaccatggcatacccgaggaaggccctgagggactgatgatggaagtggttggtcctgatgcaatggtgcagatactcattgataatcaaggaatggaggagggcaatgacgagggcccaggagaggcggccattgaagaaccagttggttctcttggctcaatgtcgcgtctgtcgcatctattcatgtataatccagaaatggaggatggcaatgacgaggactcaggagaggaggcggccattgaagaaccagttggttctcttggcgcaatggcgcctctattcatgtatgatcaagaaatggaggacaacgaggaggatcaggcacactagatgcagattgcaccagctgcagcgaagcctttgttttgtgttgctggggcggctctacttatgtaatgtggaatggagggattgcgcaagcttaaaagtatggctggatcggccttgttttttaactggttctctagttactgccatctaatagccaacatttttcccgcttttgtaaatccgtgcagttgtttgtttcaaaggaaaatgcaataaggatatgcagaactatattccttattttaaactctactcctttcgtcccgtgaagcaagtcattt

SEQ ID NO: 215921 - DNA, 1824 bp, Zea Mays
aatttatctagaggaaaaagtcaaaacaaacagcgctacgccatcggtcccctgcccctccccgacgcttccggctttccgtgcgaccgtgcccttttcctcctctcgcagctcgcaggcgcaacagattccacccgttccttcgggtggccggacggaacgaggaaggaggcaggatggcctccgatggccacccgccggagccggggaagaaggaggatgtcgccaccacggccgccgggcctggagcaaacgatctggacgacccgcaattcatgtgctgcgtatgtctggatcttctgtacaaaccagttgttatatcatgtggtcatatgtcatgtttctggtgtgtccacaaagctatgcatattttccgggaatcgcattgtgctgtgtgtaggcagccctatatacacttcccgagtatttgtcagctcttgcatcatttgcttctaaagcttgaaactaatgattacaaaagaagggaaaaagaagtactagaggaagagaagcgcatgcaaacatactctccccaaatcattgagttcttaaactacaagactaacgctataaggagaacagaaatgaagacagtaaagctagacctccacaagaagttccattgaatgacagcgttccagatgagcatttgaagaaaattaaattggaggatgtttcatgccctctctgtatggagatgctgtatcaacctgctgttcttaattgtggtcatgtgtattgtgtatcctgtttgtcatccttgaatgaggaaacgctgaagtgccatgtttgtggaagtcttcaccctggagatttccctaatgtttgcctggaccttgatcatttccttgaagaatattttccagcagaatatgaattgagagggcagaaagttcaatttaagaaggatcagtgcaatcgtgaaacatcatcttcaggtacttcaggcagaaaaggaagcactagggcactgcatgctgaagacccgtcaaatattcacattggagtaggatgcgactcatgtggggtatatccgatacgtggtaagagatacaaatgccaggactgcactgagttaataggctttgacctttgcgaagcctgctacaactccagttcaaagctcccaggacgctttaaccagcggcacacccctaatcacagaatggaagttgacaattcagcactcgtgcataggatactgagacaccatggcatacccgaggaaggccctgagggactgatgatggaagtggttggtcctgatgcaatggtgcagatactcattgataatcaaggaatggaggagggcaatgacgagggcccaggagaggcggccattgaagaaccagttggttctcttggctcaatgtcgcgtctgtcgcatctattcatgtataatccagaaatggaggatggcaatgacgaggactcaggagaggaggcggccattgaagaaccagttggttctcttggcgcaatggcgcctctattcatgtatgatcaagaaatggaggacaacgaggaggatcaggcacactagatgcagattgcaccagctgcagcgaagcctttgttttgtgttgctggggcggctctacttatgtaatgtggaatggagggattgcgcaagcttaaaagtatggctggatcggccttgttttttaactggttctctagttactgccatctaatagccaacatttttcccgcttttgtaaatccgtgcagttgtttgtttcaaaggaaaatgcaataaggatatgcagaactatattccttattttaaactctactcctttcgtcccgtgaagcaagtcattt

SEQ ID NO: 215922 - DNA, 2600 bp, Zea Mays
ctgccgcccgcatccgcgccgcaacccgcagccgccctgcaggcaaccgcccgcatccgcggcagcgccgcggctgcttccatccatggcgccgcggcttccatcaatcgccagcgcgtcctccgtactcctgtcatccgaggaaagccttccatccatggcgccgttgctgcaattccccccgcgatccacgctacctccattgcccacacgatccgcgctccctccattgctaccgcgatgccccttcccaggaacccttccatccatggcgtcgttgctgcaggtgccccgcaatcaactccattgccgccacgatccccttccaccgacgacactcaccttccatcgacaaaactgatcttcctccattccaccgacggcactcacctctcagatcccgtgctcatcaccatcgtgcccctcgctcgccgcccccacctcaccaagagccttagccgtccctagagaagacacggaggtgcagtgccagtgctttcctcaagtgcacctcggattttcggtaccggccagattgggacgaattcaacattcatcggctccaccaaaacactgccactatgatgtgtatgcttgcgtcaggacaggagacccaaaagtacttcatagatgaatgtgacattttccacaagaacgagatacgaaatggccaaggactgctgacgatgatgacgacatggccaccatcgctgccctcagttgtcctcagggagataattgtacaaacttttggcatctcacatcaatttactccatccatgatgaatctgagcatgaatggtggtgccaaaaaacttgatgggaaatctatgacaatgctgtggagaaacagctacaatggcatgcaagccaagtttgctgcaaggcagatgccagatgattggcaggaaacaagtacacttttggctacattagagaagattgagtcttggatattttctcgcattgttgagacaatatggtggcaggcactaactcctcacatgcaaaaacgagtagaaggatcatcaactccaaaggctggtagagtgctatgtcctactttgggtgatcagcagtagggcaccttttctgttaacctgtggaaggctgcgtttcacgacgcattcaacagaatgtgccccctcagtgctggcggacatgagtgtggctgtttaccaatattagcaaaactggtgatggagcagtgtgtagcccgtttgaatgttgccatgtttaatgccatccttcgtgaatcatcaagtgagataccaacagactctatatctgacccaattgttgacccaaaagtcctaccaattccagttggtgatctaagctttgggtcaggcgcgcagctgaagaactctattggaaacgggtctagatggctgacagataatcttggcatagatcatgatgactttgaggacataggagatgttgaagacgaaagaagagttgcagctgaaacgaaatcgtttcaacttctcaatgagctaagtgatcatctattttttagtttttcataattttcctttcatggcctccttacatgtttgatttcctatgatccatgagctgccaatcatgataacgcggtttcactatgcaggagatgaacaaggatgcagtcacaactgatgctatcggcagtatcagaacttgatggtgcttgtagactgttcatggtgcttgtagggatgatgtatgtctatggcttactgagctccaaccaactatggcaggagcgttagctaggacagcagtcagtctaacaattgtggacaaagttcagtctaccatacactgaagcgcacccttgttgctaaagctgcaggtgtgaacaactttgctcagcagaatggaggatcattgtcactagcagcaagacctcgagcccaggcagttaaccatcagtttctttccttctttctttgggccgagagagcaaagaaggatgatgcactttccaacctgtgtagcacgttgggacaactcaagaaatggcagtggatatggacatagaaattgacaggcaaaacaaagcgctggttcctttcagcgacgacatcactgaactgaattttagactgaaaggcgtgaatcagtgtggacaccagttgctgggcaagtgatatggagccagaattcgggcagttcggagactatcgccttgattgcagaatttaagaacattgttgttttacatgtttttttgcagtgaatcaggccacacatgttgtattagtgagagaatgatgatttattttatattattatggatttcatagattattttagttttccctgaactgcaattgtttcaataacataggaggggactaccttcaatgacatttaggtgaatttttaaggtatgtccattattccattatagagcacaaagcctacttcttacaactcactgtatgttttataattgtatcaaaagcactgaacaaacatagttagctatcacgttcactgttgtctaaatagattgaaataatgtggtgaagccgtcatggactcttaagtagcttagccactgcaaaggatacaattaattataaaacaccaatgaatcaataaaaaaa

SEQ ID NO: 215923 - DNA, 2060 bp, Zea Mays
cgcatccgcgccgcaacccgcagccgccctgcaggcaaccgcccgcatccgcggcagcgccgcggctgcttccatccatggcgccgcggcttccatcaatcgccagcgcgtcctccgtactcctgtcatccgaggaaagccttccatccatggcgccgttgctgcaattccccccgcgatccacgctacctccattgcccacacgatccgcgctccctccattgctaccgcgatgccccttcccaggaacccttccatccatggcgtcgttgctgcaggtgccccgcaatcaactccattgccgccacgatccccttccaccgacgacactcaccttccatcgacaaaactgatcttcctccattccaccgacggcactcacctctcagatcccgtgctcatcaccatcgtgcccctcgctcgccgcccccacctcaccaagagccttagccgtccctagagaagacacggaggtgcagtgccagtgctttcctcaagtgcacctcggattttcggtaccggccagattgggacgaattcaacattcatcggctccaccaaaacactgccactatgatgtgtatgcttgcgtcaggacaggagacccaaaagtacttcatagatgaatgtgacattttccacaagaacgagatacgaaatggccaaggactgctgacgatgatgacgacatggccaccatcgctgccctcagttgtcctcagggagataattgtacaaacttttggcatctcacatcaatttactccatccatgatgaatctgagcatgaatggtggtgccaaaaaacttgatgggaaatctatgacaatgctgtggagaaacagctacaatggcatgcaagccaagtttgctgcaaggcagatgccagatgattggcaggaaacaagtacacttttggctacattagagaagattgagtcttggatattttctcgcattgttgagacaatatggtggcaggcactaactcctcacatgcaaaaacgagtagaaggatcatcaactccaaaggctggtagagtgctatgtcctactttgggtgatcagcagtagggcaccttttctgttaacctgtggaaggctgcgtttcacgacgcattcaacagaatgtgccccctcagtgctggcggacatgagtgtggctgtttaccaatattagcaaaactggtgatggagcagtgtgtagcccgtttgaatgttgccatgtttaatgccatccttcgtgaatcatcaagtgagataccaacagactctatatctgacccaattgttgacccaaaagtcctaccaattccagttggtgatctaagctttgggtcaggcgcgcagctgaagaactctattggaaacgggtctagatggctgacagataatcttggcatagatcatgatgactttgaggacataggagatgttgaagacgaaagaagagttgcagctgaaacgaaatcgtttcaacttctcaatgagctaagtgatcatctattttttagtttttcataattttcctttcatggcctccttacatgtttgatttcctatgatccatgagctgccaatcatgataacgcggtttcactatgcaggagatgaacaaggatgcagtcacaactgatgctatcggcagtatcagaacttgatggtgcttgtagactgttcatggtgcttgtagggatgatgtatgtctatggcttactgagctccaaccaactatggcaggagcgttagctaggacagcagtcagtctaacaattgtggacaaagttcagtctaccatacactgaagcgcacccttgttgctaaagctgcaggtgtgaacaactttgctcagcagaatggaggatcattgtcactagcagcaagacctcgagcccaggcagttaaccatcagtttctttccttctttctttgggccgagagagcaaagaaggatgatgcactttccaacctgtgtagcacgttgggacaactcaagaaatggcagtggatatggacatagaaattgacagtttgatggaggtattttatctcgcttctag

SEQ ID NO: 215924 - DNA, 2581 bp, Zea Mays
cgcatccgcgccgcaacccgcagccgccctgcaggcaaccgcccgcatccgcggcagcgccgcggctgcttccatccatggcgccgcggcttccatcaatcgccagcgcgtcctccgtactcctgtcatccgaggaaagccttccatccatggcgccgttgctgcaattccccccgcgatccacgctacctccattgcccacacgatccgcgctccctccattgctaccgcgatgccccttcccaggaacccttccatccatggcgtcgttgctgcaggtgccccgcaatcaactccattgccgccacgatccccttccaccgacgacactcaccttccatcgacaaaactgatcttcctccattccaccgacggcactcacctctcagatcccgtgctcatcaccatcgtgcccctcgctcgccgcccccacctcaccaagagccttagccgtccctagagaagacacggaggtgcagtgccagtgctttcctcaagtgcacctcggattttcggtaccggccagattgggacgaattcaacattcatcggctccaccaaaagagacccaaaagtacttcatagatgaatgtgacattttccacaagaacgagatacgaaatggccaaggactgctgacgatgatgacgacatggccaccatcgctgccctcaggctgacattctggctctccaacacagttgtcctcagggagataattgtacaaacttttggcatctcacatcaatttactccatccatgatgaatctgagcatgaatggtggtgccaaaaaacttgatgggaaatctatgacaatgctgtggagaaacagctacaatggcatgcaagccaagtttgctgcaaggcagatgccagatgattggcaggaaacaagtacacttttggctacattagagaagattgagtcttggatattttctcgcattgttgagacaatatggtggcaggcactaactcctcacatgcaaaaacgagtagaaggatcatcaactccaaaggctggtagagtgctatgtcctactttgggtgatcagcagtagggcaccttttctgttaacctgtggaaggctgcgtttcacgacgcattcaacagaatgtgccccctcagtgctggcggacatgagtgtggctgtttaccaatattagcaaaactggtgatggagcagtgtgtagcccgtttgaatgttgccatgtttaatgccatccttcgtgaatcatcaagtgagataccaacagactctatatctgacccaattgttgacccaaaagtcctaccaattccagttggtgatctaagctttgggtcaggcgcgcagctgaagaactctattggaaacgggtctagatggctgacagataatcttggcatagatcatgatgactttgaggacataggagatgttgaagacgaaagaagagttgcagctgaaacgaaatcgtttcaacttctcaatgagctaagtgatcatctattttttagtttttcataattttcctttcatggcctccttacatgtttgatttcctatgatccatgagctgccaatcatgataacgcggtttcactatgcaggagatgaacaaggatgcagtcacaactgatgctatcggcagtatcagaacttgatggtgcttgtagactgttcatggtgcttgtagggatgatgtatgtctatggcttactgagctccaaccaactatggcaggagcgttagctaggacagcagtcagtctaacaattgtggacaaagttcagtctaccatacactgaagcgcacccttgttgctaaagctgcaggtgtgaacaactttgctcagcagaatggaggatcattgtcactagcagcaagacctcgagcccaggcagttaaccatcagtttctttccttctttctttgggccgagagagcaaagaaggatgatgcactttccaacctgtgtagcacgttgggacaactcaagaaatggcagtggatatggacatagaaattgacaggcaaaacaaagcgctggttcctttcagcgacgacatcactgaactgaattttagactgaaaggcgtgaatcagtgtggacaccagttgctgggcaagtgatatggagccagaattcgggcagttcggagactatcgccttgattgcagaatttaagaacattgttgttttacatgtttttttgcagtgaatcaggccacacatgttgtattagtgagagaatgatgatttattttatattattatggatttcatagattattttagttttccctgaactgcaattgtttcaataacataggaggggactaccttcaatgacatttaggtgaatttttaaggtatgtccattattccattatagagcacaaagcctacttcttacaactcactgtatgttttataattgtatcaaaagcactgaacaaacatagttagctatcacgttcactgttgtctaaatagattgaaataatgtggtgaagccgtcatggactcttaagtagcttagccactgcaaaggatacaattaattataaaacaccaatgaatcaataaaaaaa

SEQ ID NO: 215925 - DNA, 2530 bp, Zea Mays
cgcatccgcgccgcaacccgcagccgccctgcaggcaaccgcccgcatccgcggcagcgccgcggctgcttccatccatggcgccgcggcttccatcaatcgccagcgcgtcctccgtactcctgtcatccgaggaaagccttccatccatggcgccgttgctgcaattccccccgcgatccacgctacctccattgcccacacgatccgcgctccctccattgctaccgcgatgccccttcccaggaacccttccatccatggcgtcgttgctgcaggtgccccgcaatcaactccattgccgccacgatccccttccaccgacgacactcaccttccatcgacaaaactgatcttcctccattccaccgacggcactcacctctcagatcccgtgctcatcaccatcgtgcccctcgctcgccgcccccacctcaccaagagccttagccgtccctagagaagacacggaggtgcagtgccagtgctttcctcaagtgcacctcggattttcggtaccggccagattgggacgaattcaacattcatcggctccaccaaaaatacgaaatggccaaggactgctgacgatgatgacgacatggccaccatcgctgccctcaggctgacattctggctctccaacacagttgtcctcagggagataattgtacaaacttttggcatctcacatcaatttactccatccatgatgaatctgagcatgaatggtggtgccaaaaaacttgatgggaaatctatgacaatgctgtggagaaacagctacaatggcatgcaagccaagtttgctgcaaggcagatgccagatgattggcaggaaacaagtacacttttggctacattagagaagattgagtcttggatattttctcgcattgttgagacaatatggtggcaggcactaactcctcacatgcaaaaacgagtagaaggatcatcaactccaaaggctggtagagtgctatgtcctactttgggtgatcagcagtagggcaccttttctgttaacctgtggaaggctgcgtttcacgacgcattcaacagaatgtgccccctcagtgctggcggacatgagtgtggctgtttaccaatattagcaaaactggtgatggagcagtgtgtagcccgtttgaatgttgccatgtttaatgccatccttcgtgaatcatcaagtgagataccaacagactctatatctgacccaattgttgacccaaaagtcctaccaattccagttggtgatctaagctttgggtcaggcgcgcagctgaagaactctattggaaacgggtctagatggctgacagataatcttggcatagatcatgatgactttgaggacataggagatgttgaagacgaaagaagagttgcagctgaaacgaaatcgtttcaacttctcaatgagctaagtgatcatctattttttagtttttcataattttcctttcatggcctccttacatgtttgatttcctatgatccatgagctgccaatcatgataacgcggtttcactatgcaggagatgaacaaggatgcagtcacaactgatgctatcggcagtatcagaacttgatggtgcttgtagactgttcatggtgcttgtagggatgatgtatgtctatggcttactgagctccaaccaactatggcaggagcgttagctaggacagcagtcagtctaacaattgtggacaaagttcagtctaccatacactgaagcgcacccttgttgctaaagctgcaggtgtgaacaactttgctcagcagaatggaggatcattgtcactagcagcaagacctcgagcccaggcagttaaccatcagtttctttccttctttctttgggccgagagagcaaagaaggatgatgcactttccaacctgtgtagcacgttgggacaactcaagaaatggcagtggatatggacatagaaattgacaggcaaaacaaagcgctggttcctttcagcgacgacatcactgaactgaattttagactgaaaggcgtgaatcagtgtggacaccagttgctgggcaagtgatatggagccagaattcgggcagttcggagactatcgccttgattgcagaatttaagaacattgttgttttacatgtttttttgcagtgaatcaggccacacatgttgtattagtgagagaatgatgatttattttatattattatggatttcatagattattttagttttccctgaactgcaattgtttcaataacataggaggggactaccttcaatgacatttaggtgaatttttaaggtatgtccattattccattatagagcacaaagcctacttcttacaactcactgtatgttttataattgtatcaaaagcactgaacaaacatagttagctatcacgttcactgttgtctaaatagattgaaataatgtggtgaagccgtcatggactcttaagtagcttagccactgcaaaggatacaattaattataaaacaccaatgaatcaataaaaaaa

SEQ ID NO: 215926 - DNA, 8351 bp, Zea Mays
cgcatccgcgccgcaacccgcagccgccctgcaggcaaccgcccgcatccgcggcagcgccgcggctgcttccatccatggcgccgcggcttccatcaatcgccagcgcgtcctccgtactcctgtcatccgaggaaagccttccatccatggcgccgttgctgcaattccccccgcgatccacgctacctccattgcccacacgatccgcgctccctccattgctaccgcgatgccccttcccaggaacccttccatccatggcgtcgttgctgcaggtgccccgcaatcaactccattgccgccacgatccccttccaccgacgacactcaccttccatcgacaaaactgatcttcctccattccaccgacggcactcacctctcagatcccgtgctcatcaccatcgtgcccctcgctcgccgcccccacctcaccaagagccttagccgtccctagagaagacacggaggtgcagtgccagtgctttcctcaagtgcacctcggattttcggtaccggccagattgggacgaattcaacattcatcggctccaccaaaacactgccactatgatgtgtatgcttgcgtcaggacaggagacccaaaagtacttcatagatgaatgtgacattttccacaagaacgagatacgaaatggccaaggactgctgacgatgatgacgacatggccaccatcgctgccctcaggctgacattctggctctccaacacagttgtcctcagggagataattgtacaaacttttggcatctcacatcaatttactccatccatgatgaatctgagcatgaatggtggtgccaaaaaacttgatgggaaatctatgacaatgctgtggagaaacagctacaatggcatgcaagccaagtttgctgcaaggcagatgccagatgattggcaggaaacaagtacacttttggctacattagagaagattgagtcttggatattttctcgcattgttgagacaatatggtggcaggtaaatgtctgtcttaggcactaactcctcacatgcaaaaacgagtagaaggatcatcaactccaaaggctggtagagtgctatgtcctactttgggtgatcagcagtagggcaccttttctgttaacctgtggaaggctgcgtttcacgacgcattcaacagaatgtgccccctcagtgctggcggacatgagtgtggctgtttaccaatattagcaaaactggtgatggagcagtgtgtagcccgtttgaatgttgccatgtttaatgccatccttcgtgaatcatcaagtgagataccaacagactctatatctgacccaattgttgacccaaaagtcctaccaattccagttggtgatctaagctttgggtcaggcgcgcagctgaagaactctattggaaacgggtctagatggctgacagataatcttggcatagatcatgatgactttgaggacataggagatgttgaagacgaaagaagagttgcagctgaaacgaaatcgtttcaacttctcaatgagctaagtgatcatctattttttagtttttcataattttcctttcatggcctccttacatgtttgatttcctatgatccatgagctgccaatcatgataacgcggtttcactatgcaggagatgaacaaggatgcagtcacaactgatgctatcggcagtatcagaacttgatggtgcttgtagactgttcatggtgcttgtagggatgatgtatgtctatggcttactgagctccaaccaactatggcaggagcgttagctaggacagcagtcagtctaacaattgtggacaaagttcagtctaccatacactgaagcgcacccttgttgctaaaggtgtgaacaactttgctcagcagaatggaggatcattgtcactagcagcaagacctcgagcccaggcagttaaccatcagtttctttccttctttctttgggccgagagagcaaagaaggatgatgcactttccaacctgtgtagcacgttgggacaactcaagaaatggcagtggatatggacatagaaattgacaggcaaaacaaagcgctggttcctttcagcgacgacatcactgaactgaattttagactgaaaggcgtgaatcagtgtggacaccagttgctgggcaagtgatatggagccagaattcgggcagttcggagactatcgccttgattgcagaatttaagaacattgttgttttacatgtttttttgcagtgaatcaggccacacatgttgtattagtgagagaatgatgatttattttatattattatggatttcatagattattttagttttccctgaactgcaattgtttcaataacataggaggggactaccttcaatgacatttaggtgaatttttaaggttgctgaacaaggtcacaaaggatgggattgagaccactcgaggttccgagctcccgcaatcaccagtgaggactggggattcgctgatcagatgcggtgtgtggggccttgctcagcggcggggctgggaggtccgagcggaatagatgtcgatggcatggcggttgctccgcacaatccatttccggcatctgagcccaggtgtcaggcgagcatccaagattgtagaccaaggctttaccaataatgccccagagctgagtaccaacaaagggagtttgctgaggtgtagcagcatccgcttcggggagaagcggaactcaatttttgcttgcgctccagacaatttggagcagaaatctggacaaacgttcgaagctgatgcccattctgcgctaaaattgtgctctggtatcgggagtgtagttatagccaagtgttctcacatatttgagagaaatggggacacctttgatgggaactgcagtttgcaagatatcctcaagcctggtttatggctctcaccggagaccctccgccggttttggcgtgtctctgagctgaagcctaaggattttcttgacattttgaatggttttggactcagtgccgtaaaagtgagaaatgcaagatttctatggaatttgtacaggtggacatcgcggcagagcaaagagttccaacatctgccaaggtcaaatgagacaatggtatccatacttgcagatgctcatatgctcagtcaagcagaatcactactgctttcattgattgatcatatgactccagctgtttctagtgaactattcagtcagattatccaggtgtattcagaagcaggcaaccttgggaaatcagttgcactttatgattatgcaaggggcaagcatttgattccttcagcttcatgctatcaagtacttcttcattttctaaccagaaacagaaaggatgaattgattttgagagtatatctggacatgcttgaagttggatttggttcttgcaccgaaggaaatattcttgattctgttgtcatggctttaatcaggaaagggtattgcaggtataggcggtttgatgatattgaacaagtcttgaggcacatgaaaaccaatggtgtaaatgttcttctctctggaaactgtgtgctctccaaggccttatcattcttggggctagatcacctaggggtgaaaatcaagagagataatgtcactggtttcccaaaagctgagttttttgattcagttggcaatggattgtatttggacactgattccaaaatgtttgaggtttcattgtcacaagttttggatagcgcacttctcccagatattaactcagagctaatcagggcatctcagcaaggcgatgttgcaagtgctcttcttgtgaaagacaaagcttttcaatggggatatgacatttcaccagatagctgctctgagctattcaaggccttatgtgtgagccctgcttatgttatagatgtcattgaccttatggaggagatgccagatatactttacaaacttgatgctcaaaatctagatttggttgcccaaacattgagtaggaatggaatgtctgctcatgcaaaactggttttagaaaaaatgttgagagaagacttgtcaatcagtcacaatacatatacttatttaatgataggtttatgcgaagaaaggaacatagcagggttttgggaatgttggaatcttgcaacaaagtgcagatggtcacctgatagcaaggatatgatgggcctcatcagttacttgtgcaaatggggagtgattgaggaagccctgaaacttatgaactctttatttgactgctaccatgatctgttttttagtgcatattgtgcacttctcaaagagttgtgcaggacaggtcataccagcattggatgcgcaatgttggaggctctcaaagaaaagggtgtggctgtggatcgatcattattcttttatgtgatggagggcttcctaaaggagcaaagaactgctgaatcaattggaatgcatgacatgtggcttagcaaaagcaaagaacttgatgtttttacttaccgatctgtgttgccttcattaccatggctggacacagatcgagccaagaacttggtagaatctatgctgaccgtgaaacttactgaattctcatatcgcggttgcattgtgaatgaattaatgcaaacaaggaatataaaatgggccattccagtcttgcaagaatcagctcctgggaagctcagtgccactttgttaaattccttacttcaagcctatggttggctaaaaaattggagaaagttagatgcagttctttgcaagatgctaaagatgcatgccaccctttctatatctagctaccgctttcttgtgtgcagaatgtgtgagcaaagtcgtttttctagcgcttcaagccttagagcacttttccaacatactgacaagtcaagagaactgattgcatgcaacattctaatattttatctttttcaaagaagaaacagctcacagattcatgatttattgaaggacattgaaggtaatggtatttctcttgacaaaaccacatatgatttccttgtctatggatttcacaaatctggggatatcaatgattcagttaatgcgcttgatgcctgcattgctcagggaataaaaccaagcaaccgcagtctcagaatagtgttaagtcattactgcaggctaggaaaccatgagaaatcactagcattatttcacttgattgagcgcaatggatggaagcatggtttaatcattaagaccaccctagcttcatgtctcctttcatttgggagacaattggaagcaaaatcatgtctgaacaacctgagcaaaggtgagtttatcggatgttcaagcaattttgatgatctcatcaaggaattctgcattctaggagatttgaaaatgactctttatctgctaaatacaatgttaaagaaaggcacactgcctaatgaagccagttacagttctgttatatataaactttgtacattgaaggagttcgatcaggcacttgattttcttgctgaaatgcagctggcaagtctaaaatcaagtgaaatctcctgtgatgcacttgtacatggcctttgtgccatgggaagaccttctgatgctagaaaggttttggaaatgctaaccaccttgggatctgcaccatcctatggcatgtttagagttgtttttgataactattgcagaagtagcaatctacagaaagctgcggcacttctgcatgacatgcaacaagcaggacaagtgcccaactttgagatgcattggtctgttataagcaatttaagcagtaccaatgagaaaactgaaggacatggagagtgcattttgccaaacctttttctttctgcaaattccccttaaaggtcataaggcgatatatggcttccagaaaatggtgaactgatgattgttctcaagttgaaccctagtggaactgataaaactcgtgaaaccaaggttatgcaactctggaactcaaacgttctactcgaggattgatggttcacataaatgtgggaacacgtaggaaaaactatgcatcttcgatttaggttgcaaaagagggagcttgaactcattacctgagccatcacaactttcttctctgcaacttggttacaggttatgcccttgctaaagggataatgcaaagatccctacaacaccaattagaattggggaagacgaacctcctcctcagtctcctagcttgttcgttgctctcacctgggatctgccctgggatcacctttgcaacatcagttgaactaaagatttggactggacatggttcagttgtttttgaacgagtacgcaaatgccaggtttttcctgtttgggcacaaatggaaacaaaaaagttggactcagcctatcgtgaagctacgaaggaagagcactgtcccattattctgttttttcggtaattaaagcatcatctccattcttggttgttcccatttttctgttatttactaagtagtttttctggctaatgttaaaaactggaagaagaccatgtttctagcatgaacatgccaacatggtgccatcaacaacttccctgttagctcacggtacaccatgctccagtctgcccccctggttatcactaattcaatcatctgtggtgccgattgtgttcccaagatgcactgaaatagagcagatcaaatgaggatgaagttactgtgtagagatttttgttcaccctttgtagcagcatccatggatttttatttgcacagaattactctcttttacccgtaacttgtgattgctgatatgatgcatagaagtctgaaatctgaattgatgccactgtattttttccatgtttacattatgttgattttctttctgctatttactttcaatgttttggagcagtacctgagcaactgaggcaaccctttcgatcttatgagaccaagatgttttctggtcccaaacccatgatggtatgccttagtttgcttgcagacaaatgcttttttttgacaacttcactcatcccttgttttgaatagatgacataattggagactctggccatttatctgtgttgtttccattaatgtgtcttctcataggtactctgttatggtcgctagatcggtgagggattggagagggatattgatgggcaggaacgtcggtcgggggcctctgcccacggccgagcaagaggagggtttctctcttctaattcttacctactttatttctcatccattgattacataaatagaccagctggctgtccttatctagctagagatccttatctcctaaaaactctcctaaaactactaactgataaccttcctagataatctcaaccaatctcctaaataatcttaactaatcttctaatattactagctgaatgcccgtgcgttgcaacgggaatatataataccagtatactacgataacttatatacaaaatatgtgttataccattatgagaaaatgtttcataatcaatttgtgattctggccatacataaattttgttatttataatctatctgtttcaccactgcattacaaccatcagtatcatgcagacttcgatatatgtcacgatttgtatggtctcattattggagagcatgtttcacacataccagaagaaattccctcgtacatcgttagtcatcggacacgtaccaccatacgcttttgcttaaacaaaaaggtaagtgtgtgtttgcaagactaatggtcaaacaccgtataaccataaagttagaatactatattaatatattaaataaattaatccaatagacatagattaacccaattaacacaggataaataaatatctaattataaaagtatgaaacatggtataatcaatgttgttactgcgtagtaaatattcatacgagactaacacaactggaacggttcaatttagaattaaaatggggaagttacgaatttccaaagtttctatgtatttgatataggattaattaggaaatcaattttattgttgttttcatgacaaaacagaggtattatgtgataaaaaataatattatagaattatagaaattggaatgaattcatttagatttaatatgaaatttccatgaattaaatgggcttttgcaattatttttaaactaaaaatcaatttccaaactcttttccctattttctttatttcctggactgcgtcccaaattccagaaacatcaggggccaagctataaatgtttttctagactcagtgagcatacagagtggacggcgggttaaacacaaataaagccaacatgggtcatgttggctagagggtggaaggctagacattctactcaatagatccaaggtttaatccttgagcaaccacggtttaat

SEQ ID NO: 215927 - DNA, 8721 bp, Zea Mays
cgcatccgcgccgcaacccgcagccgccctgcaggcaaccgcccgcatccgcggcagcgccgcggctgcttccatccatggcgccgcggcttccatcaatcgccagcgcgtcctccgtactcctgtcatccgaggaaagccttccatccatggcgccgttgctgcaattccccccgcgatccacgctacctccattgcccacacgatccgcgctccctccattgctaccgcgatgccccttcccaggaacccttccatccatggcgtcgttgctgcaggtgccccgcaatcaactccattgccgccacgatccccttccaccgacgacactcaccttccatcgacaaaactgatcttcctccattccaccgacggcactcacctctcagatcccgtgctcatcaccatcgtgcccctcgctcgccgcccccacctcaccaagagccttagccgtccctagagaagacacggaggtgcagtgccagtgctttcctcaagtgcacctcggattttcggtaccggccagattgggacgaattcaacattcatcggctccaccaaaacactgccactatgatgtgtatgcttgcgtcaggacaggagacccaaaagtacttcatagatgaatgtgacattttccacaagaacgagatacgaaatggccaaggactgctgacgatgatgacgacatggccaccatcgctgccctcaggctgacattctggctctccaacacagttgtcctcagggagataattgtacaaacttttggcatctcacatcaatttactccatccatgatgaatctgagcatgaatggtggtgccaaaaaacttgatgggaaatctatgacaatgctgtggagaaacagctacaatggcatgcaagccaagtttgctgcaaggcagatgccagatgattggcaggaaacaagtacacttttggctacattagagaagattgagtcttggatattttctcgcattgttgagacaatatggtggcaggtaaatgtctgtcttaggcactaactcctcacatgcaaaaacgagtagaaggatcatcaactccaaaggctggtagagtgctatgtcctactttgggtgatcagcagtagggcaccttttctgttaacctgtggaaggctgcgtttcacgacgcattcaacagaatgtgccccctcagtgctggcggacatgagtgtggctgtttaccaatattagcaaaactggtgatggagcagtgtgtagcccgtttgaatgttgccatgtttaatgccatccttcgtgaatcatcaagtgagataccaacagactctatatctgacccaattgttgacccaaaagtcctaccaattccagttggtgatctaagctttgggtcaggcgcgcagctgaagaactctattggaaacgggtctagatggctgacagataatcttggcatagatcatgatgactttgaggacataggagatgttgaagacgaaagaagagttgcagctgaaacgaaatcgtttcaacttctcaatgagctaagtgatcatctattttttagtttttcataattttcctttcatggcctccttacatgtttgatttcctatgatccatgagctgccaatcatgataacgcggtttcactatgcaggagatgaacaaggatgcagtcacaactgatgctatcggcagtatcagaacttgatggtgcttgtagactgttcatggtgcttgtagggatgatgtatgtctatggcttactgagctccaaccaactatggcaggagcgttagctaggacagcagtcagtctaacaattgtggacaaagttcagtctaccatacactgaagcgcacccttgttgctaaaggtgtgaacaactttgctcagcagaatggaggatcattgtcactagcagcaagacctcgagcccaggcagttaaccatcagtttctttccttctttctttgggccgagagagcaaagaaggatgatgcactttccaacctgtgtagcacgttgggacaactcaagaaatggcagtggatatggacatagaaattgacaggcaaaacaaagcgctggttcctttcagcgacgacatcactgaactgaattttagactgaaaggcgtgaatcagtgtggacaccagttgctgggcaagtgatatggagccagaattcgggcagttcggagactatcgccttgattgcagaatttaagaacattgttgttttacatgtttttttgcagtgaatcaggccacacatgttgtattagtgagagaatgatgatttattttatattattatggatttcatagattattttagttttccctgaactgcaattgtttcaataacataggaggggactaccttcaatgacatttaggtgaatttttaaggttgctgaacaaggtcacaaaggatgggattgagaccactcgaggttccgagctcccgcaatcaccagtgagatgcggtgtgtggggccttgctcagcggcggggctgggaggtccgagcggaatagatgtcgatggcatggcggttgctccgcacaatccatttccggcatctgagcccaggtgtcaggcgagcatccaagattgtagaccaaggctttaccaataatgccccagagctgagtaccaacaaagggagtttgctgaggtgtagcagcatccgcttcggggagaagcggaactcaatttttgcttgcgctccagacaatttggagcagaaatctggacaaacgttcgaagctgatgcccattctgcgctaaaattgtgctctggtatcgggagtgtagttatagccaagtgttctcacatatttgagagaaatggggacacctttgatgggaactgcagtttgcaagatatcctcaagcctggtttatggctctcaccggagaccctccgccggttttggcgtgtctctgagctgaagcctaaggattttcttgacattttgaatggttttggactcagtgccgtaaaagtgagaaatgcaagatttctatggaatttgtacaggtggacatcgcggcagagcaaagagttccaacatctgccaaggtcaaatgagacaatggtatccatacttgcagatgctcatatgctcagtcaagcagaatcactactgctttcattgattgatcatatgactccagctgtttctagtgaactattcagtcagattatccaggtgtattcagaagcaggcaaccttgggaaatcagttgcactttatgattatgcaaggggcaagcatttgattccttcagcttcatgctatcaagtacttcttcattttctaaccagaaacagaaaggatgaattgattttgagagtatatctggacatgcttgaagttggatttggttcttgcaccgaaggaaatattcttgattctgttgtcatggctttaatcaggaaaggtaaacttttggaagctcttggtattcttcggcaattaaagagtttgggtcttaaattaagcaagggagccttgtcaaatatagttgaagaatttaacaagaaaaaggatattggggatctgatgaatttcttggaagattggaggtgtatacctgagttgcgtctttgcaacagaatccttgcgtctttgtgcacaaatcttggtacttgtcaggcatggttggtcttccaaagtttggaggccttagggtttgctccagatgctacgacttttggaattttcatttttcacagctgtagagaaatgaaactaaaatctgcacttgtatatttatcagagtgctttgctaggcatgttaaacctggagtgtgtgcctataatgctattttaggtggtgttttcagggaggggctatatagacatgcaaagtatatatttgaagacatgattgaaagagaagtaacacccaatctttcaacatataagataattcttgcagggtattgcaggtataggcggtttgatgatattgaacaagtcttgaggcacatgaaaaccaatggtgtaaatgttcttctctctggaaactgtgtgctctccaaggccttatcattcttggggctagatcacctaggggtgaaaatcaagagagataatgtcactggtttcccaaaagctgagttttttgattcagttggcaatggattgtatttggacactgattccaaaatgtttgaggtttcattgtcacaagttttggatagcgcacttctcccagatattaactcagagctaatcagggcatctcagcaaggcgatgttgcaagtgctcttcttgtgaaagacaaagcttttcaatggggatatgacatttcaccagatagctgctctgagctattcaaggccttatgtgtgagccctgcttatgttatagatgtcattgaccttatggaggagatgccagatatactttacaaacttgatgctcaaaatctagatttggttgcccaaacattgagtaggaatggaatgtctgctcatgcaaaactggttttagaaaaaatgttgagagaagacttgtcaatcagtcacaatacatatacttatttaatgataggtttatgcgaagaaaggaacatagcagggttttgggaatgttggaatcttgcaacaaagtgcagatggtcacctgatagcaaggatatgatgggcctcatcagttacttgtgcaaatggggagtgattgaggaagccctgaaacttatgaactctttatttgactgctaccatgatctgttttttagtgcatattgtgcacttctcaaagagttgtgcaggacaggtcataccagcattggatgcgcaatgttggaggctctcaaagaaaagggtgtggctgtggatcgatcattattcttttatgtgatggagggcttcctaaaggagcaaagaactgctgaatcaattggaatgcatgacatgtggcttagcaaaagcaaagaacttgatgtttttacttaccgatctgtgttgccttcattaccatggctggacacagatcgagccaagaacttggtagaatctatgctgaccgtgaaacttactgaattctcatatcgcggttgcattgtgaatgaattaatgcaaacaaggaatataaaatgggccattccagtcttgcaagaatcagctcctgggaagctcagtgccactttgttaaattccttacttcaagcctatggttggctaaaaaattggagaaagttagatgcagttctttgcaagatgctaaagatgcatgccaccctttctatatctagctaccgctttcttgtgtgcagaatgtgtgagcaaagtcgtttttctagcgcttcaagccttagagcacttttccaacatactgacaagtcaagagaactgattgcatgcaacattctaatattttatctttttcaaagaagaaacagctcacagattcatgatttattgaaggacattgaagggaataaaaccaagcaaccgcagtctcagaatagtgttaagtcattactgcaggctaggaaaccatgagaaatcactagcattatttcacttgattgagcgcaatggatggaagcatggtttaatcattaagaccaccctagcttcatgtctcctttcatttgggagacaattggaagcaaaatcatgtctgaacaacctgagcaaaggtgagtttatcggatgttcaagcaattttgatgatctcatcaaggaattctgcattctaggagatttgaaaatgactctttatctgctaaatacaatgttaaagaaaggcacactgcctaatgaagccagttacagttctgttatatataaactttgtacattgaaggagttcgatcaggcacttgattttcttgctgaaatgcagctggcaagtctaaaatcaagtgaaatctcctgtgatgcacttgtacatggcctttgtgccatgggaagaccttctgatgctagaaaggttttggaaatgctaaccaccttgggatctgcaccatcctatggcatgtttagagttgtttttgataactattgcagaagtagcaatctacagaaagctgcggcacttctgcatgacatgcaacaagcaggacaagtgcccaactttgagatgcattggtctgttataagcaatttaagcagtaccaatgagaaaactgaaggacatggagagtgcattttgccaaacctttttctttctgcaaattccccttaaaggtcataaggcgatatatggcttccagaaaatggtgaactgatgattgttctcaagttgaaccctagtggaactgataaaactcgtgaaaccaaggttatgcaactctggaactcaaacgttctactcgaggattgatggttcacataaatgtgggaacacgtaggaaaaactatgcatcttcgatttaggttgcaaaagagggagcttgaactcattacctgagccatcacaactttcttctctgcaacttggttacaggttatgcccttgctaaagggataatgcaaagatccctacaacaccaattagaattggggaagacgaacctcctcctcagtctcctagcttgttcgttgctctcacctgggatctgccctgggatcacctttgcaacatcagttgaactaaagatttggactggacatggttcagttgtttttgaacgagtacgcaaatgccaggtttttcctgtttgggcacaaatggaaacaaaaaagttggactcagcctatcgtgaagctacgaaggaagagcactgtcccattattctgttttttcggtaattaaagcatcatctccattcttggttgttcccatttttctgttatttactaagtagtttttctggctaatgttaaaaactggaagaagaccatgtttctagcatgaacatgccaacatggtgccatcaacaacttccctgttagctcacggtacaccatgctccagtctgcccccctggttatcactaattcaatcatctgtggtgccgattgtgttcccaagatgcactgaaatagagcagatcaaatgaggatgaagttactgtgtagagatttttgttcaccctttgtagcagcatccatggatttttatttgcacagaattactctcttttacccgtaacttgtgattgctgatatgatgcatagaagtctgaaatctgaattgatgccactgtattttttccatgtttacattatgttgattttctttctgctatttactttcaatgttttggagcagtacctgagcaactgaggcaaccctttcgatcttatgagaccaagatgttttctggtcccaaacccatgatggtatgccttagtttgcttgcagacaaatgcttttttttgacaacttcactcatcccttgttttgaatagatgacataattggagactctggccatttatctgtgttgtttccattaatgtgtcttctcataggtactctgttatggtcgctagatcggtgagggattggagagggatattgatgggcaggaacgtcggtcgggggcctctgcccacggccgagcaagaggagggtttctctcttctaattcttacctactttatttctcatccattgattacataaatagaccagctggctgtccttatctagctagagatccttatctcctaaaaactctcctaaaactactaactgataaccttcctagataatctcaaccaatctcctaaataatcttaactaatcttctaatattactagctgaatgcccgtgcgttgcaacgggaatatataataccagtatactacgataacttatatacaaaatatgtgttataccattatgagaaaatgtttcataatcaatttgtgattctggccatacataaattttgttatttataatctatctgtttcaccactgcattacaaccatcagtatcatgcagacttcgatatatgtcacgatttgtatggtctcattattggagagcatgtttcacacataccagaagaaattccctcgtacatcgttagtcatcggacacgtaccaccatacgcttttgcttaaacaaaaaggtaagtgtgtgtttgcaagactaatggtcaaacaccgtataaccataaagttagaatactatattaatatattaaataaattaatccaatagacatagattaacccaattaacacaggataaataaatatctaattataaaagtatgaaacatggtataatcaatgttgttactgcgtagtaaatattcatacgagactaacacaactggaacggttcaatttagaattaaaatggggaagttacgaatttccaaagtttctatgtatttgatataggattaattaggaaatcaattttattgttgttttcatgacaaaacagaggtattatgtgataaaaaataatattatagaattatagaaattggaatgaattcatttagatttaatatgaaatttccatgaattaaatgggcttttgcaattatttttaaactaaaaatcaatttccaaactcttttccctattttctttatttcctggactgcgtcccaaattccagaaacatcaggggccaagctataaatgtttttctagactcagtgagcatacagagtggacggcgggttaaacacaaataaagccaacatgggtcatgttggctagagggtggaaggctagacattctactcaatagatccaaggtttaatccttgagcaaccacggtttaat

SEQ ID NO: 215928 - DNA, 8696 bp, Zea Mays
cgcatccgcgccgcaacccgcagccgccctgcaggcaaccgcccgcatccgcggcagcgccgcggctgcttccatccatggcgccgcggcttccatcaatcgccagcgcgtcctccgtactcctgtcatccgaggaaagccttccatccatggcgccgttgctgcaattccccccgcgatccacgctacctccattgcccacacgatccgcgctccctccattgctaccgcgatgccccttcccaggaacccttccatccatggcgtcgttgctgcaggtgccccgcaatcaactccattgccgccacgatccccttccaccgacgacactcaccttccatcgacaaaactgatcttcctccattccaccgacggcactcacctctcagatcccgtgctcatcaccatcgtgcccctcgctcgccgcccccacctcaccaagagccttagccgtccctagagaagacacggaggtgcagtgccagtgctttcctcaagtgcacctcggattttcggtaccggccagattgggacgaattcaacattcatcggctccaccaaaacactgccactatgatgtgtatgcttgcgtcaggacaggagacccaaaagtacttcatagatgaatgtgacattttccacaagaacgagatacgaaatggccaaggactgctgacgatgatgacgacatggccaccatcgctgccctcaggctgacattctggctctccaacacagttgtcctcagggagataattgtacaaacttttggcatctcacatcaatttactccatccatgatgaatctgagcatgaatggtggtgccaaaaaacttgatgggaaatctatgacaatgctgtggagaaacagctacaatggcatgcaagccaagtttgctgcaaggcagatgccagatgattggcaggaaacaagtacacttttggctacattagagaagattgagtcttggatattttctcgcattgttgagacaatatggtggcaggtaaatgtctgtcttaggcactaactcctcacatgcaaaaacgagtagaaggatcatcaactccaaaggctggtagagtgctatgtcctactttgggtgatcagcagtagggcaccttttctgttaacctgtggaaggctgcgtttcacgacgcattcaacagaatgtgccccctcagtgctggcggacatgagtgtggctgtttaccaatattagcaaaactggtgatggagcagtgtgtagcccgtttgaatgttgccatgtttaatgccatccttcgtgaatcatcaagtgagataccaacagactctatatctgacccaattgttgacccaaaagtcctaccaattccagttggtgatctaagctttgggtcaggcgcgcagctgaagaactctattggaaacgggtctagatggctgacagataatcttggcatagatcatgatgactttgaggacataggagatgttgaagacgaaagaagagttgcagctgaaacgaaatcgtttcaacttctcaatgagctaagtgatcatctattttttagtttttcataattttcctttcatggcctccttacatgtttgatttcctatgatccatgagctgccaatcatgataacgcggtttcactatgcaggagatgaacaaggatgcagtcacaactgatgctatcggcagtatcagaacttgatggtgcttgtagactgttcatggtgcttgtagggatgatgtatgtctatggcttactgagctccaaccaactatggcaggagcgttagctaggacagcagtcagtctaacaattgtggacaaagttcagtctaccatacactgaagcgcacccttgttgctaaaggtgtgaacaactttgctcagcagaatggaggatcattgtcactagcagcaagacctcgagcccaggcagttaaccatcagtttctttccttctttctttgggccgagagagcaaagaaggatgatgcactttccaacctgtgtagcacgttgggacaactcaagaaatggcagtggatatggacatagaaattgacaggcaaaacaaagcgctggttcctttcagcgacgacatcactgaactgaattttagactgaaaggcgtgaatcagtgtggacaccagttgctgggcaagtgatatggagccagaattcgggcagttcggagactatcgccttgattgcagaatttaagaacattgttgttttacatgtttttttgcagtgaatcaggccacacatgttgtattagtgagagaatgatgatttattttatattattatggatttcatagattattttagttttccctgaactgcaattgtttcaataacataggaggggactaccttcaatgacatttaggtgaatttttaaggttgctgaacaaggtcacaaaggatgggattgagaccactcgaggttccgagctcccgcaatcaccagtgaggactggggattcgctgatcagatgcggtgtgtggggccttgctcagcggcggggctgggaggtccgagcggaatagatgtcgatggcatggcggttgctccgcacaatccatttccggcatctgagcccaggtgtcaggcgagcatccaagattgtagaccaaggctttaccaataatgccccagagctgagtaccaacaaagggagtttgctgaggtgtagcagcatccgcttcggggagaagcggaactcaatttttgcttgcgctccagacaatttggagcagaaatctggacaaacgttcgaagctgatgcccattctgcgctaaaattgtgctctggtatcgggagtgtagttatagccaagtgttctcacatatttgagagaaatggggacacctttgatgggaactgcagtttgcaagatatcctcaagcctggtttatggctctcaccggagaccctccgccggttttggcgtgtctctgagctgaagcctaaggattttcttgacattttgaatggttttggactcagtgccgtaaaagtgagaaatgcaagatttctatggaatttgtacaggtggacatcgcggcagagcaaagagttccaacatctgccaaggtcaaatgagacaatggtatccatacttgcagatgctcatatgctcagtcaagcagaatcactactgctttcattgattgatcatatgactccagctgtttctagtgaactattcagtcagattatccaggtgtattcagaagcaggcaaccttgggaaatcagttgcactttatgattatgcaaggggcaagcatttgattccttcagcttcatgctatcaagtacttcttcattttctaaccagaaacagaaaggatgaattgattttgagagtatatctggacatgcttgaagttggatttggttcttgcaccgaaggaaatattcttgattctgttgtcatggctttaatcaggaaaggtaaacttttggaagctcttggtattcttcggcaattaaagagtttgggtcttaaattaagcaagggagccttgtcaaatatagttgaagaatttaacaagaaaaaggatattggggatctgatgaatttcttggaagattggaggtgtatacctgagttgcgtctttgcaacagaatccttgcgtctttgtgcacaaatcttggtacttgtcaggcatggttggtcttccaaagtttggaggccttagggtttgctccagatgctacgacttttggaattttcatttttcacagctgtagagaaatgaaactaaaatctgcacttgtatatttatcagagtgctttgctaggcatgttaaacctggagtgtgtgcctataatgctattttaggtggtgttttcagggaggggctatatagacatgcaaagtatatatttgaagacatgattgaaagagaagtaacacccaatctttcaacatataagataattcttgcagggtattgcaggtataggcggtttgatgatattgaacaagtcttgaggcacatgaaaaccaatggtgtaaatgttcttctctctggaaactgtgtgctctccaaggccttatcattcttggggctagatcacctaggggtgaaaatcaagagagataatgtcactggtttcccaaaagctgagttttttgattcagttggcaatggattgtatttggacactgattccaaaatgtttgaggtttcattgtcacaagttttggatagcgcacttctcccagatattaactcagagctaatcagggcatctcagcaaggcgatgttgcaagtgctcttcttgtgaaagacaaagcttttcaatggggatatgacatttcaccagatagctgctctgagctattcaaggccttatgtgtgagccctgcttatgttatagatgtcattgaccttatggaggagatgccagatatactttacaaacttgatgctcaaaatctagatttggttgcccaaacattgagtaggaatggaatgtctgctcatgcaaaactggttttagaaaaaatgttgagagaagacttgtcaatcagtcacaatacatatacttatttaatgataggtttatgcgaagaaaggaacatagcagggttttgggaatgttggaatcttgcaacaaagtgcagatggtcacctgatagcaaggatatgatgggcctcatcagttacttgtgcaaatggggagtgattgaggaagccctgaaacttatgaactctttatttgactgctaccatgatctgttttttagtgcatattgtgcacttctcaaagagttgtgcaggacaggtcataccagcattggatgcgcaatgttggaggctctcaaagaaaagggtgtggctgtggatcgatcattattcttttatgtgatggagggcttcctaaaggagcaaagaactgctgaatcaattggaatgcatgacatgtggcttagcaaaagcaaagaacttgatgtttttacttaccgatctgtgttgccttcattaccatggctggacacagatcgagccaagaacttggtagaatctatgctgaccgtgaaacttactgaattctcatatcgcggttgcattgtgaatgaattaatgcaaacaaggaatataaaatgggccattccagtcttgcaagaatcagctcctgggaagctcagtgccactttgttaaattccttacttcaagcctatggttggctaaaaaattggagaaagttagatgcagttctttgcaagatgctaaagatgcatgccaccctttctatatctagctaccgctttcttgtgtgcagaatgtgtgagcaaagtcgtttttctagcgcttcaagccttagagcacttttccaacatactgacaagtcaagagaactgattgcatgcaacattctaatattttatctttttcaaagaagaaacagctcacagattcatgatttattgaaggacattgaaggtaatggtatttctcttgacaaaaccacatatgatttccttgtctatggatttcacaaatctggggatatcaatgattcagttaatgcgcttgatgcctgcattgctcagggaataaaaccaagcaaccgcagtctcagaatagtgttaagtcattactgcaggctaggaaaccatgagaaatcactagcattatttcacttgattgagcgcaatggatggaagcatggtttaatcattaagaccaccctagcttcatgtctcctttcatttgggagacaattggaagcaaaatcatgtctgaacaacctgagcaaaggtgagtttatcggatgttcaagcaattttgatgatctcatcaaggaattctgcattctaggagatttgaaaatgactctttatctgctaaatacaatgttaaagaaaggcacactgcctaatgaagccagttacagttctgttatatataaactttgtacattgaaggagttcgatcaggcacttgattttcttgctgaaatgcagctggcaagtctaaaatcaagtgaaatctcctgtgatgcacttgtacatggcctttgtgccatgggaagaccttctgatgctagaaaggttttggaaatgctaaccaccttgggatctgcaccatcctatggcatgtttagagttgtttttgataactattgcagaagtagcaatctacagaaagctgcggcacttctgcatgacatgcaacaagcaggacaagtgcccaactttgagatgcattggtctgttataagcaatttaagcagtaccaatgagaaaactgaaggacatggagagtgcattttgccaaacctttttctttctgcaaattccccttaaaggtcataaggcgatatatggcttccagaaaatggtgaactgatgattgttctcaagttgaaccctagtggaactgataaaactcgtgaaaccaaggttatgcaactctggaactcaaacgttctactcgaggattgatggttcacataaatgtgggaacacgtaggaaaaactatgcatcttcgatttaggttgcaaaagagggagcttgaactcattacctgagccatcacaactttcttctctgcaacttggttacaggttatgcccttgctaaagggataatgcaaagagtacgcaaatgccaggtttttcctgtttgggcacaaatggaaacaaaaaagttggactcagcctatcgtgaagctacgaaggaagagcactgtcccattattctgttttttcggtaattaaagcatcatctccattcttggttgttcccatttttctgttatttactaagtagtttttctggctaatgttaaaaactggaagaagaccatgtttctagcatgaacatgccaacatggtgccatcaacaacttccctgttagctcacggtacaccatgctccagtctgcccccctggttatcactaattcaatcatctgtggtgccgattgtgttcccaagatgcactgaaatagagcagatcaaatgaggatgaagttactgtgtagagatttttgttcaccctttgtagcagcatccatggatttttatttgcacagaattactctcttttacccgtaacttgtgattgctgatatgatgcatagaagtctgaaatctgaattgatgccactgtattttttccatgtttacattatgttgattttctttctgctatttactttcaatgttttggagcagtacctgagcaactgaggcaaccctttcgatcttatgagaccaagatgttttctggtcccaaacccatgatggtatgccttagtttgcttgcagacaaatgcttttttttgacaacttcactcatcccttgttttgaatagatgacataattggagactctggccatttatctgtgttgtttccattaatgtgtcttctcataggtactctgttatggtcgctagatcggtgagggattggagagggatattgatgggcaggaacgtcggtcgggggcctctgcccacggccgagcaagaggagggtttctctcttctaattcttacctactttatttctcatccattgattacataaatagaccagctggctgtccttatctagctagagatccttatctcctaaaaactctcctaaaactactaactgataaccttcctagataatctcaaccaatctcctaaataatcttaactaatcttctaatattactagctgaatgcccgtgcgttgcaacgggaatatataataccagtatactacgataacttatatacaaaatatgtgttataccattatgagaaaatgtttcataatcaatttgtgattctggccatacataaattttgttatttataatctatctgtttcaccactgcattacaaccatcagtatcatgcagacttcgatatatgtcacgatttgtatggtctcattattggagagcatgtttcacacataccagaagaaattccctcgtacatcgttagtcatcggacacgtaccaccatacgcttttgcttaaacaaaaaggtaagtgtgtgtttgcaagactaatggtcaaacaccgtataaccataaagttagaatactatattaatatattaaataaattaatccaatagacatagattaacccaattaacacaggataaataaatatctaattataaaagtatgaaacatggtataatcaatgttgttactgcgtagtaaatattcatacgagactaacacaactggaacggttcaatttagaattaaaatggggaagttacgaatttccaaagtttctatgtatttgatataggattaattaggaaatcaattttattgttgttttcatgacaaaacagaggtattatgtgataaaaaataatattatagaattatagaaattggaatgaattcatttagatttaatatgaaatttccatgaattaaatgggcttttgcaattatttttaaactaaaaatcaatttccaaactcttttccctattttctttatttcctggactgcgtcccaaattccagaaacatcaggggccaagctataaatgtttttctagactcagtgagcatacagagtggacggcgggttaaacacaaataaagccaacatgggtcatgttggctagagggtggaaggctagacattctactcaatagatccaaggtttaatccttgagcaaccacggtttaat

SEQ ID NO: 215929 - DNA, 7737 bp, Zea Mays
cgcatccgcgccgcaacccgcagccgccctgcaggcaaccgcccgcatccgcggcagcgccgcggctgcttccatccatggcgccgcggcttccatcaatcgccagcgcgtcctccgtactcctgtcatccgaggaaagccttccatccatggcgccgttgctgcaattccccccgcgatccacgctacctccattgcccacacgatccgcgctccctccattgctaccgcgatgccccttcccaggaacccttccatccatggcgtcgttgctgcaggtgccccgcaatcaactccattgccgccacgatccccttccaccgacgacactcaccttccatcgacaaaactgatcttcctccattccaccgacggcactcacctctcagatcccgtgctcatcaccatcgtgcccctcgctcgccgcccccacctcaccaagagccttagccgtccctagagaagacacggaggtgcagtgccagtgctttcctcaagtgcacctcggattttcggtaccggccagattgggacgaattcaacattcatcggctccaccaaaacactgccactatgatgtgtatgcttgcgtcaggacaggagacccaaaagtacttcatagatgaatgtgacattttccacaagaacgagatacgaaatggccaaggactgctgacgatgatgacgacatggccaccatcgctgccctcaggctgacattctggctctccaacacagttgtcctcagggagataattgtacaaacttttggcatctcacatcaatttactccatccatgatgaatctgagcatgaatggtggtgccaaaaaacttgatgggaaatctatgacaatgctgtggagaaacagctacaatggcatgcaagccaagtttgctgcaaggcagatgccagatgattggcaggaaacaagtacacttttggctacattagagaagattgagtcttggatattttctcgcattgttgagacaatatggtggcaggcactaactcctcacatgcaaaaacgagtagaaggatcatcaactccaaaggctggtagagtgctatgtcctactttgggtgatcagcagtagggcaccttttctgttaacctgtggaaggctgcgtttcacgacgcattcaacagaatgtgccccctcagtgctggcggacatgagtgtggctgtttaccaatattagcaaaactggtgatggagcagtgtgtagcccgtttgaatgttgccatgtttaatgccatccttcgtgaatcatcaagtgagataccaacagactctatatctgacccaattgttgacccaaaagtcctaccaattccagttggtgatctaagctttgggtcaggcgcgcagctgaagaactctattggaaacgggtctagatggctgacagataatcttggcatagatcatgatgactttgaggacataggagatgttgaagacgaaagaagagttgcagctgaaacgaaatcgtttcaacttctcaatgagagatgaacaaggatgcagtcacaactgatgctatcggcagtatcagaacttgatggtgcttgtagactgttcatggtgcttgtagggatgatgtatgtctatggcttactgagctccaaccaactatggcaggagcgttagctaggacagcagtcagtctaacaattgtggacaaagttcagtctaccatacactgaagcgcacccttgttgctaaagctgcaggtgtgaacaactttgctcagcagaatggaggatcattgtcactagcagcaagacctcgagcccagttaaccatcagtttctttccttctttctttgggccgagagagcaaagaaggatgatgcactttccaacctgtgtagcacgttgggacaactcaagaaatggcagtggatatggacatagaaattgacaggcaaaacaaagcgctggttcctttcagcgacgacatcactgaactgaattttagactgaaaggcgtgaatcagtgtggacaccagttgctgggcaagtgatatggagccagaattcgggcagttcggagactatcgccttgattgcagaatttaagaacattgttgttttacatgtttttttgcagtgaatcaggccacacatgttgtattagtgagagaatgatgatttattttatattattatggatttcatagattattttagttttccctgaactgcaattgtttcaataacataggaggggactaccttcaatgacatttaggtgaatttttaaggttgctgaacaaggtcacaaaggatgggattgagaccactcgaggttccgagctcccgcaatcaccagtgaggactggggattcgctgatcagatgcggtgtgtggggccttgctcagcggcggggctgggaggtccgagcggaatagatgtcgatggcatggcggttgctccgcacaatccatttccggcatctgagcccaggtgtcaggcgagcatccaagattgtagaccaaggctttaccaataatgccccagagctgagtaccaacaaagggagtttgctgaggtgtagcagcatccgcttcggggagaagcggaactcaatttttgcttgcgctccagacaatttggagcagaaatctggacaaacgttcgaagctgatgcccattctgcgctaaaattgtgctctggtatcgggagtgtagttatagccaagtgttctcacatatttgagagaaatggggacacctttgatgggaactgcagtttgcaagatatcctcaagcctggtttatggctctcaccggagaccctccgccggttttggcgtgtctctgagctgaagcctaaggattttcttgacattttgaatggttttggactcagtgccgtaaaagtgagaaatgcaagatttctatggaatttgtacaggtggacatcgcggcagagcaaagagttccaacatctgccaaggtcaaatgagacaatggtatccatacttgcagatgctcatatgctcagtcaagcagaatcactactgctttcattgattgatcatatgactccagctgtttctagtgaactattcagtcagattatccaggtgtattcagaagcaggcaaccttgggaaatcagttgcactttatgattatgcaaggggcaagcatttgattccttcagcttcatgctatcaagtacttcttcattttctaaccagaaacagaaaggatgaattgattttgagagtatatctggacatgcttgaagttggatttggttcttgcaccgaaggaaatattcttgattctgttgtcatggctttaatcaggaaaggtaaacttttggaagctcttggtattcttcggcaattaaagagtttgggtcttaaattaagcaagggagccttgtcaaatatagttgaagaatttaacaagaaaaaggatattggggatctgatgaatttcttggaagattggaggtgtatacctgagttgcgtctttgcaacagaatccttgcgtctttgtgcacaaatcttggtacttgtcaggcatggttggtcttccaaagtttggaggccttagggtttgctccagatgctacgacttttggaattttcatttttcacagctgtagagaaatgaaactaaaatctgcacttgtatatttatcagagtgctttgctaggcatgttaaacctggagtgtgtgcctataatgctattttaggtggtgttttcagggaggggctatatagacatgcaaagtatatatttgaagacatgattgaaagagaagtaacacccaatctttcaacatataagataattcttgcagggtattgcaggtataggcggtttgatgatattgaacaagtcttgaggcacatgaaaaccaatggtgtaaatgttcttctctctggaaactgtgtgctctccaaggccttatcattcttggggctagatcacctaggggtgaaaatcaagagagataatgtcactggtttcccaaaagctgagttttttgattcagttggcaatggattgtatttggacactgattccaaaatgtttgaggtttcattgtcacaagttttggatagcgcacttctcccagatattaactcagagctaatcagggcatctcagcaaggcgatgttgcaagtgctcttcttgtgaaagacaaagcttttcaatggggatatgacatttcaccagatagctgctctgagctattcaaggccttatgtgtgagccctgcttatgttatagatgtcattgaccttatggaggagatgccagatatactttacaaacttgatgctcaaaatctagatttggttgcccaaacattgagtaggaatggaatgtctgctcatgcaaaactggttttagaaaaaatgttgagagaagacttgtcaatcagtcacaatacatatacttatttaatgataggtttatgcgaagaaaggaacatagcagggttttgggaatgttggaatcttgcaacaaagtgcagatggtcacctgatagcaaggatatgatgggcctcatcagttacttgtgcaaatggggagtgattgaggaagccctgaaacttatgaactctttatttgactgctaccatgatctgttttttagtgcatattgtgcacttctcaaagagttgtgcaggacaggtcataccagcattggatgcgcaatgttggaggctctcaaagaaaagggtgtggctgtggatcgatcattattcttttatgtgatggagggcttcctaaaggagcaaagaactgctgaatcaattggaatgcatgacatgtggcttagcaaaagcaaagaacttgatgtttttacttaccgatctgtgttgccttcattaccatggctggacacagatcgagccaagaacttggtagaatctatgctgaccgtgaaacttactgaattctcatatcgcggttgcattgtgaatgaattaatgcaaacaaggaatataaaatgggccattccagtcttgcaagaatcagctcctgggaagctcagtgccactttgttaaattccttacttcaagcctatggttggctaaaaaattggagaaagttagatgcagttctttgcaagatgctaaagatgcatgccaccctttctatatctagctaccgctttcttgtgtgcagaatgtgtgagcaaagtcgtttttctagcgcttcaagccttagagcacttttccaacatactgacaagtcaagagaactgattgcatgcaacattctaatattttatctttttcaaagaagaaacagctcacagattcatgatttattgaaggacattgaaggtaatggtatttctcttgacaaaaccacatatgatttccttgtctatggatttcacaaatctggggatatcaatgattcagttaatgcgcttgatgcctgcattgctcagggaataaaaccaagcaaccgcagtctcagaatagtgttaagtcattactgcaggctaggaaaccatgagaaatcactagcattatttcacttgattgagcgcaatggatggaagcatggtttaatcattaagaccaccctagcttcatgtctcctttcatttgggagacaattggaagcaaaatcatgtctgaacaacctgagcaaaggtgagtttatcggatgttcaagcaattttgatgatctcatcaaggaattctgcattctaggagatttgaaaatgactctttatctgctaaatacaatgttaaagaaaggcacactgcctaatgaagccagttacagttctgttatatataaactttgtacattgaaggagttcgatcaggcacttgattttcttgctgaaatgcagctggcaagtctaaaatcaagtgaaatctcctgtgatgcacttgtacatggcctttgtgccatgggaagaccttctgatgctagaaaggttttggaaatgctaaccaccttgggatctgcaccatcctatggcatgtttagagttgtttttgataactattgcagaagtagcaatctacagaaagctgcggcacttctgcatgacatgcaacaagcaggacaagtgcccaactttgagatgcattggtctgttataagcaatttaagcagtaccaatgagaaaactgaaggacatggagagtgcattttgccaaacctttttctttctgcaaattccccttaaaggtcataaggcgatatatggcttccagaaaatggtgaactgatgattgttctcaagttgaaccctagtggaactgataaaactcgtgaaaccaaggttatgcaactctggaactcaaacgttctactcgaggattgatggttcacataaatgtgggaacacgtaggaaaaactatgcatcttcgatttaggttgcaaaagagggagcttgaactcattacctgagccatcacaactttcttctctgcaacttggttacaggttatgcccttgctaaagggataatgcaaagatccctacaacaccaattagaattggggaagacgaacctcctcctcagtctcctagcttgttcgttgctctcacctgggatctgccctgggatcacctttgcaacatcagttgaactaaagatttggactggacatggttcagttgtttttgaacgagtacgcaaatgccaggtttttcctgtttgggcacaaatggaaacaaaaaagttggactcagcctatcgtgaagctacgaaggaagagcactgtcccattattctgttttttcgaccatgtttctagcatgaacatgccaacatggtgccatcaacaacttccctgttagctcacggtacaccatgctccagtctgcccccctggttatcactaattcaatcatctgtggtgccgattgtgttcccaagatgcactgaaatagagcagatcaaatgaggatgaagttactgtgtagagatttttgttcaccctttgtagcagcatccatggatttttatttgcacagaattactctcttttacccgtaacttgtgattgctgatatgatgcatagaagtctgaaatctgaattgatgccactgtattttttccatgtttacattatgttgattttctttctgctatttactttcaatgttttggagcagtacctgagcaactgaggcaaccctttcgatcttatgagaccaagatgttttctggtcccaaacccatgatgaatatattattgttgcactctcaaatggtgggttgctaacttgctatgtcatgggagtttgggtgaaggccagaaggatgtgatagacgtcgattcgatgcaggtccatgggatgctctgtacaggggtgggaatatcctagcgttcgccttggtttcggtcttctctggcagcaagtgtgctcccagttttcaagctgtcaaagctgtccaactcagttccttggggaaggcctcgattcgctcatctcctcggacccggaggactacaacaatatgaagcagtatgagaagctgaccgtcgcgtcaatttactttcttgtgatgagtgttgagcatcatcatatgattcatacaattgatatgcaactagaacccagattttaatgtgtacggttatgatttatcttttctcgttaaataatgtgagatattgaggtgtatgataaattatatgttcatctctatgtaatcattatacactaacattttaataacgagagcatagaacgataaatagtgcttct

SEQ ID NO: 215930 - DNA, 7581 bp, Zea Mays
cgcatccgcgccgcaacccgcagccgccctgcaggcaaccgcccgcatccgcggcagcgccgcggctgcttccatccatggcgccgcggcttccatcaatcgccagcgcgtcctccgtactcctgtcatccgaggaaagccttccatccatggcgccgttgctgcaattccccccgcgatccacgctacctccattgcccacacgatccgcgctccctccattgctaccgcgatgccccttcccaggaacccttccatccatggcgtcgttgctgcaggtgccccgcaatcaactccattgccgccacgatccccttccaccgacgacactcaccttccatcgacaaaactgatcttcctccattccaccgacggcactcacctctcagatcccgtgctcatcaccatcgtgcccctcgctcgccgcccccacctcaccaagagccttagccgtccctagagaagacacggaggtgcagtgccagtgctttcctcaagtgcacctcggattttcggtaccggccagattgggacgaattcaacattcatcggctccaccaaaacactgccactatgatgtgtatgcttgcgtcaggacaggagacccaaaagtacttcatagatgaatgtgacattttccacaagaacgagatacgaaatggccaaggactgctgacgatgatgacgacatggccaccatcgctgccctcaggctgacattctggctctccaacacagttgtcctcagggagataattgtacaaacttttggcatctcacatcaatttactccatccatgatgaatctgagcatgaatggtggtgccaaaaaacttgatgggaaatctatgacaatgctgtggagaaacagctacaatggcatgcaagccaagtttgctgcaaggcagatgccagatgattggcaggaaacaagtacacttttggctacattagagaagattgagtcttggatattttctcgcattgttgagacaatatggtggcaggtaaatgtctgtcttaggcactaactcctcacatgcaaaaacgagtagaaggatcatcaactccaaaggctggtagagtgctatgtcctactttgggtgatcagcagtagggcaccttttctgttaacctgtggaaggctgcgtttcacgacgcattcaacagaatgtgccccctcagtgctggcggacatgagtgtggctgtttaccaatattagcaaaactggtgatggagcagtgtgtagcccgtttgaatgttgccatgtttaatgccatccttcgtgaatcatcaagtgagataccaacagactctatatctgacccaattgttgacccaaaagtcctaccaattccagttggtgatctaagctttgggtcaggcgcgcagctgaagaactctattggaaacgggtctagatggctgacagataatcttggcatagatcatgatgactttgaggacataggagatgttgaagacgaaagaagagttgcagctgaaacgaaatcgtttcaacttctcaatgagctaagtgatcatctattttttagtttttcataattttcctttcatggcctccttacatgtttgatttcctatgatccatgagctgccaatcatgataacgcggtttcactatgcaggagatgaacaaggatgcagtcacaactgatgctatcggcagtatcagaacttgatggtgcttgtagactgttcatggtgcttgtagggatgatgtatgtctatggcttactgagctccaaccaactatggcaggagcgttagctaggacagcagtcagtctaacaattgtggacaaagttcagtctaccatacactgaagcgcacccttgttgctaaaggtgtgaacaactttgctcagcagaatggaggatcattgtcactagcagcaagacctcgagcccaggcagttaaccatcagtttctttccttctttctttgggccgagagagcaaagaaggatgatgcactttccaacctgtgtagcacgttgggacaactcaagaaatggcagtggatatggacatagaaattgacaggcaaaacaaagcgctggttcctttcagcgacgacatcactgaactgaattttagactgaaaggcgtgaatcagtgtggacaccagttgctgggcaagtgatatggagccagaattcgggcagttcggagactatcgccttgattgcagaatttaagaacattgttgttttacatgtttttttgcagtgaatcaggccacacatgttgtattagtgagagaatgatgatttattttatattattatggatttcatagattattttagttttccctgaactgcaattgtttcaataacataggaggggactaccttcaatgacatttaggtgaatttttaaggttgctgaacaaggtcacaaaggatgggattgagaccactcgaggttccgagctcccgcaatcaccagtgagatgcggtgtgtggggccttgctcagcggcggggctgggaggtccgagcggaatagatgtcgatggcatggcggttgctccgcacaatccatttccggcatctgagcccaggtgtcaggcgagcatccaagattgtagaccaaggctttaccaataatgccccagagctgagtaccaacaaagggagtttgctgaggtgtagcagcatccgcttcggggagaagcggaactcaatttttgcttgcgctccagacaatttggagcagaaatctggacaaacgttcgaagctgatgcccattctgcgctaaaattgtgctctggtatcgggagtgtagttatagccaagtgttctcacatatttgagagaaatggggacacctttgatgggaactgcagtttgcaagatatcctcaagcctggtttatggctctcaccggagaccctccgccggttttggcgtgtctctgagctgaagcctaaggattttcttgacattttgaatggttttggactcagtgccgtaaaagtgagaaatgcaagatttctatggaatttgtacaggtggacatcgcggcagagcaaagagttccaacatctgccaaggtcaaatgagacaatggtatccatacttgcagatgctcatatgctcagtcaagcagaatcactactgctttcattgattgatcatatgactccagctgtttctagtgaactattcagtcagattatccaggtgtattcagaagcaggcaaccttgggaaatcagttgcactttatgattatgcaaggggcaagcatttgattccttcagcttcatgctatcaagtacttcttcattttctaaccagaaacagaaaggatgaattgattttgagagtatatctggacatgcttgaagttggatttggttcttgcaccgaaggaaatattcttgattctgttgtcatggctttaatcaggaaaggtaaacttttggaagctcttggtattcttcggcaattaaagagtttgggtcttaaattaagcaagggagccttgtcaaatatagttgaagaatttaacaagaaaaaggatattggggatctgatgaatttcttggaagattggaggtgtatacctgagttgcgtctttgcaacagaatccttgcgtctttgtgcacaaatcttggtacttgtcaggcatggttggtcttccaaagtttggaggccttagggtttgctccagatgctacgacttttggaattttcatttttcacagctgtagagaaatgaaactaaaatctgcacttgtatatttatcagagtgctttgctaggcatgttaaacctggagtgtgtgcctataatgctattttaggtggtgttttcagggaggggctatatagacatgcaaagtatatatttgaagacatgattgaaagagaagtaacacccaatctttcaacatataagataattcttgcagggtattgcaggtataggcggtttgatgatattgaacaagtcttgaggcacatgaaaaccaatggtgtaaatgttcttctctctggaaactgtgtgctctccaaggccttatcattcttggggctagatcacctaggggtgaaaatcaagagagataatgtcactggtttcccaaaagctgagttttttgattcagttggcaatggattgtatttggacactgattccaaaatgtttgaggtttcattgtcacaagttttggatagcgcacttctcccagatattaactcagagctaatcagggcatctcagcaaggcgatgttgcaagtgctcttcttgtgaaagacaaagcttttcaatggggatatgacatttcaccagatagctgctctgagctattcaaggccttatgtgtgagccctgcttatgttatagatgtcattgaccttatggaggagatgccagatatactttacaaacttgatgctcaaaatctagatttggttgcccaaacattgagtaggaatggaatgtctgctcatgcaaaactggttttagaaaaaatgttgagagaagacttgtcaatcagtcacaatacatatacttatttaatgataggtttatgcgaagaaaggaacatagcagggttttgggaatgttggaatcttgcaacaaagtgcagatggtcacctgatagcaaggatatgatgggcctcatcagttacttgtgcaaatggggagtgattgaggaagccctgaaacttatgaactctttatttgactgctaccatgatctgttttttagtgcatattgtgcacttctcaaagagttgtgcaggacaggtcataccagcattggatgcgcaatgttggaggctctcaaagaaaagggtgtggctgtggatcgatcattattcttttatgtgatggagggcttcctaaaggagcaaagaactgctgaatcaattggaatgcatgacatgtggcttagcaaaagcaaagaacttgatgtttttacttaccgatctgtgttgccttcattaccatggctggacacagatcgagccaagaacttggtagaatctatgctgaccgtgaaacttactgaattctcatatcgcggttgcattgtgaatgaattaatgcaaacaaggaatataaaatgggccattccagtcttgcaagaatcagctcctgggaagctcagtgccactttgttaaattccttacttcaagcctatggttggctaaaaaattggagaaagttagatgcagttctttgcaagatgctaaagatgcatgccaccctttctatatctagctaccgctttcttgtgtgcagaatgtgtgagcaaagtcgtttttctagcgcttcaagccttagagcacttttccaacatactgacaagtcaagagaactgattgcatgcaacattctaatattttatctttttcaaagaagaaacagctcacagattcatgatttattgaaggacattgaaggtaatggtatttctcttgacaaaaccacatatgatttccttgtctatggatttcacaaatctggggatatcaatgattcagttaatgcgcttgatgcctgcattgctcagggaataaaaccaagcaaccgcagtctcagaatagtgttaagtcattactgcaggctaggaaaccatgagaaatcactagcattatttcacttgattgagcgcaatggatggaagcatggtttaatcattaagaccaccctagcttcatgtctcctttcatttgggagacaattggaagcaaaatcatgtctgaacaacctgagcaaaggtgagtttatcggatgttcaagcaattttgatgatctcatcaaggaattctgcattctaggagatttgaaaatgactctttatctgctaaatacaatgttaaagaaaggcacactgcctaatgaagccagttacagttctgttatatataaactttgtacattgaaggagttcgatcaggcacttgattttcttgctgaaatgcagctggcaagtctaaaatcaagtgaaatctcctgtgatgcacttgtacatggcctttgtgccatgggaagaccttctgatgctagaaaggttttggaaatgctaaccaccttgggatctgcaccatcctatggcatgtttagagttgtttttgataactattgcagaagtagcaatctacagaaagctgcggcacttctgcatgacatgcaacaagcaggacaagtgcccaactttgagatgcattggtctgttataagcaatttaagcagtaccaatgagaaaactgaaggacatggagagtgcattttgccaaacctttttctttctgcaaattccccttaaaggtcataaggcgatatatggcttccagaaaatggtgaactgatgattgttctcaagttgaaccctagtggaactgataaaactcgtgaaaccaaggttatgcaactctggaactcaaacgttctactcgaggattgatggttcacataaatgtgggaacacgtaggaaaaactatgcatcttcgatttaggttgcaaaagagggagcttgaactcattacctgagccatcacaactttcttctctgcaacttggttacaggttatgcccttgctaaagggataatgcaaagatccctacaacaccaattagaattggggaagacgaacctcctcctcagtctcctagcttgttcgttgctctcacctgggatctgccctgggatcacctttgcaacatcagttgaactaaagatttggactggacatggttcagttgtttttgaacggtgatctgtgatatgtaaactttgtgttgtttaaaacatatatcagttgtttttgaactgcgacctgagctatacaataagcctgacttttttacagagtacgcaaatgccaggtttttcctgtttgggcacaaatggaaacaaaaaagttggactcagcctatcgtgaagctacgaaggaagagcactgtcccattattctgttttttcggacgtggtaccatcctcatcatgtagcctaggatgagttatcactgttaaatatttcaagtggttaaatcatgcatctgcagaatatattattgttgcactctcaaatggtgggttgctaacttgctatgtcatgggagtttgggtgaaggccagaaggatgtgatagacgtcgattcgatgcaggtccatgggatgctctgtacaggggtgggaatatcctagcgttcgccttggtttcggtcttctctggcagcaagtgtgctcccagttttcaagctgtcaaagctgtccaactcagttccttggggaaggcctcgattcgctcatctcctcggacccggaggactacaacaatatgaagcagtatgagaagctgaccgtcgcgtcaatttactttcttgtgatgagtgttgagcatcatcatatgattcatacaattgatatgcaactagaacccagattttaatgtgtacggttatgatttatcttttctcgttaaataatgtgagatattgaggtgtatgataaattatatgttcatctctatgtaatcattatacactaacattttaataacgagagcatagaacgataaatagtgcttct

SEQ ID NO: 215931 - DNA, 7490 bp, Zea Mays
cgcatccgcgccgcaacccgcagccgccctgcaggcaaccgcccgcatccgcggcagcgccgcggctgcttccatccatggcgccgcggcttccatcaatcgccagcgcgtcctccgtactcctgtcatccgaggaaagccttccatccatggcgccgttgctgcaattccccccgcgatccacgctacctccattgcccacacgatccgcgctccctccattgctaccgcgatgccccttcccaggaacccttccatccatggcgtcgttgctgcaggtgccccgcaatcaactccattgccgccacgatccccttccaccgacgacactcaccttccatcgacaaaactgatcttcctccattccaccgacggcactcacctctcagatcccgtgctcatcaccatcgtgcccctcgctcgccgcccccacctcaccaagagccttagccgtccctagagaagacacggaggtgcagtgccagtgctttcctcaagtgcacctcggattttcggtaccggccagattgggacgaattcaacattcatcggctccaccaaaacactgccactatgatgtgtatgcttgcgtcaggacaggagacccaaaagtacttcatagatgaatgtgacattttccacaagaacgagatacgaaatggccaaggactgctgacgatgatgacgacatggccaccatcgctgccctcaggctgacattctggctctccaacacagttgtcctcagggagataattgtacaaacttttggcatctcacatcaatttactccatccatgatgaatctgagcatgaatggtggtgccaaaaaacttgatgggaaatctatgacaatgctgtggagaaacagctacaatggcatgcaagccaagtttgctgcaaggcagatgccagatgattggcaggaaacaagtacacttttggctacattagagaagattgagtcttggatattttctcgcattgttgagacaatatggtggcaggcactaactcctcacatgcaaaaacgagtagaaggatcatcaactccaaaggctggtagagtgctatgtcctactttgggtgatcagcagtagggcaccttttctgttaacctgtggaaggctgcgtttcacgacgcattcaacagaatgtgccccctcagtgctggcggacatgagtgtggctgtttaccaatattagcaaaactggtgatggagcagtgtgtagcccgtttgaatgttgccatgtttaatgccatccttcgtgaatcatcaagtgagataccaacagactctatatctgacccaattgttgacccaaaagtcctaccaattccagttggtgatctaagctttgggtcaggcgcgcagctgaagaactctattggaaacgggtctagatggctgacagataatcttggcatagatcatgatgactttgaggacataggagatgttgaagacgaaagaagagttgcagctgaaacgaaatcgtttcaacttctcaatgagctaagtgatcatctattttttagtttttcataattttcctttcatggcctccttacatgtttgatttcctatgatccatgagctgccaatcatgataacgcggtttcactatgcaggagatgaacaaggatgcagtcacaactgatgctatcggcagtatcagaacttgatggtgcttgtagactgttcatggtgcttgtagggatgatgtatgtctatggcttactgagctccaaccaactatggcaggagcgttagctaggacagcagtcagtctaacaattgtggacaaagttcagtctaccatacactgaagcgcacccttgttgctaaagctgcaggtgtgaacaactttgctcagcagaatggaggatcattgtcactagcagcaagacctcgagcccagttaaccatcagtttctttccttctttctttgggccgagagagcaaagaaggatgatgcactttccaacctgtgtagcacgttgggacaactcaagaaatggcagtggatatggacatagaaattgacaggcaaaacaaagcgctggttcctttcagcgacgacatcactgaactgaattttagactgaaaggcgtgaatcagtgtggacaccagttgctgggcaagtgatatggagccagaattcgggcagttcggagactatcgccttgattgcagaatttaagaacattgttgttttacatgtttttttgcagtgaatcaggccacacatgttgtattagtgagagaatgatgatttattttatattattatggatttcatagattattttagttttccctgaactgcaattgtttcaataacataggaggggactaccttcaatgacatttaggtgaatttttaaggttgctgaacaaggtcacaaaggatgggattgagaccactcgaggttccgagctcccgcaatcaccagtgaggactggggattcgctgatcagatgcggtgtgtggggccttgctcagcggcggggctgggaggtccgagcggaatagatgtcgatggcatggcggttgctccgcacaatccatttccggcatctgagcccaggtgtcaggcgagcatccaagattgtagaccaaggctttaccaataatgccccagagctgagtaccaacaaagggagtttgctgaggtgtagcagcatccgcttcggggagaagcggaactcaatttttgcttgcgctccagacaatttggagcagaaatctggacaaacgttcgaagctgatgcccattctgcgctaaaattgtgctctggtatcgggagtgtagttatagccaagtgttctcacatatttgagagaaatggggacacctttgatgggaactgcagtttgcaagatatcctcaagcctggtttatggctctcaccggagaccctccgccggttttggcgtgtctctgagctgaagcctaaggattttcttgacattttgaatggttttggactcagtgccgtaaaagtgagaaatgcaagatttctatggaatttgtacaggtggacatcgcggcagagcaaagagttccaacatctgccaaggtcaaatgagacaatggtatccatacttgcagatgctcatatgctcagtcaagcagaatcactactgctttcattgattgatcatatgactccagctgtttctagtgaactattcagtcagattatccaggtgtattcagaagcaggcaaccttgggaaatcagttgcactttatgattatgcaaggggcaagcatttgattccttcagcttcatgctatcaagtacttcttcattttctaaccagaaacagaaaggatgaattgattttgagagtatatctggacatgcttgaagttggatttggttcttgcaccgaaggaaatattcttgattctgttgtcatggctttaatcaggaaaggtaaacttttggaagctcttggtattcttcggcaattaaagagtttgggtcttaaattaagcaagggagccttgtcaaatatagttgaagaatttaacaagaaaaaggatattggggatctgatgaatttcttggaagattggaggtgtatacctgagttgcgtctttgcaacagaatccttgcgtctttgtgcacaaatcttggtacttgtcaggcatggttggtcttccaaagtttggaggccttagggtttgctccagatgctacgacttttggaattttcatttttcacagctgtagagaaatgaaactaaaatctgcacttgtatatttatcagagtgctttgctaggcatgttaaacctggagtgtgtgcctataatgctattttaggtggtgttttcagggaggggctatatagacatgcaaagtatatatttgaagacatgattgaaagagaagtaacacccaatctttcaacatataagataattcttgcagggtattgcaggtataggcggtttgatgatattgaacaagtcttgaggcacatgaaaaccaatggtgtaaatgttcttctctctggaaactgtgtgctctccaaggccttatcattcttggggctagatcacctaggggtgaaaatcaagagagataatgtcactggtttcccaaaagctgagttttttgattcagttggcaatggattgtatttggacactgattccaaaatgtttgaggtttcattgtcacaagttttggatagcgcacttctcccagatattaactcagagctaatcagggcatctcagcaaggcgatgttgcaagtgctcttcttgtgaaagacaaagcttttcaatggggatatgacatttcaccagatagctgctctgagctattcaaggccttatgtgtgagccctgcttatgttatagatgtcattgaccttatggaggagatgccagatatactttacaaacttgatgctcaaaatctagatttggttgcccaaacattgagtaggaatggaatgtctgctcatgcaaaactggttttagaaaaaatgttgagagaagacttgtcaatcagtcacaatacatatacttatttaatgataggtttatgcgaagaaaggaacatagcagggttttgggaatgttggaatcttgcaacaaagtgcagatggtcacctgatagcaaggatatgatgggcctcatcagttacttgtgcaaatggggagtgattgaggaagccctgaaacttatgaactctttatttgactgctaccatgatctgttttttagtgcatattgtgcacttctcaaagagttgtgcaggacaggtcataccagcattggatgcgcaatgttggaggctctcaaagaaaagggtgtggctgtggatcgatcattattcttttatgtgatggagggcttcctaaaggagcaaagaactgctgaatcaattggaatgcatgacatgtggcttagcaaaagcaaagaacttgatgtttttacttaccgatctgtgttgccttcattaccatggctggacacagatcgagccaagaacttggtagaatctatgctgaccgtgaaacttactgaattctcatatcgcggttgcattgtgaatgaattaatgcaaacaaggaatataaaatgggccattccagtcttgcaagaatcagctcctgggaagctcagtgccactttgttaaattccttacttcaagcctatggttggctaaaaaattggagaaagttagatgcagttctttgcaagatgctaaagatgcatgccaccctttctatatctagctaccgctttcttgtgtgcagaatgtgtgagcaaagtcgtttttctagcgcttcaagccttagagcacttttccaacatactgacaagtcaagagaactgattgcatgcaacattctaatattttatctttttcaaagaagaaacagctcacagattcatgatttattgaaggacattgaaggtaatggtatttctcttgacaaaaccacatatgatttccttgtctatggatttcacaaatctggggatatcaatgattcagttaatgcgcttgatgcctgcattgctcagggaataaaaccaagcaaccgcagtctcagaatagtgttaagtcattactgcaggctaggaaaccatgagaaatcactagcattatttcacttgattgagcgcaatggatggaagcatggtttaatcattaagaccaccctagcttcatgtctcctttcatttgggagacaattggaagcaaaatcatgtctgaacaacctgagcaaaggtgagtttatcggatgttcaagcaattttgatgatctcatcaaggaattctgcattctaggagatttgaaaatgactctttatctgctaaatacaatgttaaagaaaggcacactgcctaatgaagccagttacagttctgttatatataaactttgtacattgaaggagttcgatcaggcacttgattttcttgctgaaatgcagctggcaagtctaaaatcaagtgaaatctcctgtgatgcacttgtacatggcctttgtgccatgggaagaccttctgatgctagaaaggttttggaaatgctaaccaccttgggatctgcaccatcctatggcatgtttagagttgtttttgataactattgcagaagtagcaatctacagaaagctgcggcacttctgcatgacatgcaacaagcaggacaagtgcccaactttgagatgcattggtctgttataagcaatttaagcagtaccaatgagaaaactgaaggacatggagagtgcattttgccaaacctttttctttctgcaaattccccttaaaggtcataaggcgatatatggcttccagaaaatggtgaactgatgattgttctcaagttgaaccctagtggaactgataaaactcgtgaaaccaaggttatgcaactctggaactcaaacgttctactcgaggattgatggttcacataaatgtgggaacacgtaggaaaaactatgcatcttcgatttaggttgcaaaagagggagcttgaactcattacctgagccatcacaactttcttctctgcaacttggttacaggttatgcccttgctaaagggataatgcaaagatccctacaacaccaattagaattggggaagacgaacctcctcctcagtctcctagcttgttcgttgctctcacctgggatctgccctgggatcacctttgcaacatcagttgaactaaagatttggactggacatggttcagttgtttttgaacgagtacgcaaatgccaggtttttcctgtttgggcacaaatggaaacaaaaaagttggactcagcctatcgtgaagctacgaaggaagagcactgtcccattattctgttttttcggacgtggtaccatcctcatcatgtagcctaggatgagttatcactgttaaatatttcaagtggttaaatcatgcatctgcagaatatattattgttgcactctcaaatggtgggttgctaacttgctatgtcatgggagtttgggtgaaggccagaaggatgtgatagacgtcgattcgatgcaggtccatgggatgctctgtacaggggtgggaatatcctagcgttcgccttggtttcggtcttctctggcagcaagtgtgctcccagttttcaagctgtcaaagctgtccaactcagttccttggggaaggcctcgattcgctcatctcctcggacccggaggactacaacaatatgaagcagtatgagaagctgaccgtcgcgtcaatttactttcttgtgatgagtgttgagcatcatcatatgattcatacaattgatatgcaactagaacccagattttaatgtgtacggttatgatttatcttttctcgttaaataatgtgagatattgaggtgtatgataaattatatgttcatctctatgtaatcattatacactaacattttaataacgagagcatagaacgataaatagtgcttct

SEQ ID NO: 215932 - DNA, 1090 bp, Zea Mays
gtaaatgtctgtcttaggcactaactcctcacatgcaaaaacgagtagaaggatcatcaactccaaaggctggtagagtgctatgtcctactttgggtgatcagcagtagggcaccttttctgttaacctgtggaaggctgcgtttcacgacgcattcaacagaatgtgccccctcagtgctggcggacatgagtgtggctgtttaccaatattagcaaaactggtgatggagcagtgtgtagcccgtttgaatgttgccatgtttaatgccatccttcgtgaatcatcaagtgagataccaacagactctatatctgacccaattgttgacccaaaagtcctaccaattccagttggtgatctaagctttgggtcaggcgcgcagctgaagaactctattggaaacgggtctagatggctgacagataatcttggcatagatcatgatgactttgaggacataggagatgttgaagacgaaagaagagttgcagctgaaacgaaatcgtttcaacttctcaatgagctaagtgatcatctattttttagtttttcataattttcctttcatggcctccttacatgtttgatttcctatgatccatgagctgccaatcatgataacgcggtttcactatgcaggagatgaacaaggatgcagtcacaactgatgctatcggcagtatcagaacttgatggtgcttgtagactgttcatggtgcttgtagggatgatgtatgtctatggcttactgagctccaaccaactatggcaggagcgttagctaggacagcagtcagtctaacaattgtggacaaagttcagtctaccatacactgaagcgcacccttgttgctaaaggtgtgaacaactttgctcagcagaatggaggatcattgtcactagcagcaagacctcgagcccaggcagttaaccatcagtttctttccttctttctttgggccgagagagcaaagaaggatgatgcactttccaacctgtgtagcacgttgggacaactcaagaaatggcagtggatatggacatagaaattgacagtttgatggaggtattttatctcgcttctag

SEQ ID NO: 215933 - DNA, 1548 bp, Zea Mays
gtaaatgtctgtcttaggcactaactcctcacatgcaaaaacgagtagaaggatcatcaactccaaaggctggtagagtgctatgtcctactttgggtgatcagcagtagggcaccttttctgttaacctgtggaaggctgcgtttcacgacgcattcaacagaatgtgccccctcagtgctggcggacatgagtgtggctgtttaccaatattagcaaaactggtgatggagcagtgtgtagcccgtttgaatgttgccatgtttaatgccatccttcgtgaatcatcaagtgagataccaacagactctatatctgacccaattgttgacccaaaagtcctaccaattccagttggtgatctaagctttgggtcaggcgcgcagctgaagaactctattggaaacgggtctagatggctgacagataatcttggcatagatcatgatgactttgaggacataggagatgttgaagacgaaagaagagttgcagctgaaacgaaatcgtttcaacttctcaatgagctaagtgatcatctattttttagtttttcataattttcctttcatggcctccttacatgtttgatttcctatgatccatgagctgccaatcatgataacgcggtttcactatgcaggagatgaacaaggatgcagtcacaactgatgctatcggcagtatcagaacttgatggtgcttgtagactgttcatggtgcttgtagggatgatgtatgtctatggcttactgagctccaaccaactatggcaggagcgttagctaggacagcagtcagtctaacaattgtggacaaagttcagtctaccatacactgaagcgcacccttgttgctaaagctgcaggtgtgaacaactttgctcagcagaatggaggatcattgtcactagcagcaagacctcgagcccagcacgttgggacaactcaagaaatggcagtggatatggacatagaaattgacaggcaaaacaaagcgctggttcctttcagcgacgacatcactgaactgaattttagactgaaaggcgtgaatcagtgtggacaccagttgctgggcaagtgatatggagccagaattcgggcagttcggagactatcgccttgattgcagaatttaagaacattgttgttttacatgtttttttgcagtgaatcaggccacacatgttgtattagtgagagaatgatgatttattttatattattatggatttcatagattattttagttttccctgaactgcaattgtttcaataacataggaggggactaccttcaatgacatttaggtgaatttttaaggtatgtccattattccattatagagcacaaagcctacttcttacaactcactgtatgttttataattgtatcaaaagcactgaacaaacatagttagctatcacgttcactgttgtctaaatagattgaaataatgtggtgaagccgtcatggactcttaagtagcttagccactgcaaaggatacaattaattataaaacaccaatgaatcaataaaaaaa

SEQ ID NO: 215934 - DNA, 1658 bp, Zea Mays
gtgccctggagcccaatggctagtagcacactgctctgctctctatcatcgtcgccgccagaagatatgcttccaggccctgtccccccacctccacctctgcttttggtttttacaggatcaccagggccgcttgtccagctcatccttctcttgctgcagttctgagtctggaatgcggtctgctacatcagcagctgttgcctcagctgtgtcgtctgtggtacattctgcagaagggccagtgaaggggtctgaactggtagcatccgtgcctatctctgctgaaatgccaaagggcaggatggacacactggtgccatcagcgccgtatcttccagatgtggaacgtttgatattggggttgctcttgctacctgcagtgccaatgaagcctgggagcggggattgtgcaatgtgcagagaatttctacctactgaagtgctcctcatactgccagtgtgctcgcacatgtttcatcagtcatgcatcatcacttggctatgccgcaccacaccaccatgctgcccgttttgccgtgcctctatcaccattcctggctgtaacaagactaaagttgatccatccttctgctcagttgaatacgacatcgagtctcagatgctaatgccaatcccacctggcgaggtagtagcagaggctgtcggaggatctcatgggtggctgcgctcttccctggacagattatctggcagctggagaatatgctccagcaatcgtgccactccagcggttgtgccagtgtcctcacggcgtaccactggaagttggagccacggcaatgactcagattgctctaaggtacagaagccgctgccagttccagatggtaaggaggtgccagaggaagtcaggaggtctatcgggtggctgggatctttggccacgctttctggcagctggagtgggtgctccagcagctgttcttctgagatggggttgatggtgactttgaggcatgtcaaagaaaccctgacatcaagtggacacagcgaaactgataaatggtctatgaggtgggacctcgaggctgctacgccgacacccgagaggccatcgttatatggctatgccagatggttcttcagaagctcaggttgaactgtcgcttaacattccctagctaaaagaaggaagtgaatacaaattgtacatcagaaaactggagtagcattgattctttgcattggagatacaatacagatggatgcagtcatgcaccagcgttttgtatagtacaaatagatcaggttttaccttttagatcattggctgtccttggtccttctgtccaagtcaaactctgagcaagatagcacgaaaagtgttggataagagtctccctgccattcttagcattttctattgaagtaaaagattaatcatggtagatatatatcatattaaatgatagttttgaaaaagcttgattttgcttctactgtgatatagcattatgctatatgtgcttgaactgtaatctgtgctgctacaatggagctgtacgatgatactgtctggaaatgttcagcttgcagctgtttggttgtaaagaatacggttgcaaccaattggcctgtgatatatccacatgaggttctcgcgatcttattttcattggttgcaaagaaactac

SEQ ID NO: 215935 - DNA, 1924 bp, Zea Mays
atttcagtttggaactgaactgggaatgacgtggccgaggacaaaagcaaattgacaccttctccgttcccgacgactcccgtgagcgtggagaggcgactaggcgaggccatggcctccggcatcggctccggccagcagcaacccccagttagattggatgccctagcagcgccggcggcagatgctgacccgggagccgtcggcgacaagctcgtcttcgaagcgccgcctcagcccgtgagggaggactacgtccagaacgccgtcaagtttctctcccaccccaaggtcaggggctcccccgtcgtctacaggcgatccttcctcgagaagaagggccttagcaccgaggagatcgacgaggccttccgaagggttcctgatcctcaacccagcactacggctaccacttctccgcagcagcaggtcaacagccagaatcaatccgtcggggtgcaagcttatgcgccagcacaacctgtgcacccagcaaacgctggccctgtcgtccttccaacgcagcccaggtttagctggtaccaagcattcctggctgcagggctcttgcttggttttggtgctagcgctgctgtctttatcaagaaactgttccttcctaggctcaagtcttggatccgcaatgttgtagcagaaggtaatggcactgaaggcaaccagcttaagcctaggattgatgatgaaacggctgatgctgtaaaggcttctgcttcggctgtttctgctattgccaaaacaaaccaacaactgcttgcttcaaaggatgaagaaaagaagatactagtgacgttgacacaagctctagattcccaagccaaggagttaaaatccttgaccgattcaatcggtcataccagggaacccataaatattaccagggatgataggttttctcagtaccgcccactggaagaccatgcccctactgttataaggaatggggcaattaacagttcatggagagcctctcagcaaactaacatgtatggtgtgtcaaatggcgactttggttccgcagtgaggtcttcatttgcgccagcacctgctgaacctacagctggatcattttcaagatcctatggcgagcagccgatgtccactgcacaacgaagcgataggtcttctggcagtaagccatgggagatgcattcgtattcacaacagaggcctggttatggatccaactcccagttgagtgatgatggatcatactctgatgcccaggacagctatgctccttcctatcaccagaatggaaaggcccctgattttcaagcggatgaacctaggcctttgacttacaacactggggttgaggaaagaccgccaccgcagcgccgctgggtgccccctcagcctccaggtgttgcgatgccagaagcagcagctgccatacgtcaaccaaaggcccttccaaagcagccctccagcgatgcctctgaggcagctggtgagatgcaggtgaatggttcaagtgcatcggatgctgtgactgaggttcctgttaatggtgctactgcaagcgatgctggacgcagtgagatccaagaacaatcagtggcggcctaagtgaaaccaagaccagctaagaactgggaagcaatctaagagagattcaggatctctagtacatctggggggtttgtcatacatctctgaataacgtctgtatcagaacagcggggcaaccacgccgatgggtacccgtaataatgcaataagtagcagatagtttctgcatttagattaatgctacttgtacacaggagaacatatcaataatatttttttggctgttcgattgagggtgcttaaaaagtgtgcttgtgaattgttgtattttgatcttgatcttgtgatgactagcaatcgcaatggaccaaatggagatggtcgtttgttt

SEQ ID NO: 215936 - DNA, 1930 bp, Zea Mays
atttcagtttggaactgaactgggaatgacgtggccgaggacaaaagcaaattgacaccttctccgttcccgacgactcccgtgagcgtggagaggcgactaggcgaggccatggcctccggcatcggctccggccagcagcaacccccaggttcagcagttagattggatgccctagcagcgccggcggcagatgctgacccgggagccgtcggcgacaagctcgtcttcgaagcgccgcctcagcccgtgagggaggactacgtccagaacgccgtcaagtttctctcccaccccaaggtcaggggctcccccgtcgtctacaggcgatccttcctcgagaagaagggccttagcaccgaggagatcgacgaggccttccgaagggttcctgatcctcaacccagcactacggctaccacttctccgcagcagcaggtcaacagccagaatcaatccgtcggggtgcaagcttatgcgccagcacaacctgtgcacccagcaaacgctggccctgtcgtccttccaacgcagcccaggtttagctggtaccaagcattcctggctgcagggctcttgcttggttttggtgctagcgctgctgtctttatcaagaaactgttccttcctaggctcaagtcttggatccgcaatgttgtagcagaaggtaatggcactgaaggcaaccagcttaagcctaggattgatgatgaaacggctgatgctgtaaaggcttctgcttcggctgtttctgctattgccaaaacaaaccaacaactgcttgcttcaaaggatgaagaaaagaagatactagtgacgttgacacaagctctagattcccaagccaaggagttaaaatccttgaccgattcaatcggtcataccagggaacccataaatattaccagggatgataggttttctcagtaccgcccactggaagaccatgcccctactgttataaggaatggggcaattaacagttcatggagagcctctcagcaaactaacatgtatggtgtgtcaaatggcgactttggttccgtgaggtcttcatttgcgccagcacctgctgaacctacagctggatcattttcaagatcctatggcgagcagccgatgtccactgcacaacgaagcgataggtcttctggcagtaagccatgggagatgcattcgtattcacaacagaggcctggttatggatccaactcccagttgagtgatgatggatcatactctgatgcccaggacagctatgctccttcctatcaccagaatggaaaggcccctgattttcaagcggatgaacctaggcctttgacttacaacactggggttgaggaaagaccgccaccgcagcgccgctgggtgccccctcagcctccaggtgttgcgatgccagaagcagcagctgccatacgtcaaccaaaggcccttccaaagcagccctccagcgatgcctctgaggcagctggtgagatgcaggtgaatggttcaagtgcatcggatgctgtgactgaggttcctgttaatggtgctactgcaagcgatgctggacgcagtgagatccaagaacaatcagtggcggcctaagtgaaaccaagaccagctaagaactgggaagcaatctaagagagattcaggatctctagtacatctggggggtttgtcatacatctctgaataacgtctgtatcagaacagcggggcaaccacgccgatgggtacccgtaataatgcaataagtagcagatagtttctgcatttagattaatgctacttgtacacaggagaacatatcaataatatttttttggctgttcgattgagggtgcttaaaaagtgtgcttgtgaattgttgtattttgatcttgatcttgtgatgactagcaatcgcaatggaccaaatggagatggtcgtttgttt

SEQ ID NO: 215937 - DNA, 1933 bp, Zea Mays
atttcagtttggaactgaactgggaatgacgtggccgaggacaaaagcaaattgacaccttctccgttcccgacgactcccgtgagcgtggagaggcgactaggcgaggccatggcctccggcatcggctccggccagcagcaacccccaggttcagcagttagattggatgccctagcagcgccggcggcagatgctgacccgggagccgtcggcgacaagctcgtcttcgaagcgccgcctcagcccgtgagggaggactacgtccagaacgccgtcaagtttctctcccaccccaaggtcaggggctcccccgtcgtctacaggcgatccttcctcgagaagaagggccttagcaccgaggagatcgacgaggccttccgaagggttcctgatcctcaacccagcactacggctaccacttctccgcagcagcaggtcaacagccagaatcaatccgtcggggtgcaagcttatgcgccagcacaacctgtgcacccagcaaacgctggccctgtcgtccttccaacgcagcccaggtttagctggtaccaagcattcctggctgcagggctcttgcttggttttggtgctagcgctgctgtctttatcaagaaactgttccttcctaggctcaagtcttggatccgcaatgttgtagcagaaggtaatggcactgaaggcaaccagcttaagcctaggattgatgatgaaacggctgatgctgtaaaggcttctgcttcggctgtttctgctattgccaaaacaaaccaacaactgcttgcttcaaaggatgaagcagaaaagaagatactagtgacgttgacacaagctctagattcccaagccaaggagttaaaatccttgaccgattcaatcggtcataccagggaacccataaatattaccagggatgataggttttctcagtaccgcccactggaagaccatgcccctactgttataaggaatggggcaattaacagttcatggagagcctctcagcaaactaacatgtatggtgtgtcaaatggcgactttggttccgtgaggtcttcatttgcgccagcacctgctgaacctacagctggatcattttcaagatcctatggcgagcagccgatgtccactgcacaacgaagcgataggtcttctggcagtaagccatgggagatgcattcgtattcacaacagaggcctggttatggatccaactcccagttgagtgatgatggatcatactctgatgcccaggacagctatgctccttcctatcaccagaatggaaaggcccctgattttcaagcggatgaacctaggcctttgacttacaacactggggttgaggaaagaccgccaccgcagcgccgctgggtgccccctcagcctccaggtgttgcgatgccagaagcagcagctgccatacgtcaaccaaaggcccttccaaagcagccctccagcgatgcctctgaggcagctggtgagatgcaggtgaatggttcaagtgcatcggatgctgtgactgaggttcctgttaatggtgctactgcaagcgatgctggacgcagtgagatccaagaacaatcagtggcggcctaagtgaaaccaagaccagctaagaactgggaagcaatctaagagagattcaggatctctagtacatctggggggtttgtcatacatctctgaataacgtctgtatcagaacagcggggcaaccacgccgatgggtacccgtaataatgcaataagtagcagatagtttctgcatttagattaatgctacttgtacacaggagaacatatcaataatatttttttggctgttcgattgagggtgcttaaaaagtgtgcttgtgaattgttgtattttgatcttgatcttgtgatgactagcaatcgcaatggaccaaatggagatggtcgtttgttt

SEQ ID NO: 215938 - DNA, 1937 bp, Zea Mays
atttcagtttggaactgaactgggaatgacgtggccgaggacaaaagcaaattgacaccttctccgttcccgacgactcccgtgagcgtggagaggcgactaggcgaggccatggcctccggcatcggctccggccagcagcaacccccaggtaggttcagcagttagattggatgccctagcagcgccggcggcagatgctgacccgggagccgtcggcgacaagctcgtcttcgaagcgccgcctcagcccgtgagggaggactacgtccagaacgccgtcaagtttctctcccaccccaaggtcaggggctcccccgtcgtctacaggcgatccttcctcgagaagaagggccttagcaccgaggagatcgacgaggccttccgaagggttcctgatcctcaacccagcactacggctaccacttctccgcagcagcaggtcaacagccagaatcaatccgtcggggtgcaagcttatgcgccagcacaacctgtgcacccagcaaacgctggccctgtcgtccttccaacgcagcccaggtttagctggtaccaagcattcctggctgcagggctcttgcttggttttggtgctagcgctgctgtctttatcaagaaactgttccttcctaggctcaagtcttggatccgcaatgttgtagcagaaggtaatggcactgaaggcaaccagcttaagcctaggattgatgatgaaacggctgatgctgtaaaggcttctgcttcggctgtttctgctattgccaaaacaaaccaacaactgcttgcttcaaaggatgaagcagaaaagaagatactagtgacgttgacacaagctctagattcccaagccaaggagttaaaatccttgaccgattcaatcggtcataccagggaacccataaatattaccagggatgataggttttctcagtaccgcccactggaagaccatgcccctactgttataaggaatggggcaattaacagttcatggagagcctctcagcaaactaacatgtatggtgtgtcaaatggcgactttggttccgtgaggtcttcatttgcgccagcacctgctgaacctacagctggatcattttcaagatcctatggcgagcagccgatgtccactgcacaacgaagcgataggtcttctggcagtaagccatgggagatgcattcgtattcacaacagaggcctggttatggatccaactcccagttgagtgatgatggatcatactctgatgcccaggacagctatgctccttcctatcaccagaatggaaaggcccctgattttcaagcggatgaacctaggcctttgacttacaacactggggttgaggaaagaccgccaccgcagcgccgctgggtgccccctcagcctccaggtgttgcgatgccagaagcagcagctgccatacgtcaaccaaaggcccttccaaagcagccctccagcgatgcctctgaggcagctggtgagatgcaggtgaatggttcaagtgcatcggatgctgtgactgaggttcctgttaatggtgctactgcaagcgatgctggacgcagtgagatccaagaacaatcagtggcggcctaagtgaaaccaagaccagctaagaactgggaagcaatctaagagagattcaggatctctagtacatctggggggtttgtcatacatctctgaataacgtctgtatcagaacagcggggcaaccacgccgatgggtacccgtaataatgcaataagtagcagatagtttctgcatttagattaatgctacttgtacacaggagaacatatcaataatatttttttggctgttcgattgagggtgcttaaaaagtgtgcttgtgaattgttgtattttgatcttgatcttgtgatgactagcaatcgcaatggaccaaatggagatggtcgtttgttt

SEQ ID NO: 215939 - DNA, 1937 bp, Zea Mays
atttcagtttggaactgaactgggaatgacgtggccgaggacaaaagcaaattgacaccttctccgttcccgacgactcccgtgagcgtggagaggcgactaggcgaggccatggcctccggcatcggctccggccagcagcaacccccaggtaggttcagcagttagattggatgccctagcagcgccggcggcagatgctgacccgggagccgtcggcgacaagctcgtcttcgaagcgccgcctcagcccgtgagggaggactacgtccagaacgccgtcaagtttctctcccaccccaaggtcaggggctcccccgtcgtctacaggcgatccttcctcgagaagaagggccttagcaccgaggagatcgacgaggccttccgaagggttcctgatcctcaacccagcactacggctaccacttctccgcagcagcaggtcaacagccagaatcaatccgtcggggtgcaagcttatgcgccagcacaacctgtgcacccagcaaacgctggccctgtcgtccttccaacgcagcccaggtttagctggtaccaagcattcctggctgcagggctcttgcttggttttggtgctagcgctgctgtctttatcaagaaactgttccttcctaggctcaagtcttggatccgcaatgttgtagcagaaggtaatggcactgaaggcaaccagcttaagcctaggattgatgatgaaacggctgatgctgtaaaggcttctgcttcggctgtttctgctattgccaaaacaaaccaacaactgcttgcttcaaaggatgaagcagaaaagaagatactagtgacgttgacacaagctctagattcccaagccaaggagttaaaatccttgaccgattcaatcggtcataccagggaacccataaatattaccagggatgataggttttctcagtaccgcccactggaagaccatgcccctactgttataaggaatggggcaattaacagttcatggagagcctctcagcaaactaacatgtatggtgtgtcaaatggcgactttggttccgcagtgaggtcttcatttgcgccagcacctgctgaacctacagctggatcattttcaagatcctatggcgagccgatgtccactgcacaacgaagcgataggtcttctggcagtaagccatgggagatgcattcgtattcacaacagaggcctggttatggatccaactcccagttgagtgatgatggatcatactctgatgcccaggacagctatgctccttcctatcaccagaatggaaaggcccctgattttcaagcggatgaacctaggcctttgacttacaacactggggttgaggaaagaccgccaccgcagcgccgctgggtgccccctcagcctccaggtgttgcgatgccagaagcagcagctgccatacgtcaaccaaaggcccttccaaagcagccctccagcgatgcctctgaggcagctggtgagatgcaggtgaatggttcaagtgcatcggatgctgtgactgaggttcctgttaatggtgctactgcaagcgatgctggacgcagtgagatccaagaacaatcagtggcggcctaagtgaaaccaagaccagctaagaactgggaagcaatctaagagagattcaggatctctagtacatctggggggtttgtcatacatctctgaataacgtctgtatcagaacagcggggcaaccacgccgatgggtacccgtaataatgcaataagtagcagatagtttctgcatttagattaatgctacttgtacacaggagaacatatcaataatatttttttggctgttcgattgagggtgcttaaaaagtgtgcttgtgaattgttgtattttgatcttgatcttgtgatgactagcaatcgcaatggaccaaatggagatggtcgtttgttt

SEQ ID NO: 215940 - DNA, 1933 bp, Zea Mays
atttcagtttggaactgaactgggaatgacgtggccgaggacaaaagcaaattgacaccttctccgttcccgacgactcccgtgagcgtggagaggcgactaggcgaggccatggcctccggcatcggctccggccagcagcaacccccaggttcagcagttagattggatgccctagcagcgccggcggcagatgctgacccgggagccgtcggcgacaagctcgtcttcgaagcgccgcctcagcccgtgagggaggactacgtccagaacgccgtcaagtttctctcccaccccaaggtcaggggctcccccgtcgtctacaggcgatccttcctcgagaagaagggccttagcaccgaggagatcgacgaggccttccgaagggttcctgatcctcaacccagcactacggctaccacttctccgcagcagcaggtcaacagccagaatcaatccgtcggggtgcaagcttatgcgccagcacaacctgtgcacccagcaaacgctggccctgtcgtccttccaacgcagcccaggtttagctggtaccaagcattcctggctgcagggctcttgcttggttttggtgctagcgctgctgtctttatcaagaaactgttccttcctaggctcaagtcttggatccgcaatgttgtagcagaaggtaatggcactgaaggcaaccagcttaagcctaggattgatgatgaaacggctgatgctgtaaaggcttctgcttcggctgtttctgctattgccaaaacaaaccaacaactgcttgcttcaaaggatgaagcagaaaagaagatactagtgacgttgacacaagctctagattcccaagccaaggagttaaaatccttgaccgattcaatcggtcataccagggaacccataaatattaccagggatgataggttttctcagtaccgcccactggaagaccatgcccctactgttataaggaatggggcaattaacagttcatggagagcctctcagcaaactaacatgtatggtgtgtcaaatggcgactttggttccgcagtgaggtcttcatttgcgccagcacctgctgaacctacagctggatcattttcaagatcctatggcgagccgatgtccactgcacaacgaagcgataggtcttctggcagtaagccatgggagatgcattcgtattcacaacagaggcctggttatggatccaactcccagttgagtgatgatggatcatactctgatgcccaggacagctatgctccttcctatcaccagaatggaaaggcccctgattttcaagcggatgaacctaggcctttgacttacaacactggggttgaggaaagaccgccaccgcagcgccgctgggtgccccctcagcctccaggtgttgcgatgccagaagcagcagctgccatacgtcaaccaaaggcccttccaaagcagccctccagcgatgcctctgaggcagctggtgagatgcaggtgaatggttcaagtgcatcggatgctgtgactgaggttcctgttaatggtgctactgcaagcgatgctggacgcagtgagatccaagaacaatcagtggcggcctaagtgaaaccaagaccagctaagaactgggaagcaatctaagagagattcaggatctctagtacatctggggggtttgtcatacatctctgaataacgtctgtatcagaacagcggggcaaccacgccgatgggtacccgtaataatgcaataagtagcagatagtttctgcatttagattaatgctacttgtacacaggagaacatatcaataatatttttttggctgttcgattgagggtgcttaaaaagtgtgcttgtgaattgttgtattttgatcttgatcttgtgatgactagcaatcgcaatggaccaaatggagatggtcgtttgttt

SEQ ID NO: 215941 - DNA, 1936 bp, Zea Mays
atttcagtttggaactgaactgggaatgacgtggccgaggacaaaagcaaattgacaccttctccgttcccgacgactcccgtgagcgtggagaggcgactaggcgaggccatggcctccggcatcggctccggccagcagcaacccccaggttcagcagttagattggatgccctagcagcgccggcggcagatgctgacccgggagccgtcggcgacaagctcgtcttcgaagcgccgcctcagcccgtgagggaggactacgtccagaacgccgtcaagtttctctcccaccccaaggtcaggggctcccccgtcgtctacaggcgatccttcctcgagaagaagggccttagcaccgaggagatcgacgaggccttccgaagggttcctgatcctcaacccagcactacggctaccacttctccgcagcagcaggtcaacagccagaatcaatccgtcggggtgcaagcttatgcgccagcacaacctgtgcacccagcaaacgctggccctgtcgtccttccaacgcagcccaggtttagctggtaccaagcattcctggctgcagggctcttgcttggttttggtgctagcgctgctgtctttatcaagaaactgttccttcctaggctcaagtcttggatccgcaatgttgtagcagaaggtaatggcactgaaggcaaccagcttaagcctaggattgatgatgaaacggctgatgctgtaaaggcttctgcttcggctgtttctgctattgccaaaacaaaccaacaactgcttgcttcaaaggatgaagcagaaaagaagatactagtgacgttgacacaagctctagattcccaagccaaggagttaaaatccttgaccgattcaatcggtcataccagggaacccataaatattaccagggatgataggttttctcagtaccgcccactggaagaccatgcccctactgttataaggaatggggcaattaacagttcatggagagcctctcagcaaactaacatgtatggtgtgtcaaatggcgactttggttccgcagtgaggtcttcatttgcgccagcacctgctgaacctacagctggatcattttcaagatcctatggcgagcagccgatgtccactgcacaacgaagcgataggtcttctggcagtaagccatgggagatgcattcgtattcacaacagaggcctggttatggatccaactcccagttgagtgatgatggatcatactctgatgcccaggacagctatgctccttcctatcaccagaatggaaaggcccctgattttcaagcggatgaacctaggcctttgacttacaacactggggttgaggaaagaccgccaccgcagcgccgctgggtgccccctcagcctccaggtgttgcgatgccagaagcagcagctgccatacgtcaaccaaaggcccttccaaagcagccctccagcgatgcctctgaggcagctggtgagatgcaggtgaatggttcaagtgcatcggatgctgtgactgaggttcctgttaatggtgctactgcaagcgatgctggacgcagtgagatccaagaacaatcagtggcggcctaagtgaaaccaagaccagctaagaactgggaagcaatctaagagagattcaggatctctagtacatctggggggtttgtcatacatctctgaataacgtctgtatcagaacagcggggcaaccacgccgatgggtacccgtaataatgcaataagtagcagatagtttctgcatttagattaatgctacttgtacacaggagaacatatcaataatatttttttggctgttcgattgagggtgcttaaaaagtgtgcttgtgaattgttgtattttgatcttgatcttgtgatgactagcaatcgcaatggaccaaatggagatggtcgtttgttt

SEQ ID NO: 215942 - DNA, 1927 bp, Zea Mays
cctatttcagtttggaactgaactgggaatgacgtggccgaggacaaaagcaaattgacaccttctccgttcccgacgactcccgtgagcgtggagaggcgactaggcgaggccatggcctccggcatcggctccggccagcagcaacccccagcagttagattggatgccctagcagcgccggcggcagatgctgacccgggagccgtcggcgacaagctcgtcttcgaagcgccgcctcagcccgtgagggaggactacgtccagaacgccgtcaagtttctctcccaccccaaggtcaggggctcccccgtcgtctacaggcgatccttcctcgagaagaagggccttagcaccgaggagatcgacgaggccttccgaagggttcctgatcctcaacccagcactacggctaccacttctccgcagcagcaggtcaacagccagaatcaatccgtcggggtgcaagcttatgcgccagcacaacctgtgcacccagcaaacgctggccctgtcgtccttccaacgcagcccaggtttagctggtaccaagcattcctggctgcagggctcttgcttggttttggtgctagcgctgctgtctttatcaagaaactgttccttcctaggctcaagtcttggatccgcaatgttgtagcagaaggtaatggcactgaaggcaaccagcttaagcctaggattgatgatgaaacggctgatgctgtaaaggcttctgcttcggctgtttctgctattgccaaaacaaaccaacaactgcttgcttcaaaggatgaagaaaagaagatactagtgacgttgacacaagctctagattcccaagccaaggagttaaaatccttgaccgattcaatcggtcataccagggaacccataaatattaccagggatgataggttttctcagtaccgcccactggaagaccatgcccctactgttataaggaatggggcaattaacagttcatggagagcctctcagcaaactaacatgtatggtgtgtcaaatggcgactttggttccgtgaggtcttcatttgcgccagcacctgctgaacctacagctggatcattttcaagatcctatggcgagcagccgatgtccactgcacaacgaagcgataggtcttctggcagtaagccatgggagatgcattcgtattcacaacagaggcctggttatggatccaactcccagttgagtgatgatggatcatactctgatgcccaggacagctatgctccttcctatcaccagaatggaaaggcccctgattttcaagcggatgaacctaggcctttgacttacaacactggggttgaggaaagaccgccaccgcagcgccgctgggtgccccctcagcctccaggtgttgcgatgccagaagcagcagctgccatacgtcaaccaaaggcccttccaaagcagccctccagcgatgcctctgaggcagctggtgagatgcaggtgaatggttcaagtgcatcggatgctgtgactgaggttcctgttaatggtgctactgcaagcgatgctggacgcagtgagatccaagaacaatcagtggcggcctaagtgaaaccaagaccagctaagaactgggaagcaatctaagagagattcaggatctctagtacatctggggggtttgtcatacatctctgaataacgtctgtatcagaacagcggggcaaccacgccgatgggtacccgtaataatgcaataagtagcagatagtttctgcatttagattaatgctacttgtacacaggagaacatatcaataatatttttttggctgttcgattgagggtgcttaaaaagtgtgcttgtgaattgttgtattttgatcttgatcttgtgatgactagcaatcgcaatggaccaaatggagatggtcgtttgttt

SEQ ID NO: 215943 - DNA, 1916 bp, Zea Mays
ttttggagtccctatttcagtttggaactgaactgggaatgacgtggccgaggacaaaagcaaattgacaccttctccgttcccgacgactcccgtgagcgtggagaggcgactaggcgaggccatggcctccggcatcggctccggccagcagcaacccccagcgccggcggcagatgctgacccgggagccgtcggcgacaagctcgtcttcgaagcgccgcctcagcccgtgagggaggactacgtccagaacgccgtcaagtttctctcccaccccaaggtcaggggctcccccgtcgtctacaggcgatccttcctcgagaagaagggccttagcaccgaggagatcgacgaggccttccgaagggttcctgatcctcaacccagcactacggctaccacttctccgcagcagcaggtcaacagccagaatcaatccgtcggggtgcaagcttatgcgccagcacaacctgtgcacccagcaaacgctggccctgtcgtccttccaacgcagcccaggtttagctggtaccaagcattcctggctgcagggctcttgcttggttttggtgctagcgctgctgtctttatcaagaaactgttccttcctaggctcaagtcttggatccgcaatgttgtagcagaaggtaatggcactgaaggcaaccagcttaagcctaggattgatgatgaaacggctgatgctgtaaaggcttctgcttcggctgtttctgctattgccaaaacaaaccaacaactgcttgcttcaaaggatgaagaaaagaagatactagtgacgttgacacaagctctagattcccaagccaaggagttaaaatccttgaccgattcaatcggtcataccagggaacccataaatattaccagggatgataggttttctcagtaccgcccactggaagaccatgcccctactgttataaggaatggggcaattaacagttcatggagagcctctcagcaaactaacatgtatggtgtgtcaaatggcgactttggttccgcagtgaggtcttcatttgcgccagcacctgctgaacctacagctggatcattttcaagatcctatggcgagcagccgatgtccactgcacaacgaagcgataggtcttctggcagtaagccatgggagatgcattcgtattcacaacagaggcctggttatggatccaactcccagttgagtgatgatggatcatactctgatgcccaggacagctatgctccttcctatcaccagaatggaaaggcccctgattttcaagcggatgaacctaggcctttgacttacaacactggggttgaggaaagaccgccaccgcagcgccgctgggtgccccctcagcctccaggtgttgcgatgccagaagcagcagctgccatacgtcaaccaaaggcccttccaaagcagccctccagcgatgcctctgaggcagctggtgagatgcaggtgaatggttcaagtgcatcggatgctgtgactgaggttcctgttaatggtgctactgcaagcgatgctggacgcagtgagatccaagaacaatcagtggcggcctaagtgaaaccaagaccagctaagaactgggaagcaatctaagagagattcaggatctctagtacatctggggggtttgtcatacatctctgaataacgtctgtatcagaacagcggggcaaccacgccgatgggtacccgtaataatgcaataagtagcagatagtttctgcatttagattaatgctacttgtacacaggagaacatatcaataatatttttttggctgttcgattgagggtgcttaaaaagtgtgcttgtgaattgttgtattttgatcttgatcttgtgatgactagcaatcgcaatggaccaaatggagatggtcgtttgttt

SEQ ID NO: 215944 - DNA, 1935 bp, Zea Mays
gttttggagtccctatttcagtttggaactgaactgggaatgacgtggccgaggacaaaagcaaattgacaccttctccgttcccgacgactcccgtgagcgtggagaggcgactaggcgaggccatggcctccggcatcggctccggccagcagcaacccccagcagttagattggatgccctagcagcgccggcggcagatgctgacccgggagccgtcggcgacaagctcgtcttcgaagcgccgcctcagcccgtgagggaggactacgtccagaacgccgtcaagtttctctcccaccccaaggtcaggggctcccccgtcgtctacaggcgatccttcctcgagaagaagggccttagcaccgaggagatcgacgaggccttccgaagggttcctgatcctcaacccagcactacggctaccacttctccgcagcagcaggtcaacagccagaatcaatccgtcggggtgcaagcttatgcgccagcacaacctgtgcacccagcaaacgctggccctgtcgtccttccaacgcagcccaggtttagctggtaccaagcattcctggctgcagggctcttgcttggttttggtgctagcgctgctgtctttatcaagaaactgttccttcctaggctcaagtcttggatccgcaatgttgtagcagaaggtaatggcactgaaggcaaccagcttaagcctaggattgatgatgaaacggctgatgctgtaaaggcttctgcttcggctgtttctgctattgccaaaacaaaccaacaactgcttgcttcaaaggatgaagaaaagaagatactagtgacgttgacacaagctctagattcccaagccaaggagttaaaatccttgaccgattcaatcggtcataccagggaacccataaatattaccagggatgataggttttctcagtaccgcccactggaagaccatgcccctactgttataaggaatggggcaattaacagttcatggagagcctctcagcaaactaacatgtatggtgtgtcaaatggcgactttggttccgtgaggtcttcatttgcgccagcacctgctgaacctacagctggatcattttcaagatcctatggcgagccgatgtccactgcacaacgaagcgataggtcttctggcagtaagccatgggagatgcattcgtattcacaacagaggcctggttatggatccaactcccagttgagtgatgatggatcatactctgatgcccaggacagctatgctccttcctatcaccagaatggaaaggcccctgattttcaagcggatgaacctaggcctttgacttacaacactggggttgaggaaagaccgccaccgcagcgccgctgggtgccccctcagcctccaggtgttgcgatgccagaagcagcagctgccatacgtcaaccaaaggcccttccaaagcagccctccagcgatgcctctgaggcagctggtgagatgcaggtgaatggttcaagtgcatcggatgctgtgactgaggttcctgttaatggtgctactgcaagcgatgctggacgcagtgagatccaagaacaatcagtggcggcctaagtgaaaccaagaccagctaagaactgggaagcaatctaagagagattcaggatctctagtacatctggggggtttgtcatacatctctgaataacgtctgtatcagaacagcggggcaaccacgccgatgggtacccgtaataatgcaataagtagcagatagtttctgcatttagattaatgctacttgtacacaggagaacatatcaataatatttttttggctgttcgattgagggtgcttaaaaagtgtgcttgtgaattgttgtattttgatcttgatcttgtgatgactagcaatcgcaatggaccaaatggagatggtcgtttgttt

SEQ ID NO: 215945 - DNA, 3626 bp, Zea Mays
ggacagttagctgtaacctacctttccccgctcttcatcggcaaaaaagagggggaaaaaaaacgaaccctgaagaggagagggaaaaaactcgagaaaagcaaaccctaggttgccatgtcatcgacgacatcctaattcgccgcattgcatcgcccaggcaaggggcttttggcacaggtcggcgctcccctgtcatcggattcgattcccctgctcaatttgccgccgatccgtggttcggatcttctcgccgctcggcgactgtcgcgccattttttctctcgatccgtctgcgagacactaagcgcttcgccgacggtcgaccctgctgacgccaccggcgccaggtggcttgtcgcctactctggtccgccaaccgacgcttgatgcctccagggctccaaagagaaatggaaatgggaacaccttcaaggaaagcttcaatatcaatgttccaaaagggagttgtctaaagattccacaaaatgtacaggtcgaagagctcttccttcaatgggtctcttctctaagggttttgatgttcaagagtctgtctttcttccagagtctaattattcagatatcaaacctgccatttgttgtttggatgaccggtgtaaattcactcaaagttttctggacatgacaactgcaccttcagtactgctttggcaccatagaaaaatgttaatggaaagcaattcgactaatggttctcagcaatccatgtcatgtgctttggatgaggatcatcagcagttggtaacagaacatgcatctgatacagtttgtcatgctccacttcaagtttgttcacttaatcttggttcatcaccttatagtccattggatatggtctctgctagttgtgcaaatccatctagctctactagtagggaacccaagattactgaaaggaatataagcccagaatgtaatgacaacagtattgatgatgcaatataattgacataaagtttcgagatcaaaatgagccttgtattggtgctgataggccatgttcctccaaccttagtgttatttgctcttcacagaagtttgcagaggatcgtatttccatcaatattcctcaagacaaagcaattgatgcaacaaatgataaacctcttgacaaagatgaaaaagaaaagcatcctatatctaacttggttcaggaattgaatgaacatccaattggtcgtgttacaccaactgcccccagaactacttcccatcggaaccggtttacgtctatatcacgtgcttttggagatggttcaaagttactgccagaagaccacatgttgactggcttcgctagtggttctaagaagccacgaagtcaagtttcatactcaggttctcctagaagtgaggaacttggcttaaaaaacaaagatcatttccgcaagatacaatctcatgtcagtgttaagacaagtgatgcaaaaaaacttcctgatagttctagaagtgggcatagcagtccagagctattgacttgcattgcaaatgttcttgttacagtgggtgatagaggttggagggagtatgatacccagatcacaatggattctgatgttcacagtgaacagaggatatgcgtgaaacttgctgaagggaccaagtatgctcacaaggtctgtcaagttttgcagcctggggccacaaaccgctatacacatgccatgatgtggaagggtggggctgagtggtgcctggaatttcctgacagaagccagtggttgattttcaagcaaatgcatgatgagtgctatagccataacatcagagctgcttctgtgaggaacattccaacccctggtgtccatttggttggaatccatgatgataatgatatggtatcctttgtgcgatctgaagattatcttgtccacatcggaacagatgttgaaattgctcttgatgaggcccgtgtgttatataacatggacagtgatgatgaagagtggatatcaagccggcagaaattcttagtaagagacaacaacgccacacttgagttggcagaagatttgtttgagagggttatggacaaactagagaagtttgcatatagccacgactctaatgaactcagcattgttcagatgaaggaactggagactgatgacctacctctggacattattgaagtgatacatgcatattggcaagctaagaggcagaaaaagggaatgccacttattcgacatttccagttcgctatgtggaaggtctacgagcaacagttacatgaatgggaatcgaaagtatgcagaatgcagggttcatcaaatgggtaccaaggaaaaaaaatgcctcccaagcctgcattgtttgccttctgtttgaggcctcgtggactcgatgtaccatacaagggaccaaagcagcgttctcataagaagcttatgtctacaggctgccatagcttttcaagacagcatgatggcttttaccggcaagggtactctcccaggttctctacaagaacaggttctcttcgggcatttgagtcctcggaaagttctacaccaagatttttcaggacaaatattgtcaaaaggagtgcaaccgttgctttctctgatgatcaccagccgtcgccttccttccgccctcagagagttaaacggagcgcatctgaccattggaacactgtcattcatgactggcagaactcaaagcatctctttccgggctcgccccctgttgatattgaggagctcaaactgcgggatgctgcaagcgcagcacagcacgctgctgccatggcgaagctcaagagggaaaaggctcactgcctgatgcagaaggctgaccttgccctccataaggccacggtagccctcatgattgctgatgcaatcaaatcttccagcaggaacaagtctcgggattgccgaaggggatttgatgaatgaggaacgctgacttttttttgccttttgccgcgagcccttggcgtatacacacaacttgaactcgatgcttttgctgatgatgggagcgtgtttgcttatctaatgatcgagtcattagatagcatcccttccccccttctcccccctccccctcctttgcgtctcctgtacataggtttcttttcatcattcttttgtgctcttttacctcccgattaacatattgcccggtgatgaatgggccaggtcaccaggatgtaggttagcaatctggcgtgttgtctgaacagcggctagggaagtggcgctttacggagggttatggtcctgttgttgcactgtgatgcctttacgacattgcatattctagaaggagcacatggcatatcgtgggtcagtgggagcagtgccacatgacccctctgggtcataaataatctatttccgatggctcataggttgtgttcgatgacctaagccgtcggaaattttattgtggtcaacatatagtactcattggaattctggaggaacttgaacatgaggtccaacaacctcttagatatattttcgattccttgtgtgttctccaaatattttgcatccaataaacttacaaacactttcttaaaaatttccatgttttctcgatccctgtaggtgctgcgacatatgtttgcctggtcctacgtatcg

SEQ ID NO: 215946 - DNA, 5887 bp, Zea Mays
ggacagttagctgtaacctacctttccccgctcttcatcggcaaaaaagagggggaaaaaaaacgaaccctgaagaggagagggaaaaaactcgagaaaagcaaaccctaggttgccatgtcatcgacgacatcctaattcgccgcattgcatcgcccaggcaaggggcttttggcacaggtcggcgctcccctgtcatcggattcgattcccctgctcaatttgccgccgatccgtggttcggatcttctcgccgctcggcgactgtcgcgccattttttctctcgatccgtctgcgagacactaagcgcttcgccgacggtcgaccctgctgacgccaccggcgccaggtggcttgtcgcctactctggtccgccaaccgacgcttgatgcctccagggctccaaaggattgctgatgagatcgaaactgtttctgttaatttatcgtggattcaactgaacccccatgctccacgcaaccgcccctggtctgggtcgaaactctacatatgatgggaggtgaaattctgaggaattatgttaacttgattcgtgggctcgtgaatggaacccagtggcagtgataaacccactgcaacagatgctaacgaatcagtggtgggtttagatggtgaggacactttgtctgagagggaatctgttggagcaaaagatggacctgccttgcctaatgggagtggaaaggaggctcatgcaagcagtccatctgcggcgaataagaggaagcacaacgacttgggttctaatcaaatggaactcaatgaaccagggacgccaagttccagctcaggtgattccacatggagcataaatggtctcgatgactgtcaccaactctcattgtctagaaataagaacgacgactctgaacattcggttacttcagctggagttacagtgatcaggcagcctcgtggcgtcttgaggttaagaaagctggctcagaatgttagtactgagagttggactggtggtcataatacttcacaagctaatggagttcctaggtcttcccaacacccgaggcggaacaataagagggaatcaattccgtcccaggagaatagagttagtggtgatgaacctgtcagctgcttgaggactgagaatggtacttgtgatcaggataccggcaccaagttctgttccaaaactgagttcttagctgaaaagcagtcacatctttcaggcgaacccccaaaagctgttcatgttgacaagggtgtctatgattatgtcaaagacgatgatggtgatagtttggaagaaaatgctgcctggatgctctgttctttatcagataacaaatgtgctggatcaccaaggaagggaactgataggttgtcaaagagatctttttctcagaattcaaaccattttaagaattcatatgaaaaaatcaaggatatatgtagtcctgctaggttgctgcggaagcgtgatggcaaagttccgttcttgaagcgtcgtcagcgtcggcatttttatgaagtcagccctagcgatgtggatccattctgcattgttaaagagaggatcagggttttttggcctcttgatgagacttggtactttggcatggtcaaggaatataatccggtcacaaggttacatcatgtcaggtatgatggtaaggatgaagaatggatcaaccttcaaaatgagaggattaaacttctgtttttaccagcggaagctcccaataaatctaaatgcaccaactcaaggtcagcgtttgagtcgaagcatgaacagggtgacagagaagacatgcatagaagcggaagcaatacagagagttttgagtcaggtcccatcagctcatggttggctcgatcaaaccaagcaaaatctgctgcactttgtgacatcaacaagcaagatcacagtcattccaatactgttccagtttcatttgaccaaaaacagtgtcgtgcttctgatgccaaggaatctattgattctgcaccatgtagttcacttgcaaatgggggtgtagaggttctcaaggataggaccatacctgaggacgggaggtttcactttgtttattctaggaagcgattttgcagaaaaaagaatgattttcttagcatttccgaacagcattctaattgccaaagaagagcaagttctatggttcttgcttcttgtcctgatatgaaatctagtattgcaactggtgcttcagttacatatgtcatacctgcattgagcctcccactgaaacctgtttataagttgctttgtgaagcctgttgtgtttcggtttccaatgctttctttcttcttcaatgtggtacaatggttgccttatggcctgttgtacatctggatatacttcttattgatagtgctttaggcttgaaacgtttccttcttgacacatgcatgagatcggcagtatcacttttctgtttacttgctggaagctttaagcagtgttctaggcagagaactaccaaggaatcaagaataccttgtacttcagtcagatttcagatatctggtgggcatggtagaagccaagtagtgtttatgtttttcagctttgttggtgtagagaaatggaaatgggaacaccttcaaggaaagcttcaatatcaatgttccaaaagggagttgtctaaagattccacaaaatgtacaggtcgaagagctcttccttcaatgggtctcttctctaagggttttgatgttcaagagtctgtctttcttccagagtctaattattcagatatcaaacctgccatttgttgtttggatgaccggtgtaaattcactcaaagttttctggacatgacaactgcaccttcagtactgctttggcaccatagaaaaatgttaatggaaagcaattcgactaatggttctcagcaatccatgtcatgtgctttggatgaggatcatcagcagttggtaacagaacatgcatctgatacagtttgtcatgctccacttcaagtttgttcacttaatcttggttcatcaccttatagtccattggatatggtctctgctagttgtgcaaatccatctagctctactagtagggaacccaagattactgaaaggaatataagcccagaatgtaatgacaacagtattgatgatgcaatataattgacataaagtttcgagatcaaaatgagccttgtattggtgctgataggccatgttcctccaaccttagtgttatttgctcttcacagaagtttgcagaggatcgtatttccatcaatattcctcaagacaaagcaattgatgcaacaaatgataaacctcttgacaaagatgaaaaagaaaagcatcctatatctaacttggttcaggaattgaatgaacatccaattggtcgtgttacaccaactgcccccagaactacttcccatcggaaccggtttacgtctatatcacgtgcttttggagatggttcaaagttactgccagaagaccacatgttgactggcttcgctagtggttctaagaagccacgaagtcaagtttcatactcaggttctcctagaagtgaggaacttggcttaaaaaacaaagatcatttccgcaagatacaatctcatgtcagtgttaagacaagtgatgcaaaaaaacttcctgatagttctagaagtgggcatagcagtccagagctattgacttgcattgcaaatgttcttgttacagtgggtgatagaggttggagggagtatgatacccagatcacaatggattctgatgttcacagtgaacagaggatatgcgtgaaacttgctgaagggaccaagtatgctcacaaggtctgtcaagttttgcagcctggggccacaaaccgctatacacatgccatgatgtggaagggtggggctgagtggtgcctggaatttcctgacagaagccagtggttgattttcaagcaaatgcatgatgagtgctatagccataacatcagagctgcttctgtgaggaacattccaacccctggtgtccatttggttggaatccatgatgataatgatatggtatcctttgtgcgatctgaagattatcttgtccacatcggaacagatgttgaaattgctcttgatgaggcccgtgtgttatataacatggacagtgatgatgaagagtggatatcaagccggcagaaattcttagtaagagacaacaacgccacacttgagttggcagaagatttgtttgagagggttatggacaaactagagaagtttgcatatagccacgactctaatgaactcagcattgttcagatgaaggaactggagactgatgacctacctctggacattattgaagtgatacatgcatattggcaagctaagaggcagaaaaagggaatgccacttattcgacatttccagttcgctatgtggaaggtctacgagcaacagttacatgaatgggaatcgaaagtatgcagaatgcagggttcatcaaatgggtaccaaggaaaaaaaatgcctcccaagcctgcattgtttgccttctgtttgaggcctcgtggactcgatgtaccatacaagggaccaaagcagcgttctcataagaagcttatgtctacaggctgccatagcttttcaagacagcatgatggcttttaccggcaagtatcaggtaggagatacaatgaatgcactgtggatgggcggatatgcgaattatatgacattggttctctttattccctaacagggtactctcccaggttctctacaagaacaggttctcttcgggcatttgagtcctcggaaagttctacaccaagatttttcaggacaaatattgtcaaaaggagtgcaaccgttgctttctctgatgatcaccagccgtcgccttccttccgccctcagagagttaaacggagcgcatctgaccattggaacactgtcattcatgactggcagaactcaaagcatctctttccgggctcgccccctgttgatattgaggagctcaaactgcgggatgctgcaagcgcagcacagcacgctgctgccatggcgaagctcaagagggaaaaggctcactgcctgatgcagaaggctgaccttgccctccataaggccacggtagccctcatgattgctgatgcaatcaaatcttccagcaggaacaagtctcgggattgccgaaggggatttgatgaatgaggaacgctgacttttttttgccttttgccgcgagcccttggcgtatacacacaacttgaactcgatgcttttgctgatgatgggagcgtgtttgcttatctaatgatcgagtcattagatagcatcccttccccccttctcccccctccccctcctttgcgtctcctgtacataggtttcttttcatcattcttttgtgctcttttacctcccgattaacatattgcccggtgatgaatgggccaggtcaccaggatgtaggttagcaatctggcgtgttgtctgaacagcggctagggaagtggcgctttacggagggttatggtcctgttgttgcactgtgatgcctttacgacattgcatattctagaaggagcacatggcatatcgtgggtcagtgggagcagtgccacatgacccctctgggtcataaataatctatttccgatggctcataggttgtgttcgatgacctaagccgtcggaaattttattgtggtcaacatatagtactcattggaattctggaggaacttgaacatgaggtccaacaacctcttagatatattttcgattccttgtgtgttctccaaatattttgcatccaataaacttacaaacactttcttaaaaatttccatgttttctcgatccctgtaggtgctgcgacatatgtttgcctggtcctacgtatcg

SEQ ID NO: 215947 - DNA, 3613 bp, Zea Mays
ggacagttagctgtaacctacctttccccgctcttcatcggcaaaaaagagggggaaaaaaaacgaaccctgaagaggagagggaaaaaactcgagaaaagcaaaccctaggttgccatgtcatcgacgacatcctaattcgccgcattgcatcgcccaggcaaggggcttttggcacaggtcggcgctcccctgtcatcggattcgattcccctgctcaatttgccgccgatccgtggttcggatcttctcgccgctcggcgactgtcgcgccattttttctctcgatccgtctgcgagacactaagcgcttcgccgacggtcgaccctgctgacgccaccggcgccaggtggcttgtcgcctactctggtccgccaaccgacgcttgatgcctccagggctccaaagagaaatggaaatgggaacaccttcaaggaaagcttcaatatcaatgttccaaaagggagttgtctaaagattccacaaaatgtacaggtcgaagagctcttccttcaatgggtctcttctctaagggttttgatgttcaagagtctgtctttcttccagagtctaattattcagatatcaaacctgccatttgttgtttggatgaccggtgtaaattcactcaaagttttctggacatgacaactgcaccttcagtactgctttggcaccatagaaaaatgttaatggaaagcaattcgactaatggttctcagcaatccatgtcatgtgctttggatgaggatcatcagcagttggtaacagaacatgcatctgatacagtttgtcatgctccacttcaagtttgttcacttaatcttggttcatcaccttatagtccattggatatggtctctgctagttgtgcaaatccatctagctctactagtagggaacccaagattactgaaaggaatataagcccagaatgtaatgacaacagtattgatgatgcaatataattgacataaagtttcgagatcaaaatgagccttgtattggtgctgataggccatgttcctccaaccttagtgttatttgctcttcacagaagtttgcagaggatcgtatttccatcaatattcctcaagacaaagcaattgatgcaacaaatgataaacctcttgacaaagatgaaaaagaaaagcatcctatatctaacttggttcaggaattgaatgaacatccaattggtcgtgttacaccaactgcccccagaactacttcccatcggaaccggtttacgtctatatcacgtgcttttggagatggttcaaagttactgccagaagaccacatgttgactggcttcgctagtggttctaagaagccacgaagtcaagtttcatactcaggttctcctagaagtgaggaacttggcttaaaaaacaaagatcatttccgcaagatacaatctcatgtcagtgttaagacaagtgatgcaaaaaaacttcctgatagttctagaagtgggcatagcagtccagagctattgacttgcattgcaaatgttcttgttacagtgggtgatagaggttggagggagtatgatacccagatcacaatggattctgatgttcacagtgaacagaggatatgcgtgaaacttgctgaagggaccaagtatgctcacaaggtctgtcaagttttgcagcctggggccacaaaccgctatacacatgccatgatgtggaagggtggggctgagtggtgcctggaatttcctgacagaagccagtggttgattttcaagcaaatgcatgatgagtgctatagccataacatcagagctgcttctgtgaggaacattccaacccctggtgtccatttggttggaatccatgatgataatgatatggtatcctttgtgcgatctgaagattatcttgtccacatcggaacagatgttgaaattgctcttgatgaggcccgtgtgttatataacatggacagtgatgatgaagagtggatatcaagccggcagaaattcttagtaagagacaacaacgccacacttgagttggcagaagatttgtttgagagggttatggacaaactagagaagtttgcatatagccacgactctaatgaactcagcattgttcagatgaaggaactggagactgatgacctacctctggacattattgaagtgatacatgcatattggcaagctaagaggcagaaaaagggaatgccacttattcgacatttccagttcgctatgtggaaggtctacgagcaacagttacatgaatgggaatcgaaagtatgcagaatgcagggttcatcaaatgggtaccaaggaaaaaaaatgcctcccaagcctgcattgtttgccttctgtttgaggcctcgtggactcgatgtaccatacaagggaccaaagcagcgttctcataagaagcttatgtctacaggctgccatagcttttcaagacagcatgatggcttttaccggcaaggttctctacaagaacaggttctcttcgggcatttgagtcctcggaaagttctacaccaagatttttcaggacaaatattgtcaaaaggagtgcaaccgttgctttctctgatgatcaccagccgtcgccttccttccgccctcagagagttaaacggagcgcatctgaccattggaacactgtcattcatgactggcagaactcaaagcatctctttccgggctcgccccctgttgatattgaggagctcaaactgcgggatgctgcaagcgcagcacagcacgctgctgccatggcgaagctcaagagggaaaaggctcactgcctgatgcagaaggctgaccttgccctccataaggccacggtagccctcatgattgctgatgcaatcaaatcttccagcaggaacaagtctcgggattgccgaaggggatttgatgaatgaggaacgctgacttttttttgccttttgccgcgagcccttggcgtatacacacaacttgaactcgatgcttttgctgatgatgggagcgtgtttgcttatctaatgatcgagtcattagatagcatcccttccccccttctcccccctccccctcctttgcgtctcctgtacataggtttcttttcatcattcttttgtgctcttttacctcccgattaacatattgcccggtgatgaatgggccaggtcaccaggatgtaggttagcaatctggcgtgttgtctgaacagcggctagggaagtggcgctttacggagggttatggtcctgttgttgcactgtgatgcctttacgacattgcatattctagaaggagcacatggcatatcgtgggtcagtgggagcagtgccacatgacccctctgggtcataaataatctatttccgatggctcataggttgtgttcgatgacctaagccgtcggaaattttattgtggtcaacatatagtactcattggaattctggaggaacttgaacatgaggtccaacaacctcttagatatattttcgattccttgtgtgttctccaaatattttgcatccaataaacttacaaacactttcttaaaaatttccatgttttctcgatccctgtaggtgctgcgacatatgtttgcctggtcctacgtatcg

SEQ ID NO: 215948 - DNA, 3495 bp, Zea Mays
ggacagttagctgtaacctacctttccccgctcttcatcggcaaaaaagagggggaaaaaaaacgaaccctgaagaggagagggaaaaaactcgagaaaagcaaaccctaggttgccatgtcatcgacgacatcctaattcgccgcattgcatcgcccaggcaaggggcttttggcacaggtcggcgctcccctgtcatcggattcgattcccctgctcaatttgccgccgatccgtggttcggatcttctcgccgctcggcgactgtcgcgccattttttctctcgatccgtctgcgagacactaagcgcttcgccgacggtcgaccctgctgacgccaccggcgccaggtggcttgtcgcctactctggtccgccaaccgacgcttgatgcctccagggctccaaagagaaatggaaatgggaacaccttcaaggaaagcttcaatatcaatgttccaaaagggagttgtctaaagattccacaaaatgtacaggtcgaagagctcttccttcaatgggtctcttctctaagggttttgatgttcaagagtctgtctttcttccagagtctaattattcagatatcaaacctgccatttgttgtttggatgaccggtgtaaattcactcaaagttttctggacatgacaactgcaccttcagtactgctttggcaccatagaaaaatgttaatggaaagcaattcgactaatggttctcagcaatccatgtcatgtgctttggatgaggatcatcagcagttgtttcgagatcaaaatgagccttgtattggtgctgataggccatgttcctccaaccttagtgttatttgctcttcacagaagtttgcagaggatcgtatttccatcaatattcctcaagacaaagcaattgatgcaacaaatgataaacctcttgacaaagatgaaaaagaaaagcatcctatatctaacttggttcaggaattgaatgaacatccaattggtcgtgttacaccaactgcccccagaactacttcccatcggaaccggtttacgtctatatcacgtgcttttggagatggttcaaagttactgccagaagaccacatgttgactggcttcgctagtggttctaagaagccacgaagtcaagtttcatactcaggttctcctagaagtgaggaacttggcttaaaaaacaaagatcatttccgcaagatacaatctcatgtcagtgttaagacaagtgatgcaaaaaaacttcctgatagttctagaagtgggcatagcagtccagagctattgacttgcattgcaaatgttcttgttacagtgggtgatagaggttggagggagtatgatacccagatcacaatggattctgatgttcacagtgaacagaggatatgcgtgaaacttgctgaagggaccaagtatgctcacaaggtctgtcaagttttgcagcctggggccacaaaccgctatacacatgccatgatgtggaagggtggggctgagtggtgcctggaatttcctgacagaagccagtggttgattttcaagcaaatgcatgatgagtgctatagccataacatcagagctgcttctgtgaggaacattccaacccctggtgtccatttggttggaatccatgatgataatgatatggtatcctttgtgcgatctgaagattatcttgtccacatcggaacagatgttgaaattgctcttgatgaggcccgtgtgttatataacatggacagtgatgatgaagagtggatatcaagccggcagaaattcttagtaagagacaacaacgccacacttgagttggcagaagatttgtttgagagggttatggacaaactagagaagtttgcatatagccacgactctaatgaactcagcattgttcagatgaaggaactggagactgatgacctacctctggacattattgaagtgatacatgcatattggcaagctaagaggcagaaaaagggaatgccacttattcgacatttccagttcgctatgtggaaggtctacgagcaacagttacatgaatgggaatcgaaagtatgcagaatgcagggttcatcaaatgggtaccaaggaaaaaaaatgcctcccaagcctgcattgtttgccttctgtttgaggcctcgtggactcgatgtaccatacaagggaccaaagcagcgttctcataagaagcttatgtctacaggctgccatagcttttcaagacagcatgatggcttttaccggcaagtatcaggtaggagatacaatgaatgcactgtggatgggcggatatgcgaattatatgacattggttctctttattccctaacagggtactctcccaggttctctacaagaacaggttctcttcgggcatttgagtcctcggaaagttctacaccaagatttttcaggacaaatattgtcaaaaggagtgcaaccgttgctttctctgatgatcaccagccgtcgccttccttccgccctcagagagttaaacggagcgcatctgaccattggaacactgtcattcatgactggcagaactcaaagcatctctttccgggctcgccccctgttgatattgaggagctcaaactgcgggatgctgcaagcgcagcacagcacgctgctgccatggcgaagctcaagagggaaaaggctcactgcctgatgcagaaggctgaccttgccctccataaggccacggtagccctcatgattgctgatgcaatcaaatcttccagcaggaacaagtctcgggattgccgaaggggatttgatgaatgaggaacgctgacttttttttgccttttgccgcgagcccttggcgtatacacacaacttgaactcgatgcttttgctgatgatgggagcgtgtttgcttatctaatgatcgagtcattagatagcatcccttccccccttctcccccctccccctcctttgcgtctcctgtacataggtttcttttcatcattcttttgtgctcttttacctcccgattaacatattgcccggtgatgaatgggccaggtcaccaggatgtaggttagcaatctggcgtgttgtctgaacagcggctagggaagtggcgctttacggagggttatggtcctgttgttgcactgtgatgcctttacgacattgcatattctagaaggagcacatggcatatcgtgggtcagtgggagcagtgccacatgacccctctgggtcataaataatctatttccgatggctcataggttgtgttcgatgacctaagccgtcggaaattttattgtggtcaacatatagtactcattggaattctggaggaacttgaacatgaggtccaacaacctcttagatatattttcgattccttgtgtgttctccaaatattttgcatccaataaacttacaaacactttcttaaaaatttccatgttttctcgatccctgtaggtgctgcgacatatgtttgcctggtcctacgtatcg

SEQ ID NO: 215949 - DNA, 5803 bp, Zea Mays
ggacagttagctgtaacctacctttccccgctcttcatcggcaaaaaagagggggaaaaaaaacgaaccctgaagaggagagggaaaaaactcgagaaaagcaaaccctaggttgccatgtcatcgacgacatcctaattcgccgcattgcatcgcccaggcaaggggcttttggcacaggtcggcgctcccctgtcatcggattcgattcccctgctcaatttgccgccgatccgtggttcggatcttctcgccgctcggcgactgtcgcgccattttttctctcgatccgtctgcgagacactaagcgcttcgccgacggtcgaccctgctgacgccaccggcgccaggtggcttgtcgcctactctggtccgccaaccgacgcttgatgcctccagggctccaaaggattgctgatgagatcgaaactgtttctgttaatttatcgtggattcaactgaacccccatgctccacgcaaccgcccctggtctgggtcgaaactctacatatgatgggaggtgaaattctgaggaattatgttaacttgattcgtgggctcgtgaatggaacccagtggcagtgataaacccactgcaacagatgctaacgaatcagtggtgggtttagatggtgaggacactttgtctgagagggaatctgttggagcaaaagatggacctgccttgcctaatgggagtggaaaggaggctcatgcaagcagtccatctgcggcgaataagaggaagcacaacgacttgggttctaatcaaatggaactcaatgaaccagggacgccaagttccagctcaggtgattccacatggagcataaatggtctcgatgactgtcaccaactctcattgtctagaaataagaacgacgactctgaacattcggttacttcagctggagttacagtgatcaggcagcctcgtggcgtcttgaggttaagaaagctggctcagaatgttagtactgagagttggactggtggtcataatacttcacaagctaatggagttcctaggtcttcccaacacccgaggcggaacaataagagggaatcaattccgtcccaggagaatagagttagtggtgatgaacctgtcagctgcttgaggactgagaatggtacttgtgatcaggataccggcaccaagttctgttccaaaactgagttcttagctgaaaagcagtcacatctttcaggcgaacccccaaaagctgttcatgttgacaagggtgtctatgattatgtcaaagacgatgatggtgatagtttggaagaaaatgctgcctggatgctctgttctttatcagataacaaatgtgctggatcaccaaggaagggaactgataggttgtcaaagagatctttttctcagaattcaaaccattttaagaattcatatgaaaaaatcaaggatatatgtagtcctgctaggttgctgcggaagcgtgatggcaaagttccgttcttgaagcgtcgtcagcgtcggcatttttatgaagtcagccctagcgatgtggatccattctgcattgttaaagagaggatcagggttttttggcctcttgatgagacttggtactttggcatggtcaaggaatataatccggtcacaaggttacatcatgtcaggtatgatggtaaggatgaagaatggatcaaccttcaaaatgagaggattaaacttctgtttttaccagcggaagctcccaataaatctaaatgcaccaactcaaggtcagcgtttgagtcgaagcatgaacagggtgacagagaagacatgcatagaagcggaagcaatacagagagttttgagtcaggtcccatcagctcatggttggctcgatcaaaccaagcaaaatctgctgcactttgtgacatcaacaagcaagatcacagtcattccaatactgttccagtttcatttgaccaaaaacagtgtcgtgcttctgatgccaaggaatctattgattctgcaccatgtagttcacttgcaaatgggggtgtagaggttctcaaggataggaccatacctgaggacgggaggtttcactttgtttattctaggaagcgattttgcagaaaaaagaatgattttcttagcatttccgaacagcattctaattgccaaagaagagcaagttctatggttcttgcttcttgtcctgatatgaaatctagtattgcaactggtgcttcagttacatatgtcatacctgcattgagcctcccactgaaacctgtttataagttgctttgtgaagcctgttgtgtttcggtttccaatgctttctttcttcttcaatgtggtacaatggttgccttatggcctgttgtacatctggatatacttcttattgatagtgctttaggcttgaaacgtttccttcttgacacatgcatgagatcggcagtatcacttttctgtttacttgctggaagctttaagcagtgttctaggcagagaactaccaaggaatcaagaataccttgtacttcagtcagatttcagatatctggtgggcatggtagaagccaagtagtgtttatgtttttcagctttgttggtgtagagaaatggaaatgggaacaccttcaaggaaagcttcaatatcaatgttccaaaagggagttgtctaaagattccacaaaatgtacaggtcgaagagctcttccttcaatgggtctcttctctaagggttttgatgttcaagagtctgtctttcttccagagtctaattattcagatatcaaacctgccatttgttgtttggatgaccggtgtaaattcactcaaagttttctggacatgacaactgcaccttcagtactgctttggcaccatagaaaaatgttaatggaaagcaattcgactaatggttctcagcaatccatgtcatgtgctttggatgaggatcatcagcagttggtaacagaacatgcatctgatacagtttgtcatgctccacttcaagtttgttcacttaatcttggttcatcaccttatagtccattggatatggtctctgctagttgtgcaaatccatctagctctactagtagggaacccaagattactgaaaggaatataagcccagaatgtaatgacaacagtattgatgatgcaatataattgacataaagtttcgagatcaaaatgagccttgtattggtgctgataggccatgttcctccaaccttagtgttatttgctcttcacagaagtttgcagaggatcgtatttccatcaatattcctcaagacaaagcaattgatgcaacaaatgataaacctcttgacaaagatgaaaaagaaaagcatcctatatctaacttggttcaggaattgaatgaacatccaattggtcgtgttacaccaactgcccccagaactacttcccatcggaaccggtttacgtctatatcacgtgcttttggagatggttcaaagttactgccagaagaccacatgttgactggcttcgctagtggttctaagaagccacgaagtcaagtttcatactcaggttctcctagaagtgaggaacttggcttaaaaaacaaagatcatttccgcaagatacaatctcatgtcagtgttaagacaagtgatgcaaaaaaacttcctgatagttctagaagtgggcatagcagtccagagctattgacttgcattgcaaatgttcttgttacagtgggtgatagaggttggagggagtatgatacccagatcacaatggattctgatgttcacagtgaacagaggatatgcgtgaaacttgctgaagggaccaagtatgctcacaaggtctgtcaagttttgcagcctggggccacaaaccgctatacacatgccatgatgtggaagggtggggctgagtggtgcctggaatttcctgacagaagccagtggttgattttcaagcaaatgcatgatgagtgctatagccataacatcagagctgcttctgtgaggaacattccaacccctggtgtccatttggttggaatccatgatgataatgatatggtatcctttgtgcgatctgaagattatcttgtccacatcggaacagatgttgaaattgctcttgatgaggcccgtgtgttatataacatggacagtgatgatgaagagtggatatcaagccggcagaaattcttagtaagagacaacaacgccacacttgagttggcagaagatttgtttgagagggttatggacaaactagagaagtttgcatatagccacgactctaatgaactcagcattgttcagatgaaggaactggagactgatgacctacctctggacattattgaagtgatacatgcatattggcaagctaagaggcagaaaaagggaatgccacttattcgacatttccagttcgctatgtggaaggtctacgagcaacagttacatgaatgggaatcgaaagtatgcagaatgcagggttcatcaaatgggtaccaaggaaaaaaaatgcctcccaagcctgcattgtttgccttctgtttgaggcctcgtggactcgatgtaccatacaagggaccaaagcagcgttctcataagaagcttatgtctacaggctgccatagcttttcaagacagcatgatggcttttaccggcaagggtactctcccaggttctctacaagaacaggttctcttcgggcatttgagtcctcggaaagttctacaccaagatttttcaggacaaatattgtcaaaaggagtgcaaccgttgctttctctgatgatcaccagccgtcgccttccttccgccctcagagagttaaacggagcgcatctgaccattggaacactgtcattcatgactggcagaactcaaagcatctctttccgggctcgccccctgttgatattgaggagctcaaactgcgggatgctgcaagcgcagcacagcacgctgctgccatggcgaagctcaagagggaaaaggctcactgcctgatgcagaaggctgaccttgccctccataaggccacggtagccctcatgattgctgatgcaatcaaatcttccagcaggaacaagtctcgggattgccgaaggggatttgatgaatgaggaacgctgacttttttttgccttttgccgcgagcccttggcgtatacacacaacttgaactcgatgcttttgctgatgatgggagcgtgtttgcttatctaatgatcgagtcattagatagcatcccttccccccttctcccccctccccctcctttgcgtctcctgtacataggtttcttttcatcattcttttgtgctcttttacctcccgattaacatattgcccggtgatgaatgggccaggtcaccaggatgtaggttagcaatctggcgtgttgtctgaacagcggctagggaagtggcgctttacggagggttatggtcctgttgttgcactgtgatgcctttacgacattgcatattctagaaggagcacatggcatatcgtgggtcagtgggagcagtgccacatgacccctctgggtcataaataatctatttccgatggctcataggttgtgttcgatgacctaagccgtcggaaattttattgtggtcaacatatagtactcattggaattctggaggaacttgaacatgaggtccaacaacctcttagatatattttcgattccttgtgtgttctccaaatattttgcatccaataaacttacaaacactttcttaaaaatttccatgttttctcgatccctgtaggtgctgcgacatatgtttgcctggtcctacgtatcg

SEQ ID NO: 215950 - DNA, 3802 bp, Zea Mays
gagactgatacacgctcagtcgcttacggctcacccaagaccaagaaccccgggcggacgaaaagatgggcgccgatgccgcacgcacgccggcgccgcacgcgctgctgctcccttacccagcgcagggccacgtgatcccgttcatggagctggccgaccgcctcctcgaccgcggcttcgccgtcaccttcgtcaacaccgagttcaaccaccgccgcgtcgtcgtggccgccggcggcggccgggcgcccgatggccggctgcggctcgtgggtgtcgctgacgggatgggcgacggcgaggaccgcgacaacttcgtccgcctcaacgcctgcatgaaggaggccatgccgctgcggctcgacgcgctcctcgacgccgacgacgagcgcctcggcagggtcacgtgcgtcgtggtcgacgtcggcatgtcgtgggcgctggacgcggtcaagcggcgtgggctcccggccgccgcactctggcccgcgtcggcggccgtgctcgccgtcctgttcggcgccaagaagctcatacgcgatggcgtcatcgatgacgacgaatggtgcgcgtgcgtgcaggagctccagtgaagcaggagaaccactcgttccggctggccgagtcgatgccccccatggacgccgtcttcctggcgtggaactacatgggcaaccgcgacgtcgagcgcatggtcttccactacctgaccaccaccgcgtgggccgccgtggctaaggcggacgtcgtcctctgcaacaccttcgaggacctcgagccggacatcttcggcgcccactccccggcggccgcctccatcctcccgatcggcccgctgcgcacctgccagcgccggacgagcgaggcgccggccgggcacttttggcgcgccgacgacgaggcctgcgcgtccttcctggacgcgcagccccgtgggtccgtgacgtacgtggcgttcgggagcctgacggtcatgagccccgcgcagctccaggagctcgcgctggccctgctggcctccgcccgccccttcctgtgggtgttccggccggggctggcggccgagctcccgcccgcgttcacggatctcctgccacgccatgcgaggggcaaggtggtggagtgggcgccgcaggagaaagtgctcgcgcaccctgctgtcggctgcttcctgacgcattgcgggtggaactcgacgctggagggcgtccgccatggcgtgcctttgctttgctggccctacttcaccgaccagttcacgaaccaggcatacatttgtgatatctggaaggtggggttaagggtggtgcccgacggcggtgatggcattgtcgccaaggaaaggatcatggagaggttgacgagcctaatgggtgacagtggtgtgaaggaaagggtgaaaagattgaaggaattggcagagaggagcatggggcctgagggcaaatctttgaagaacatcaacgccttcatggaatccatgacgaagcgatctccggtccttgcccctcgtcacctcgtggtgggtcattggatcactgcttcctgcaacctccaaccgggcgggcgcgggccactggaccagcgacacatccggggagaagaaagctcggaggatccgaacgacgctgacggcgaggccgtaaccgcagagcagcggttgttgggatctcctgctcctggtcctggatgctggcacttgaattccagcatgaggtcaaagaagatatttggtttatcaatttcccttgtactcatcaacctagcttctatattggaacgagctgatgagaatctcctcccagctgtttacaaggaagtgttcttgctcttcactatgaccgccctgcagtgcttgcgatagggactgcgttctgggctttgtcaacgggggctgttggtgtcagccagtattttgggcaggttgcattctggagagctattaatggtgttgggcttgccattgtaataccagctcttcaatccttcattgctgatagttacaaagatggcacacgtggagcgggatttggtttgctatcacttattggttcagtaggtgggataggaggtagtgttttggcaaccatcgtggctggaggggattattatggttttccaggatggcggcttgcatttatatctgttgcatttgtgagcttcttaattggacttcttgtatacctttacactgttgatcctaggaaattatctccaagccattttggcggtggtgaggacaatgagaggtatggtcttttgattttttttttagggaaaagctcttatcttgcctattcatattttaaaagataaattacactgagttttatgtggaaggcgtagtagtattactgcatattcttcttatcagctataaaagtttcatctgagtgaaagatttatgaaagtatgttttttattcctagttgatctcgtggatgactaccaatggaattgtatatttgcatatcattgtaataatacaatcttaaataaatggcaggttacatttggtcagcaatggtatccttcctccacattccatctggaaggattcgtggatagcggcgagatccgtaatgaaagttcggacctttcaaatcattgtgttgcaaggcattgttggctctttaccatgggctgctgtagttttcttcaccatgtggtttgaactcattggtttcgacaacagcagctcagcggcgctgaatagctttttcgctattgggtgcgccagtggatcatttctgggtggtgtgatagcagatgtcttatctagatactatccagattctgctcgcgtcatgtgcgctcagttcagcgccttcatgggcatccctttttcatggatcctcctcacagtcattccccagtctgttgattactggtctgcctatgccgtcacactctttttaatgggaattaccataagctggtgcgctacttgtgcaaacaaccccatgttcgcagaggtagtccctcccaagcaccgcacaatgatctacgcctttgaccgcgcatttgagggttcatttggctcgcttgctgcacctgctgttggattagtgaccgaaaagatctatggctacaatgcaaaggccgtcgatctatcacatggatcagtggatggagcttatgcactctctagaggtctattgactatgatgattgtcccttttgctctgtgcctcatgttttacaccccactgtatacagtgttcaagcgtgaccgagaaaatgctagattggccagcatcaaggagcaggaacttacttgaaaagctttctaacaaggagtactgatgtagtttggattactatagtctacaacaccgccaacctggaggttttgattgaagtactttggttgatgtctaggatactcaggttttatgtttcttcagtcggatatcatttaagagtacacattttgtacacaagcgatagattgtttgatctcgtcgtatgtaactggttcagtatacattcggacctcaacctggagagtggagagaggatgttgcagctttccattgaactttcagcatatagatacagttctttctcgttttgttactatttacggtctgtaatcttgttttgaactgcctgaaccatcacgtcattccaatgatgatgacatttgcagaactcttgtaccagtttcagtttatatcattataagatcaacgcttttctgacagtgtgcatgtgttcagcacagtgaagtactgaaaactttgaattattttgcttcagcgggcctctaaattcctgtaactcaaattacctatct

SEQ ID NO: 215951 - DNA, 3133 bp, Zea Mays
gagactgatacacgctcagtcgcttacggctcacccaagaccaagaaccccgggcggacgaaaagatgggcgccgatgccgcacgcacgccggcgccgcacgcgctgctgctcccttacccagcgcagggccacgtgatcccgttcatggagctggccgaccgcctcctcgaccgcggcttcgccgtcaccttcgtcaacaccgagttcaaccaccgccgcgtcgtcgtggccgccggcggcggccgggcgcccgatggccggctgcggctcgtgggtgtcgctgacgggatgggcgacggcgaggaccgcgacaacttcgtccgcctcaacgcctgcatgaaggaggccatgccgctgcggctcgacgcgctcctcgacgccgacgacgagcgcctcggcagggtcacgtgcgtcgtggtcgacgtcggcatgtcgtgggcgctggacgcggtcaagcggcgtgggctcccggccgccgcactctggcccgcgtcggcggccgtgctcgccgtcctgttcggcgccaagaagctcatacgcgatggcgtcatcgatgacgacggagctccagtgaagcaggagaaccactcgttccggctggccgagtcgatgccccccatggacgccgtcttcctggcgtggaactacatgggcaaccgcgacgtcgagcgcatggtcttccactacctgaccaccaccgcgtgggccgccgtggctaaggcggacgtcgtcctctgcaacaccttcgaggacctcgagccggacatcttcggcgcccactccccggcggccgcctccatcctcccgatcggcccgctgcgcacctgccagcgccggacgagcgaggcgccggccgggcacttttggcgcgccgacgacgaggcctgcgcgtccttcctggacgcgcagccccgtgggtccgtgacgtacgtggcgttcgggagcctgacggtcatgagccccgcgcagctccaggagctcgcgctggccctgctggcctccgcccgccccttcctgtgggtgttccggccggggctggcggccgagctcccgcccgcgttcacggatctcctgccacgccatgcgaggggcaaggtggtggagtgggcgccgcaggagaaagtgctcgcgcaccctgctgtcggctgcttcctgacgcattgcgggtggaactcgacgctggagggcgtccgccatggcgtgcctttgctttgctggccctacttcaccgaccagttcacgaaccaggcatacatttgtgatatctggaaggtggggttaagggtggtgcccgacggcggtgatggcattgtcgccaaggaaaggatcatggagaggttgacgagcctaatgggtgacagtggtgtgaaggaaagggtgaaaagattgaaggaattggcagagaggagcatggggcctgagggcaaatctttgaagaacatcaacgccttcatggaatccatgacgaagcgatctccggtccttgcccctcgtcacctcgtggtgggtcattggatcactgcttcctgcaacctccaaccgggcgggcgcgggccactggaccagcgacacatccggggagaagaaagctcggaggatccgaacgacgctgacggcgaggccgtaaccgcagagcagcggttgttgggatctcctgctcctggtcctggatgctggcacttgaattccagcatgaggtcaaagaagatatttggtttatcaatttcccttgtactcatcaacctagcttctatattggaacgagctgatgagaatctcctcccagctgtttacaaggaagtcagtgctgctttcgatgccggtcctactgatctggggttacatttggtcagcaatggtatccttcctccacattccatctggaaggattcgtggatagcggcgagatccgtaatgaaagttcggacctttcaaatcattgtgttgcaaggcattgttggctctttaccatgggctgctgtagttttcttcaccatgtggtttgaactcattggtttcgacaacagcagctcagcggcgctgaatagctttttcgctattgggtgcgccagtggatcatttctgggtggtgtgatagcagatgtcttatctagatactatccagattctgctcgcgtcatgtgcgctcagttcagcgccttcatgggcatccctttttcatggatcctcctcacagtcattccccagtctgttgattactggtctgcctatgccgtcacactctttttaatgggaattaccataagctggtgcgctacttgtgcaaacaaccccatgttcgcagaggtagtccctcccaagcaccgcacaatgatctacgcctttgaccgcgcatttgagggttcatttggctcgcttgctgcacctgctgttggattagtgaccgaaaagatctatggctacaatgcaaaggccgtcgatctatcacatggatcagtggatggagcttatgcactctctagaggtctattgactatgatgattgtcccttttgctctgtgcctcatgttttacaccccactgtatacagtgttcaagcgtgaccgagaaaatgctagattggccagcatcaaggagcaggaacttacttgaaaagctttctaacaaggagtactgatgtagtttggattactatagtctacaacaccgccaacctggaggttttgattgaagtactttggttgatgtctaggatactcaggttttatgtttcttcagtcggatatcatttaagagtacacattttgtacacaagcgatagattgtttgatctcgtcgtatgtaactggttcagtatacattcggacctcaacctggagagtggagagaggatgttgcagctttccattgaactttcagcatatagatacagttctttctcgttttgttactatttacggtctgtaatcttgttttgaactgcctgaaccatcacgtcattccaatgatgatgacatttgcagaactcttgtaccagtttcagtttatatcattataagatcaacgcttttctgacagtgtgcatgtgttcagcacagtgaagtactgaaaactttgaattattttgcttcagcgggcctctaaattcctgtaactcaaattacctatct

SEQ ID NO: 215952 - DNA, 3813 bp, Zea Mays
cacaccgctatattacgcagcttcccagatagagactgatacacgctcagtcgcttacggctcacccaagaccaagaaccccgggcggacgaaaagatgggcgccgatgccgcacgcacgccggcgccgcacgcgctgctgctcccttacccagcgcagggccacgtgatcccgttcatggagctggccgaccgcctcctcgaccgcggcttcgccgtcaccttcgtcaacaccgagttcaaccaccgccgcgtcgtcgtggccgccggcggcggccgggcgcccgatggccggctgcggctcgtgggtgtcgctgacgggatgggcgacggcgaggaccgcgacaacttcgtccgcctcaacgcctgcatgaaggaggccatgccgctgcggctcgacgcgctcctcgacgccgacgacgagcgcctcggcagggtcacgtgcgtcgtggtcgacgtcggcatgtcgtgggcgctggacgcggtcaagcggcgtgggctcccggccgccgcactctggcccgcgtcggcggccgtgctcgccgtcctgttcggcgccaagaagctcatacgcgatggcgtcatcgatgacgacggagctccagtgaagcaggagaaccactcgttccggctggccgagtcgatgccccccatggacgccgtcttcctggcgtggaactacatgggcaaccgcgacgtcgagcgcatggtcttccactacctgaccaccaccgcgtgggccgccgtggctaaggcggacgtcgtcctctgcaacaccttcgaggacctcgagccggacatcttcggcgcccactccccggcggccgcctccatcctcccgatcggcccgctgcgcacctgccagcgccggacgagcgaggcgccggccgggcacttttggcgcgccgacgacgaggcctgcgcgtccttcctggacgcgcagccccgtgggtccgtgacgtacgtggcgttcgggagcctgacggtcatgagccccgcgcagctccaggagctcgcgctggccctgctggcctccgcccgccccttcctgtgggtgttccggccggggctggcggccgagctcccgcccgcgttcacggatctcctgccacgccatgcgaggggcaaggtggtggagtgggcgccgcaggagaaagtgctcgcgcaccctgctgtcggctgcttcctgacgcattgcgggtggaactcgacgctggagggcgtccgccatggcgtgcctttgctttgctggccctacttcaccgaccagttcacgaaccaggcatacatttgtgatatctggaaggtggggttaagggtggtgcccgacggcggtgatggcattgtcgccaaggaaaggatcatggagaggttgacgagcctaatgggtgacagtggtgtgaaggaaagggtgaaaagattgaaggaattggcagagaggagcatggggcctgagggcaaatctttgaagaacatcaacgccttcatggaatccatgacgaagcgatctccggtccttgcccctcgtcacctcgtggtgggtcattggatcactgcttcctgcaacctccaaccgggcgggcgcgggccactggaccagcgacacatccggggagaagaaagctcggaggatccgaacgacgctgacggcgaggccgtaaccgcagagcagcggttgttgggatctcctgctcctggtcctggatgctggcacttgaattccagcatgaggtcaaagaagatatttggtttatcaatttcccttgtactcatcaacctagcttctatattggaacgagctgatgagaatctcctcccagctgtttacaaggaagtgttcttgctcttcactatgaccgccctgcagtgcttgcgatagggactgcgttctgggctttgtcaacgggggctgttggtgtcagccagtattttgggcaggttgcattctggagagctattaatggtgttgggcttgccattgtaataccagctcttcaatccttcattgctgatagttacaaagatggcacacgtggagcgggatttggtttgctatcacttattggttcagtaggtgggataggaggtagtgttttggcaaccatcgtggctggaggggattattatggttttccaggatggcggcttgcatttatatctgttgcatttgtgagcttcttaattggacttcttgtatacctttacactgttgatcctaggaaattatctccaagccattttggcggtggtgaggacaatgagaggtatggtcttttgattttttttttagggaaaagctcttatcttgcctattcatattttaaaagataaattacactgagttttatgtggaaggcgtagtagtattactgcatattcttcttatcagctataaaagtttcatctgagtgaaagatttatgaaagtatgttttttattcctagttgatctcgtggatgactaccaatggaattgtatatttgcatatcattgtaataatacaatcttaaataaatggcaggttacatttggtcagcaatggtatccttcctccacattccatctggaaggattcgtggatagcggcgagatccgtaatgaaagttcggacctttcaaatcattgtgttgcaaggcattgttggctctttaccatgggctgctgtagttttcttcaccatgtggtttgaactcattggtttcgacaacagcagctcagcggcgctgaatagctttttcgctattgggtgcgccagtggatcatttctgggtggtgtgatagcagatgtcttatctagatactatccagattctgctcgcgtcatgtgcgctcagttcagcgccttcatgggcatccctttttcatggatcctcctcacagtcattccccagtctgttgattactggtctgcctatgccgtcacactctttttaatgggaattaccataagctggtgcgctacttgtgcaaacaaccccatgttcgcagaggtagtccctcccaagcaccgcacaatgatctacgcctttgaccgcgcatttgagggttcatttggctcgcttgctgcacctgctgttggattagtgaccgaaaagatctatggctacaatgcaaaggccgtcgatctatcacatggatcagtggatggagcttatgcactctctagaggtctattgactatgatgattgtcccttttgctctgtgcctcatgttttacaccccactgtatacagtgttcaagcgtgaccgagaaaatgctagattggccagcatcaaggagcaggaacttacttgaaaagctttctaacaaggagtactgatgtagtttggattactatagtctacaacaccgccaacctggaggttttgattgaagtactttggttgatgtctaggatactcaggttttatgtttcttcagtcggatatcatttaagagtacacattttgtacacaagcgatagattgtttgatctcgtcgtatgtaactggttcagtatacattcggacctcaacctggagagtggagagaggatgttgcagctttccattgaactttcagcatatagatacagttctttctcgttttgttactatttacggtctgtaatcttgttttgaactgcctgaaccatcacgtcattccaatgatgatgacatttgcagaactcttgtaccagtttcagtttatatcattataagatcaacgcttttctgacagtgtgcatgtgttcagcacagtgaagtactgaaaactttgaattattttgcttcagcgggcctctaaattcctgtaactcaaattacctatct

SEQ ID NO: 215953 - DNA, 2264 bp, Zea Mays
cttgcttccacgcttcgcataaggcttgcttgaacagcagtcttttcccttggtcagtattttgcagctaaaaggataattcacatttgttgctatcaaggtttttgaaagttttatatgattcagagaaatatatattcttcggctagtgggtctgctcattgatggaaggcaaccagattttggtccagtcagagcagagccttataccaggtgtgcaaactcttgtcatcggtcaagagtttgcagatgttgacacttgtcggagggctgtcaaggacatggccattgctttgcactatgagctccgtgtggtgaaatctgatcgtagccgtttcatcgcaaagtgctcaaaagaaggttgcccttggcgtgtgcacatcgctaagtgccctggtgttccaactttcactgtcaggactttgcatggggaccacaaatgtgagggtgttctgaacctgcatcatcagcaggctactgttggttgggttgctaggtctgtcgaggcaaggctcagggataaccctcagattaagccaaaggagatactgcaggatattcgggagcagcatggtgtcgctgtttcttatatgcaggcatggcgtggaaaggagagaagcatggctgcagttaatggtactcttgaggatggataccgccttcttcctgcatactgtgagcagattgttaagacgaatcctggtagcgtcgcaacatatggaggtattggaccagggaatgccttccagcggctgtttgtctcgtttcatgcatccatttatggtttcttgaatgggtgcaggccccttctagaaattgacaaggctgacttgaagggaaagtatcttgggacattgctttgtgcttcagctattgatgctgatcacatgatgttccctctagcatttggtgttgttgattctgagagtgatgataactggaattggtttatatcggaattgaggaagatgcttggagttaacacagataagatgccggtcttgactatactttctgagagaaagcggcaagtggttaaagcagttggatctaatttccccactgcttttcatggtttttgcctgagatacgtgagcgagagtttccttgacgagttcaagaatactaaactgcttaaccttttctggagtgctgtttatgctctcacagcatcagaatttgatgcaaaggtaaatgaaatgatgcgagttcaagatgtcatgccatggttacagcgtttcccaccaaacctgtgggcagtctcttgctttcagggtatcagatacggccattttagtcttgggataaccgagatattgtacaacttgtcgcttgactgtcacgaacttcccatcgtgcaggccatcgagcacataaggcaccaactgacttgctggtttgctgagcgtcagaacttggcacagtcatacaactcagttcttgttccgtcagctgagaaacttgtttcagaagccatccatgactcgcagtgctaccaggtccttcgagcaaacaaggtggagtttgagatcgtgtcgtcggagcggacaaacatcgtggacactgaagctaggtcctgctcatgccgccgatggcaaatctacggcattccatgcgcacatgctaccgccgcgctgctttcgtgtggcgaagacccgcgcttctatgctcatgactgcttcagtgtaatgaagtaccgagaaacatattcgcagccaatacatccaattccagacaggagccactggagcaattcttctcccgggttacaaggtgtggccagcaaggccgatgtgatgatgctcagcccacccaatatccggaggcctcctggtcgacccaagatgaagattctaaagatcgagagcatgaagcggccgaaacggatcgttcagtgtggacgatgtcatcttgtagggcattctcaaaagaagtgctctctgcgaagctgtgactcgtatccacattgatgtaccctgaacttcgttttattgataatttaggaatttcattcttgcttgttcgtatcaggtgcaggtagttctcttatggaagtgctactgtagttgctctgcctctgaaaccatgtcgacgttgagtctatgatggcactggaagtgtctatacgcaagccgccgtttcaggtcaaccacaatctgtctgtttctttttaatgatttttgcagttatggttctatacttctatttacgatctagtgacccctgatctagggttcagttcaagaattttagttatgttatag

SEQ ID NO: 215954 - DNA, 1992 bp, Zea Mays
gtcagtgatgctatttttttttttttttggtcagtattttgcagctaaaaggataattcacatttgttgctatcaaggtttttgaaagttttatatgattcagagaaatatatattcttcggctagtgggtctgctcattgatggaaggcaaccagattttggtccagtcagagcagagccttataccaggtgtgcaaactcttgtcatcggtcaagagtttgcagatgttgacacttgtcggagggctgtcaaggacatggccattgctttgcactatgagctccgtgtggtgaaatctgatcgtagccgtttcatcgcaaagtgctcaaaagaaggttgcccttggcgtgtgcacatcgctaagtgccctggtgttccaactttcactgtcaggactttgcatggggaccacaaatgtgagggtgttctgaacctgcatcatcagcaggctactgttggttgggttgctaggtctgtcgaggcaaggctcagggataaccctcagattaagccaaaggagatactgcaggatattcgggagcagcatggtgtcgctgtttcttatatgcaggcatggcgtggaaaggagagaagcatggctgcagttaatggtactcttgaggatggataccgccttcttcctgcatactgtgagcagattgttaagacgaatcctggtagcgtcgcaacatatggaggtattggaccagggaatgccttccagcggctgtttgtctcgtttcatgcatccatttatggtttcttgaatgggtgcaggccccttctagaaattgacaaggctgacttgaagggaaagtatcttgggacattgctttgtgcttcagctattgatgctgatcacatgatgttccctctagcatttggtgttgttgattctgagagtgatgataactggaattggtttatatcggaattgaggaagatgcttggagttaacacagataagatgccggtcttgactatactttctgagagaaagcggcaagtggttaaagcagttggatctaatttccccactgcttttcatggtttttgcctgagatacgtgagcgagagtttccttgacgagttcaagaatactaaactgcttaaccttttctggagtgctgtttatgctctcacagcatcagaatttgatgcaaaggccatcgagcacataaggcaccaactgacttgctggtttgctgagcgtcagaacttggcacagtcatacaactcagttcttgttccgtcagctgagaaacttgtttcagaagccatccatgactcgcagtgctaccaggtccttcgagcaaacaaggtggagtttgagatcgtgtcgtcggagcggacaaacatcgtggacactgaagctaggtcctgctcatgccgccgatggcaaatctacggcattccatgcgcacatgctaccgccgcgctgctttcgtgtggcgaagacccgcgcttctatgctcatgactgcttcagtgtaatgaagtaccgagaaacatattcgcagccaatacatccaattccagacaggagccactggagcaattcttctcccgggttacaaggtgtggccagcaaggccgatgtgatgatgctcagcccacccaatatccggaggcctcctggtcgacccaagatgaagattctaaagatcgagagcatgaagcggccgaaacggatcgttcagtgtggacgatgtcatcttgtagggcattctcaaaagaagtgctctctgcgaagctgtgactcgtatccacattgatgtaccctgaacttcgttttattgataatttaggaatttcattcttgcttgttcgtatcaggtgcaggtagttctcttatggaagtgctactgtagttgctctgcctctgaaaccatgtcgacgttgagtctatgatggcactggaagtgtctatacgcaagccgccgtttcaggagcaaaaatgagatcctagaaagtcaaagagcaacagccag

SEQ ID NO: 215955 - DNA, 2524 bp, Zea Mays
gtcggtgcagcaggggccctgcctgtcgttgcggctgggcctgggcgtatggccaaaatgaacggaaccctttgttttccggcgacagaccccacggcaccgcacctgctcggcacgtcccgctatataaccgcttgaagttcttccgccgccacgtgctcgctgccgtcgccgcgccgcattcgcatcaccgcatcgcgccgccgaggctgcttactagacggacgaggagtggactggagtaacttgcagcaaccctatcccggcaggccccatcgcgaaaccctagacttcgccgccggcggtcgccggagatggcctcctcgccgccgcgcgccccgcagctattccctttcgaccttaacgtcgcgcaggaggaggtagatgaggagccgattgaggttcttgaggaggatgtcgatgaggagggagccccgttggcgcagccccaggaggttgtcgtcgaggaggttgttgagaaattggtcgagcacgcggtgcctatcacggaggatgaacctgcggaagacgtgatcatggaggagccttcggaggaggtgatcatggaggacgaggagcctacgccgtcgccggcggaggaggtggttggggaggggaagaggaggaaaaagagggtggactatgaggtcttcgtgtccgggctgccgcaggacgccgctgaggaggacgtggcgcaggcgctggcggatgccggagatatcgaggaggtgcgcctcgtgcgggatccggcggaccagcggctcaacaagggattcgcttttgtccgcttcgcggctgcatggcaggcccggtgggcggccaacgacctccgcgaggctacgattaagggaaaagcttgtggaatatgcaagaacagtgaaactgaaacccttcatctccgaaatatatgctttgattggtcaaaggatgatttagctgaaaaactgaaacccttcaagttggaaaacttggatagaattaatctaattgagcacccagacagaaagggtaaaaacagaggctatgcgtttcttgacttcaggactcatgtagatgctgtggaggcttttgtgaaactacaaaaaatagatctgtatcttggtactgactctagagcaaacatatcattttcaaacactctttcacaagatgatgagatcatggaaaaggtgaaatctgttttcttggatggcgtaccacctcactgggatgaagacaaagtgagagaaattttcgggaaatttggtgaaattgatagcatacaacttgctagaaatatgttcacggcagcacgaaaagattttggtttcattggctttacagcaagacagtcagctttagactgcattaagatggtcaataaagatggtgttggtgaaggtagtggaaaggttcccataaaagctagtttacaaaggccaaggcatgctttcaagaagtattcccggcaaggctcaagttccttgctaggcgtcagaagaggatttgtagataaaagttctagtggtagaggacaccactcggacagatataggcattttagtcctgtaaggcgttcgtattcagataatcattctcgccgtcactctattgatgttgaagagaggcatacttctgtgcgaggatacagagcttactatagaagagactctccagtgcatgccccaagctataaatatggaaggacacatctggagaccagaatcagcgaagaatatactgagggaagatacactagtaaatatccaaaacacagacacacgatgcatggaaccatggagcgagatgcaaaccgcaggatcaagtatggacattcataccaggagagggcacatagaacttgcccaggttgtaagctgtgtggtcaaaattacaattaccccaatggtgaggaattttctgcaatcagcggttgtcaggaggcatactaccagacagaccatgatctgattccttcaacttctcaagtagcatctcattgcgagggttcttgctgcaagcttcttacaattgaaacctgcattcttcagaatcaagagtcaacacctagttcaagtgaccatgccagaacaagatctaatcttccagcgccgcctcatcattggcatgttaaacattctaatgagcatcggagggaaagccgaagctggtatctatcttccaaagatgctccaagtactcactccaggaagcaccataggccagcaagataagctgtaactgcaagatagagaaaatctagtagcagctcgcttctgatactgatggatagcatttgttaccggggccctgcttacgtggctgacaccctgttgcggggaggaatctgttccaaggacagcagtataccgtcccaatttataaccaaatactttgccttttctcggttctttgtattcgcgttcgatttctcgaaatgtggtgctgacaaatagggatgaaaacggaaactgtaatttttgaataacgggaattgtttttaaagtttaaccgaaatttaggtctaaacggaaatggaaacgat

SEQ ID NO: 215956 - DNA, 2560 bp, Zea Mays
gtcggtgcagcaggggccctgcctgtcgttgcggctgggcctgggcgtatggccaaaatgaacggaaccctttgttttccggcgacagaccccacggcaccgcacctgctcggcacgtcccgctatataaccgcttgaagttcttccgccgccacgtgctcgctgccgtcgccgcgccgcattcgcatcaccgcatcgcgccgccgaggctgcttactagacggacgaggagtggactggagtaacttgcagcaaccctatcccggcaggccccatcgcgaaaccctagacttcgccgccggcggtcgccggagatggcctcctcgccgccgcgcgccccgcagctattccctttcgaccttaacgtcgcgcaggaggaggtagatgaggagccgattgaggttcttgaggaggatgtcgatgaggagggagccccgttggcgcagccccaggaggttgtcgtcgaggaggttgttgagaaattggtcgagcacgcggtgcctatcacggaggatgaacctgcggaagacgtgatcatggaggagccttcggaggaggtgatcatggaggacgaggagcctacgccgtcgccggcggaggaggtggttggggaggggaagaggaggaaaaagagggtggactatgaggtcttcgtgtccgggctgccgcaggacgccgctgaggaggacgtggcgcaggcgctggcggatgccggagatatcgaggaggtgcgcctcgtgcgggatccggcggaccagcggctcaacaagggattcgcttttgtccgcttcgcggctgcatggcaggcccggtgggcggccaacgacctccgcgaggctacgattaagggaaaagcttgtggaatatgcaagaacagtgaaactgaaacccttcatctccgaaatatatgctttgattggtcaaaggatgatttagctgaaaaactgaaacccttcaagttggaaaacttggatagaattaatctaattgagcacccagacagaaagggtaaaaacagaggctatgcgtttcttgacttcaggactcatgtagatgctgtggaggcttttgtgaaactacaaaaaatagatctgtatcttggtactgactctagagcaaacatatcattttcaaacactctttcacaagatgatgagatcatggaaaaggtgaaatctgttttcttggatggcgtaccacctcactgggatgaagacaaagtgagagaaattttcgggaaatttggtgaaattgatagcatacaacttgctagaaatatgttcacggcagcacgaaaagattttggtttcattggctttacagcaagacagtcagctttagactgcattaagatggtcaataaagatggtgttggtgaaggtagtggaaaggttcccataaaagctagtttacaaaggccaaggcatgctttcaagaagtattcccggcaaggctcaagttccttgctaggcgtcagaagaggatttgtagataaaagttctagtggtagaggacaccactcggacagatataggcattttagtcctgtaaggcgttcgtattcagataatcattctcgccgtcactctattgatgttgaagagaggcatacttctgtgcgaggatacagagcttactatagaagagactctccagtgcatgccccaagctataaatatggaaggacacatctggagaccagaatcagcgaagaatatactgagggaagatacactagtaaatatccaaaacacagacacacgatgcatggaaccatggagcgagatgcaaaccgcaggatcaagtatggacattcataccaggagagggcacatagaacttgcccaggttgtaagctgtgtggtcaaaattacaattaccccaatggtgaggaattttctgcaatcagcggttgtcaggaggcatactaccagacagaccatgatctgattccttcaacttctcaagtagcatctcattgcgagggttcttgctgcaagcttcttacaattgaaacctgcattcttcagaatcaagagtcaacacctagttcaagtgaccatgccagaacaagatctaatcttccagcgccgcctcatcattggcatgttaaacattctaatgagcatcggaggcatgttactgatgcacattctgcttttgaggtcagggaaagccgaagctggtatctatcttccaaagatgctccaagtactcactccaggaagcaccataggccagcaagataagctgtaactgcaagatagagaaaatctagtagcagctcgcttctgatactgatggatagcatttgttaccggggccctgcttacgtggctgacaccctgttgcggggaggaatctgttccaaggacagcagtataccgtcccaatttataaccaaatactttgccttttctcggttctttgtattcgcgttcgatttctcgaaatgtggtgctgacaaatagggatgaaaacggaaactgtaatttttgaataacgggaattgtttttaaagtttaaccgaaatttaggtctaaacggaaatggaaacgat

SEQ ID NO: 215957 - DNA, 2818 bp, Zea Mays
atttttgcaagggcgggattcgaaatttgaagttcccttcccctcctcccgctagagtctggttgtgtgatccaggaaggggaagcgccgcccgctacgcttgatcaatagatccattcacccggggagattcccgaccgtgtgctcgtgtgtggagttgagttgtgatggaggccacctccccgcatcctcccaccaccatccgccggaacccaccccgccgcgcgaggcctcccccgaccccgctcgccggcgacaaatccaaaccctcccccctctcccgcctgctcgagggtgaagcagcgttcgccgcctccgttccctgtccaccgcaggaggagcgcctcaaggtgttcctccgcatccgccccctcccggaccgcgatcgaagccggccactccccgctgccaaggacccgcgccggaagcccaagcaggtcggagcccccggggagctctgcctcgcgcccgacggacccaactccgtcgtcctcaccgtcccgcggtctaagctagtcgaccccaagcgaggccgcaccgaggtcttcgacggcttctctgccgttttcccatccgactccacccagcatgatatcttcgcgcaagtcatgaacccactggtggatgacttcctgggcggaaagagtggccttctggttgcaatgggtcccacaggctctggaaagactcacaccatctttggttccccaaggaatcctggtatactacccctcacgctgaggagaatcttcaacgcacaaggcgaaagcaaggtttccaggaaaccaacgcggtcatttttcttctcgatgtttgagatattttctgagggaaaaggggaacgcattcttgacttactgtctgatactgtggagtgtgttcttcagcagtcagtgattaaaggtcttcaagaggtttccctttcaaatcctgcagatgctgagagcttggtttcacgtggtatgctaaagcgcagcacggctgcaacaaatgctaacagcaactcaagtcgatcacagtgcatcattactatacgtgcagacagtgaacatctacttagtagtgctgttctgaccatagcagaccttgctggcgcagaacgggaaaagagaactagaaatcaaggttcaaggctgttagaaagtaacttcatcaacaacacatccatggttttcagtctctgtttgaggtctctgttagaacatcagaaaaaccagaagaaacccttggaaaagcatttcaagaattccatgttgacaaggtacttaagagactacctagaaggaaggaagaaaatgactttgatcttgaatgtgaagccaggggatgatgattatttggatacatcatttttgcttagacaagcatctccttacatgaaaataaagtacactagtcttgatgattcttttgacctggcttcgcaaaagagaatcaatgtttccttgatttgccaagagaacaagaaaaaaaggaaggttcagaagcctgcagtccttgtggttgaacgaaaggaaaatgttgatacagatgatatttctaaagtttctgaaaaagatggcgtgcatcacgtgtctcttaacccagagatgccaagggtatccagaagcgaagcaataatgacaaactttgcaagggctttattgactgtattaagacaatataagcacaaacttttggagtccgagaatgctgttgaaagcatgaaagaattgattagagataaagatatcgaaatcatggagttgaaaaaggagctgaaggctgtaaggtattgttcatgcaagagttctccaataaatgaagatgactctgtggaccatgatgattcttcatcatttggtcaagctgctcagagtttagttaatatatcaaatcaagctgacctgggatctaatgatgcttcagaagataatttccatgtagagttacaagcgcttcataaggaatcagataaatctgaaagttttactgtgccaacacctgcacccactggtggtgcaatgcctgcatctagttattcagatcaaagcttcacagggcaaagtgatgaagaaacggaagagctgagtaagatcacactagagaataaggatattcagcttgatatcaatataagagaagagaagcaccatgaatcttgtagctcttcacagcaagtgaactttgacacagaaggtacccgctctagtgaggcttccttgcttggaacggttggttctgaaaagaagcttgaggaactgaagcagaaatctggaagatgtgtgtctgctgtagaaaaggctaacgtggaactggagcatggtatagacggtggtcaagctctagacgaaaagtgtgatcatgcctcagcgaaagctgcaaaggctcctccaagcaagggcagggaggcagacgaaactgcggatacagataaggaagcttttggttctaggacagagaaaaccaggaggaggttacagccagctgctgctatgttgctcagggaattcactggcgctgacattgatgcggataacgaaagggaagaaagaggcagatcatcgtccagcgtggcaaccgggagatcagatgcgcttgttcaacttctgatgaaaggccgtccggtccgtggattagcttcatgatagccggcaccgcatgacgtgacacatattatactgtttggttcagctttttttacctgcttttctgagagaatctagcgtagagaatctgagtatcattaagattacgtgtgtagaaagataaatgtgtccatatgactcaagatgtagaaattgacggatttctgctatttaatgactcaaccgattat

SEQ ID NO: 215958 - DNA, 1468 bp, Zea Mays
cactcacatgccatgctgccaatgccgcctcctgcctaccctggtcttccaataaatcaacctgctccccgacgcggcgaggctcggccatgcccgtgagctgtaggcgcacccggaggccgcagcacagcagccacggatgaggaggcctccaatcgtggcgcgcgtgcgccgctcgctcttcctcctcctctgctgctgttgctgcctcgccgcctggtcgtcgccgccggccgtgcgcgcactcccgctgtgcaccgacgggcgggcgccggtgccgctgaacaggacgctgggcttctgctccgcttacggcgggggcggcagcagtagcagctgctgcgacgccgcagcggacgccgcgctgcggaagaggttcaacgccatgaacatctctgacgcggcctgcgctggcgtcatcaagtctgtcctctgcgcggaatgcagtccattttcggctgagttgttcaactcaagctcaaagattcagatggttcctctcctgtgcaactatacttcttcatcaagttctgctcaatcaaaagattctacacgagattactgtaaactagtttgggagacttgcaaaaatgtgacaatagtgaactctcctttccaacctcccttgcaaggaagtgcaagactgcctagttcatcgtcaaagctcacagatgtctggcagtcagaacatgacttctgcacatcatttggtggctcatctggtgagcagtctttatgtttcaatggaaatggaattttcttcaacagcacagaaccatcacccacacctaaagggatatgccttgagagaatcagcaatggatcttatctgaacatggcttcacatcctgatggatccaacagagttttcttgtctagccaagctggaaagatatggttggccagcatcccagaacaaggctctgggggcactctacaatatgatgagaactcaatctcctaaatgtgctggtaggtgttcatgtaattctgatgctaactgtgatccgtcaaagctcggcactgataatggtgctcagccatgtcaataccaagttgttgtttcggagtattctacaaaaatctcctcacctaacgtttctatggcaacatctgccaatccatctgaggttagaaggatttttacaatgggactgccgtatatagctcaccatggagggcaaatactatttggaccaacagatggatacctttaccttatgatgggggatggtggaagtgaaggcgacccttttaatttctctcaaaataagaaatcacttttggggaaaataatgaggcttgatgttgacagcacacaaggtgtgcttgtcacctctgataccatgtaagattgtggaatgcttcttgtattgcatagggatagttacataaccgaatgggccggcagcccaacagtggtgccgacccacacacacagagtacacactgtctaacagttactatc

SEQ ID NO: 215959 - DNA, 443 bp, Zea Mays
acagtaacagcacacacgggatcaacgccagagctaccgctaccgccgccaccgacctccctagccgtgtcgcggcgggagcgcccgacgacggcccgcctggacctggcgcggtgccgttgtcggtcgccggtctctccgcggggcaggtgtagccgcagaggctgggcctgacgacgcggtacacgcccttgctcgccaggacgaagacgtccttgcggctgtcctccccgaacgagaagacgtacccgagcagcgggtccgtgctcccggcgacggactcgcagccgatcggggaggccttggagcagctcaccggcttcacggccgacgtgtagttcccgctcccctctggggcctccgtgcccgtccacatcagcgatgagtacaggtgctttgctgggcactagctgcagatgtaccttccgtacaagcaggggtca

SEQ ID NO: 215960 - DNA, 284 bp, Zea Mays
gttctccctaattctcacaggaagactcatgtggtcggaagagggctgatgagcacgatcaccatggatgtggacaccacgacaagggtagacgagttcttggttaccacctttgtaggcccattggtggaggagacttgacgagaggaccaatgaatgttctctcttttaagaatcttaataagccacgggagcaaagctggatagtatacataagtctgttcaccgtaaccaacaacagcggcctcaccgtcacgcaccgccaactgaagagcaaggtgtga

SEQ ID NO: 215961 - DNA, 1227 bp, Zea Mays
agtccatggcaggccagtcctcaagcctccacctcgacctacggcctgctgctgtctgttgggccgaacgggaggcacgaggcggagagcggagaggcgttccgttccatccaagctgatggcaacgagttctccagggcggcggcgcacgggcacctcctgcctaccagaaggcctccgcaccgagctcttctcatcgccaccatcaccagaaggcttccgcccctctctccagtgtctctttctctctccatcgcatggctctcgcgtgcgccactcacgcgcgccgcttcctcctcgctggcccggcgagatctttccacgcccagccctaccaggccaaggtcggcgtggtggagttcttgaacggcgtcgggaagggggtggaagcgcacgccgcgaagctggaggaggctgtgggcggcgacatgcagaggctcctcgaggcccgcacgctgcggctcaagaagcttggcatcccctgcaagcataggaagttgattttgagttttgctcacaagtaccgtcttggtctctggaagcctcaagcagaacccaggaaagttgaataaaattggtttgttcttgaaagctagtctactgttggactgaggcttgtttgggacattttgaatatttccttttgtaatttaggagccacaaatctttgttctctgtctctggccatacttatttgcatccattgtgcaattttttctagaaaatttccaacttcgcgtggaataacaaaccgcaacagacgcaacaaagtgaacactcgagcttggaagtttgtcctggttccagtgcggaaggacaagaaggtcatgtaacagacggctgtaaaacgaaaaatgcagtgcccgtttcattttaaatatgcatcacaagttgccttgtttttcagtgagaatatcttcagtgtaccatggtaaataggggttttacattgtagatgacattatttgcactttgcagtgtttgtagagtgaagattaaggtagtgtttggttgaagagctaagtagaacggaaccgttctgtcccagttttgttgttgtttggttacaaagtaactagaacggaatgactctaattagagaatattctcctcagatccggaaccattccgctccaaaaaatcaatgggacggagccgttccgttccaatcccgctctcacagtcacgctccgttccattcactctgcaaccaaacaaaaaacagaa

SEQ ID NO: 215962 - DNA, 1772 bp, Zea Mays
ctagtgtccagagaaacgcagaggcaaagcgtgcgcgacagaggaaatccatgtgcccggctcggccctgccacggtcagtagccccacgcccgcgcacccctccagtcctcaccaagatttgccaccaataacccccgtcgtcgactcgtcctcttccctcgccgcgagctccgggttcccctgcgcatagctaggccaagccaggtataccccaaccatcgcatgggagccgcgactgccccgacgaagcggagacgcggccccagcaagacgcaggaggaggccatggcgcgcgcgagcccggaggcgcggcggcggccgcggccgcgcctggtgggctatgaggagctgccggagtacctcaaggacaacgagtacatccgcgggcactaccgcgccgagtggcccgtccgcgacgcgctcctcagcgccttcgcctggcacaacgagacgctcaacgtctggacgcatctgggagggttcctgttcttcctagcgctcgcggtcgccggaggacggaaggaggccgccgacggtgccgctccgggtatcatgaggttcgttgtgagactagattcatggggcagcgaccatccgaaacgtaacgatgagtaggtttgaggagtttctttttatatggttctggttgcatcagtagaatgcctattcagaactaaatgacactagtgttagcaagtaatctagcccggacctgtgccgtattgccgacacggcaggaggaaagagacatggacagggttttgatctgttcacgagcagtagacagtgagacaagtactacttggctgggggtacgccccacatgggccagccgaggcacgacgacgccggggcatcgctgcccagtgtgccgcggtggccgcggacggtgttcctggtgggggccatgtcgtgcctcgccatcagcgcggcggcgcacctgctggcgtgccactcgcggcgcgccagcgcggtgttctggcagctggactacgcgggcatctccgtgatgatcgtcgcctccttcgtgccgccggtgtactacgccttcctctgccacccgccggcgcgggcggcctacctgtgcgccatcgcggcgctgggcgcgctggtggtggccgcgctgctctccccgtcctgctcgtccccgcgctaccgccgcctccgcgcggcgctgttcctggccatgggcctgtcgggcgtcgtcccggcgctgcacgcgctctggctcaactggggccacgccgcctgctacctggcgctgggcatcgaggtcgtcatgggcctcacctacgccacgggcgcctggttctacgtcagccgcgtgccggagaagtggcgacccggggtgttcgacgtcgtcggccacagccaccagatcttccacgtcctcgtgctcgtcggcgccgtcacgcactacgtcgccgtcgccgtgctcatccactggcgggagaaggtggccgtcgcctgtggcgccgcgtcggcgtaggctcacctgtttggttggctcactcaacaaccattcgaatggcaaaccaagtagtcgcaacatagatcagctctagagtttgagtgtgaccttcgacgatttataatttaattgatggggtgattgagtatggtggttcattagttcatgagatttatctgtcgagtgagtgcgtgcctcagatttccagaccttttgtttccagcctactcaactttttgtcccgtcacgtgaatgtttggatgctatttagagtattgaatatagttggattgtaaaac

SEQ ID NO: 215963 - DNA, 762 bp, Zea Mays
tagcaagtcattttctatttaggaattgtgctttgtttgtcctggaacttcgttgctgtcatagtctgctggatcaaggagggagattcaaagttgtttttccttgcaacaatctatgctttgcttggaattcctctgtcatatttgatatggtacaggccactctaccgtgcaatgaggactaacagtgctttcagttttggatggtttttcctgtgttacctgatccacattggtttttgcataattgctgccattgctccaccaattgtatttcatgggaaatcattaactggtattctggctgcgattgacactttctctgaacatgtgataattgggatcttttactttgtggggtttgcactgttttgtctggagacactgctgagcattggggttcttcagaaagtgtacatgtacttcagagggaacaagtgaagccagtcatgatggagagttacgtttgttgagaaaatttggagttacttgtggctacttgtagcacatgttcattcgatggttttgtgcatacctgtcagtacaccttgaatctataatttcttatgtcagttattggtgccgagaattgtttttttaaggtggtatgggagtataggtttgcttacggatgggtgctgtggttcttcactagctattcttgaaacgcagaagatcatgcgcccaagtcatgtttcagaattaatttactgtactcatacatgctatcgttcccctttggtgcggcgccgtagctgccga

SEQ ID NO: 215964 - DNA, 1090 bp, Zea Mays
cgtcgcagaatggaggagccggaggcggcaagcagcagtacggcttccggccgactgagcccgtcgggttcggcggcgctagcaggggcgacgccgtcgttgacgtcccgctcgagaccatgggggactctcggagcaaggtgaaggagctctcgtcgtgggaatcagatctgaagcggcgagaggcggtgaggatatcaagaggagggaagaggcgctgaagaatgctggcgtgccaatggaggagaagaactggccaccattcttccccatcatccaccatgatattgccaatgagataccagcaaatgtgcagaagttgcagtatcttgcatttgcaagctggcttggaattgtgctttgtttgtcctggaacttcgttgctgtcatagtctgctggatcaaggagggagattcaaagttgtttttccttgcaacaatctatgctttgcttggaattcctctgtcatatttgatatggtacaggccactctaccgtgcaatgaggactaacagtgctttcagttttggatggtttttcctgtgttacctgatccacattggtttttgcataattgctgccattgctccaccaattgtatttcatgggaaatcattaactggtattctggctgcgattgacactttctctgaacatgtgataattgggatcttttactttgtggggtttgcactgttttgtctggagacactgctgagcattggggttcttcagaaagtgtacatgtacttcagagggaacaagtgaagccagtcatgatggagagttacgtttgttgagaaaatttggagttacttgtggctacttgtagcacatgttcattcgatggttttgtgcatacctgtcagtacaccttgaatctataatttcttatgtcagttattggtgccgagaattgtttttttaaggtggtatgggagtataggtttgcttacggatgggtgctgtggttcttcactagctattcttgaaacgcagaagatcatgcgcccaagtcatgtttcagaattaatttactgtactcatacatgctatcgttcccctttggtgcggcgccgtagctgccga

SEQ ID NO: 215965 - DNA, 755 bp, Zea Mays
cgtcgcagaatggaggagccggaggcggcaagcagcagtacggcttccggccgactgagcccgtcgggttcggcggcgctagcaggggcgacgccgtcgttgacgtcccgctcgagaccatgggggactctcggagcaaggtgaaggagctctcgtcgtgggaatcagatctgaagcggcgagaggcggatatcaagaggagggaagaggcgctgaagaatgctggcgtgccaatggaggagaagaactggccaccattcttccccatcatccaccatgatattgccaatgagataccagcaaatgtgcagaagttgcagtatcttgcatttgcaagctggcttggaattgtgctttgtttgtcctggaacttcgttgctgtcatagtctgctggatcaaggagggagattcaaagttgtttttccttgcaacaatctatgctttgcttggaattcctctgtcatatttgatatggtacaggccactctaccgtgcaatgaggactaacagtgctttcagttttggatggtttttcctgtgttacctgatccacattggtttttgcataattgctgccattgctccaccaattgtatttcatgggaaatcattaactggtattctggctgcgattgacactttctctgaacatgtgataattgggatcttttactttgtggggtttgcactgttttgtctggagacactgctgagcattggggttcttcagcatactagatcagctcatcagcag

SEQ ID NO: 215966 - DNA, 635 bp, Zea Mays
cgtcgcagaatggaggagccggaggcggcaagcagcagtacggcttccggccgactgagcccgtcgggttcggcggcgctagcaggggcgacgccgtcgttgacgtcccgctcgagaccatgggggactctcggagcaaggtgaaggagctctcgtcgtgggaatcagatctgaagcggcgagaggcggatatcaagaggagggaagaggcgctgaagaatgctggcgtgccaatggaggagaagaactggccaccattcttccccatcatccaccatgatattgccaatgagataccagcaaatgtgcagaagttgcagtatcttgcatttgcaagctggcttggaattgtgctttgtttgtcctggaacttcgttgctgtcatagtctgctggatcaaggagggagattcaaagttgtttttccttgcaacaatctatgctttgcttggaattcctctgtcatatttgatatggtacaggccactctaccgtgcaatgaggactaacagtgctttcagttttggatggtttttcctgtgttacctgatccacattggtttttgcataattgctgccattgctccaccaattgtatttcatgggaaatcattaacaataatatcatcagcagca

SEQ ID NO: 215967 - DNA, 2139 bp, Zea Mays
ctgcagcgttggcgtacaggccggactacattagccaacgcgtatcggcagtggcaaaccctcttcgcttctaactccgctgggccaccagctttgaccgccgcctcccttcccctccgctactgctcctccccaccccactcccccgcaggagcggcggcggcggcggcgaggtcgtaccccacatcggcgagcggcggcggcaccgccggaggcaaaggcaagatgttcgggcgcgcgccgaagaagagcgacaacaccaagtactacgagatcctcggggtgcccaagtcggcgtcccaggacgatctcaagaaggcctaccgcaaggctgctatcaagaaccaccccgacaagggcggtgaccccgagaagttcaaggagctcgcacaagcctatgaggttttgagtgatccagagaaacgtgagatttatgatcagtatggtgaagatgcccttaaggaaggaatgggcggtggaggatcccatgttgatccatttgacatcttctcatcattttttggaccctcttttggaggtggtggaagcagcaggggaagaaggcaaaggaggggagaagatgtagttcacccacttaaagtttctctggaagatctttacaatggcacctcaaagaagctctctctttcgcgcaatgtcatctgctccaagtgcaagggggctcgaagtctggtgcctcaatgaggtgccctggttgccagggctcaggcatgaaagtcactattcgtcagctgggcccttccatgatacagcagatgcagcagccttgcaatgagtgcaaggggactggagagagcatcaatgagaaggaccgctgtccagggtgcaagggtgagaaggtcattcaagagaagaaggttcttgaggttcatgttgagaaggggatgcaacacaaccagaagatcaccttccctggtgaagctgatgaagcgcctgatactgtcactggagacattgtattcgtcctccagcagaaggatcactccaaattcaaaagaaagggtgaagatctcttctatgagcacaccttgtctctgaccgaagcactatgtgggttccaatttgttcttacacatctggacaacaggcagcttctcatcaaatcagaccctggtgaagttgttaaacctgaccaattcaaggcgattaatgatgaggggatgccaatttaccagaggcctttcatgaaggggaagctgtacatccatttcacggtggagttccctgactcgttggcaccagagcagtgcaaggctctcgagacagtacttccaccaaggccttcatccaagctgacagacatggagatagatgaatgcgaggagacgactatgcatgatgtgaacaacatcgaggaagagatgcgcaggaagcaagctcacgctgcccaggaggcgtacgaggaggacgacgagatgccgggcggagcccagagagtgcagtgcgcgcaacagtaagcagactatcatcaaggcaattgggaggggtggtgcccttaaagcatgggagtgatctctggttttgctgtcgccgagctgggaaataggaagctgaatcgacctcgcaagcggggaatgtatccttttttgctgcaacataaaaaatgctacccaggcatagctgggtaccttttaacttctgtttgtgggatttgctagagtgatggtttcgatatatagggggacttgaatgtctggaatgctacggtataacgcacatttgggtgcaatgtctgttgcattgctgtctgaatgacatcgttggtacatttattttcatgtaacgcctgtagtttgctaatcaacaagcttggaatggcctgattgatgatgcctgataatttgtcctttacaggttataaaggtgctgctaagaaacaatagtcatttgtggagcgtaacataacggtgagcagtctagccttgttggatcgtgacatggaacttgaggccaagtttgcagtagttgccgacgctgcagacgtagtagcgcacgcctttatagtcgagcgggacgacggcgggcgggacgcggaagttgttgtaggggtcgtcggtggtgcagtcctcgtactccctcctggacacctgcaccacgtcgtagaacccaatctggaac

SEQ ID NO: 215968 - DNA, 2302 bp, Zea Mays
cggggacacagagcgattgcgagtcgtctccaataaatttgtcgcgtccggcgatccatccgtcttccccctccctctgccctcgtgctcctcccgtcaccctcgtctccactccccgtgacgaccaggaaggaattcttcctccgtccccgttcgccccgtcgtctcgtcgttttctcacctgcgtgctgcgttcgcggacaaacttcttggttggtgactcggcggatcctgagccagagcctcgcaggagggagaggggggagagcggaggagaaaccacctttctttccgttccagacaagctcccagctttgaccgccgccgccgccgccgctgtgtgtgtgtgctcccttagtagttagtccctgtcgcgtcccggatcggagctcccctccgtgcacgggacaccgccggtccgggcgtctccactcccccccggatcgatcagctccgcctccgcaagataggcaagcaatgaggtgcctgcctttcttgcatggagacaccaaagagaaggatccagtcactaagtcggcctctctacggtccatgagcacaacatcaacggagcgcgatgtccgctccggttcagacttcacctccttgaatgtttccgacatgagcgccgagtcgataaggaggacgcagtaccccagcttcactgaccgcccgtctaacctgagggtgttctcctttgctgaactgaagagtgccacccgcaacttcagccggtctctcatggttggcgagggtggctttggctgtgtgtacaggggtgtcatcaagacctccgatgaaccgaacgaacgaattgagatcgctgttaagcagttgaatcgtaaaggacttcaggggcagaaggagtggttaacagagatgaatgtgcttggaattgtggatcatccaaacctagttaaacttataggctactgtgctgaagatgatgagaggggagtacaacggcttttagtgtacgaatatatgcctaatggaagtgtggatgatcacttgtcgagtaggtcaacttctactctgtcatggccaatgagactaaaagtagctcttgattctgctcggggactgaagtatctgcatgaagaaatggaattccaggttattttccgggacctgaaaacatctaacattttgttggatgagaactggaatgctaaactgtcagactttggtttggctaggcatggaccagcagaaggtctgacccatgtctccacagcggtggtcgggactctaggctacgcagctccagagtacatgcagactgggcgcctgaccgcgaagagcgacatatggagctacggcgtcctcctgtacgagctgatcacaggccgccgccccatcgaccggaaccgcccaaagagcgagcagaagctcctggactgggtgaagccgtacatctcggacgtgaaacggttccccatcatcgtcgacccgcggctggaggggcactacaacctcaagtccatgacgaagctgtccagtgtggcgaaccggtgcctggtccggatgcccaagtctcgccccaagatgagcgaggtgtacgacatggtgcagaagatcgtggactgcgtggggaccggcccgccgcagcccccgctgctgcactaccacggctcggcctctgagcctggccctggcgacaagcgcgccaggaaagggtcggtgaagaggaggaggctctgggagctcaggttcggctgccggcacatcgtgtggcgcggctggaagcctgcgatcgtgaaggacatctgaggagggcggggtggctccggtgcttgcagatcctgtgatcactcaccaagctgacataaggaaagtgtgtgatagcgtagtgatgttggcatggaaaagggactggaatatggttgagattcagactagacgtgacctgggatgctgccacaggcgtccaatccgaaagaaccggcggcctatcctgagctcacattcagaacgatgcgacggcgatgatgggtgactccggccattcacccatcctcttgtccagctagcggaggcggccttttgtttgcattgcaacgcatggctgtgtgtgaatccagcttcctcaaaaaacctttctttgcaatgcaatgcaatgcaatcgagtggtggttgtttttctttctcttcttcttcttttttttaaaaaaagggggagagagagataaatatttgctcttgagaaagcaatgtcaatggctggtgagatgcaacgcatggaggagggtgaaaatgtttttttttgttgttgttgttttcttgaaagagaactaacttg

SEQ ID NO: 215969 - DNA, 2307 bp, Zea Mays
cggggacacagagcgattgcgagtcgtctccaataaatttgtcgcgtccggcgatccatccgtcttccccctccctctgccctcgtgctcctcccgtcaccctcgtctccactccccgtgacgaccaggaaggaattcttcctccgtccccgttcgccccgtcgtctcgtcgttttctcacctgcgtgctgcgttcgcggacaaagtgtgggaaaatgaaaacctgagcgcaaacaaacactctgagcctcgcaggagggagaggggggagagcggaggagaaaccacctttctttccgttccagacaagctcccagctttgaccgccgccgccgccgccgctgtgtgtgtgtgctcccttagtagttagtccctgtcgcgtcccggatcggagctcccctccgtgcacgggacaccgccggtccgggcgtctccactcccccccggatcgatcagctccgcctccgcaagataggcaagcaatgaggtgcctgcctttcttgcatggagacaccaaagagaaggatccagtcactaagtcggcctctctacggtccatgagcacaacatcaacggagcgcgatgtccgctccggttcagacttcacctccttgaatgtttccgacatgagcgccgagtcgataaggaggacgcagtaccccagcttcactgaccgcccgtctaacctgagggtgttctcctttgctgaactgaagagtgccacccgcaacttcagccggtctctcatggttggcgagggtggctttggctgtgtgtacaggggtgtcatcaagacctccgatgaaccgaacgaacgaattgagatcgctgttaagcagttgaatcgtaaaggacttcaggggcagaaggagtggttaacagagatgaatgtgcttggaattgtggatcatccaaacctagttaaacttataggctactgtgctgaagatgatgagaggggagtacaacggcttttagtgtacgaatatatgcctaatggaagtgtggatgatcacttgtcgagtaggtcaacttctactctgtcatggccaatgagactaaaagtagctcttgattctgctcggggactgaagtatctgcatgaagaaatggaattccaggttattttccgggacctgaaaacatctaacattttgttggatgagaactggaatgctaaactgtcagactttggtttggctaggcatggaccagcagaaggtctgacccatgtctccacagcggtggtcgggactctaggctacgcagctccagagtacatgcagactgggcgcctgaccgcgaagagcgacatatggagctacggcgtcctcctgtacgagctgatcacaggccgccgccccatcgaccggaaccgcccaaagagcgagcagaagctcctggactgggtgaagccgtacatctcggacgtgaaacggttccccatcatcgtcgacccgcggctggaggggcactacaacctcaagtccatgacgaagctgtccagtgtggcgaaccggtgcctggtccggatgcccaagtctcgccccaagatgagcgaggtgtacgacatggtgcagaagatcgtggactgcgtggggaccggcccgccgcagcccccgctgctgcactaccacggctcggcctctgagcctggccctggcgacaagcgcgccaggaaagggtcggtgaagaggaggaggctctgggagctcaggttcggctgccggcacatcgtgtggcgcggctggaagcctgcgatcgtgaaggacatctgaggagggcggggtggctccggtgcttgcagatcctgtgatcactcaccaagctgacataaggaaagtgtgtgatagcgtagtgatgttggcatggaaaagggactggaatatggttgagattcagactagacgtgacctgggatgctgccacaggcgtccaatccgaaagaaccggcggcctatcctgagctcacattcagaacgatgcgacggcgatgatgggtgactccggccattcacccatcctcttgtccagctagcggaggcggccttttgtttgcattgcaacgcatggctgtgtgtgaatccagcttcctcaaaaaacctttctttgcaatgcaatgcaatgcaatcgagtggtggttgtttttctttctcttcttcttcttttttttaaaaaaagggggagagagagataaatatttgctcttgagaaagcaatgtcaatggctggtgagatgcaacgcatggaggagggtgaaaatgtttttttttgttgttgttgttttcttgaaagagaactaacttg

SEQ ID NO: 215970 - DNA, 2613 bp, Zea Mays
cggggacacagagcgattgcgagtcgtctccaataaatttgtcgcgtccggcgatccatccgtcttccccctccctctgccctcgtgctcctcccgtcaccctcgtctccactccccgtgacgaccaggaaggaattcttcctccgtccccgttcgccccgtcgtctcgtcgttttctcacctgcgtgctgcgttcgcggacaaacttcttggttggtgactcggcggatcctgagccagagcctcgcaggagggagaggggggagagcggaggagaaaccacctttctttccgttccagacaagctcccagctttgaccgccgccgccgccgccgctgtgtgtgtgtgctcccttagtagttagtccctgtcgcgtcccggatcggagctcccctccgtgcacgggacaccgccggtccgggcgtctccactcccccccggatcgatcagctccgcctccgcaagataggcaagcaatgaggtgcctgcctttcttgcatggagacaccaaagagaaggatccagtcactaagtcggcctctctacggtccatgagcacaacatcaacggagcgcgatgtccgctccggttcagacttcacctccttgaatgtttccgacatgagcgccgagtcgataaggaggacgcagtaccccagcttcactgaccgcccgtctaacctgagggtgttctcctttgctgaactgaagagtgccacccgcaacttcagccggtctctcatggttggcgagggtggctttggctgtgtgtacaggggtgtcatcaagacctccgatgaaccgaacgaacgaattgagatcgctgttaagcagttgaatcgtaaaggacttcaggggcagaaggagtggttaacagagatgaatgtgcttggaattgtggatcatccaaacctagttaaacttataggctactgtgctgaagatgatgagaggggagtacaacggcttttagtgtacgaatatatgcctaatggaagtgtggatgatcacttgtcgagtaggtcaacttctactctgtcatggccaatgagactaaaagtagctcttgattctgctcggggactgaagtatctgcatgaagaaatggaattccaggttattttccgggacctgaaaacatctaacattttgttggatgagaactggaatgctaaactgtcagactttggtttggctaggcatggaccagcagaaggtctgacccatgtctccacagcggtggtcgggactctaggctacgcagctccagagtacatgcagactgggcgcctgaccgcgaagagcgacatatggagctacggcgtcctcctgtacgagctgatcacaggccgccgccccatcgaccggaaccgcccaaagagcgagcagaagctcctggactgggtgaagccgtacatctcggacgtgaaacggttccccatcatcgtcgacccgcggctggaggggcactacaacctcaagtccatgacgaagctgtccagtgtggcgaaccggtgcctggtccggatgcccaagtctcgccccaagatgagcgaggtgtacgacatggtgcagaagatcgtggactgcgtggggaccggcccgccgcagcccccgctgctgcactaccacggctcggcctctgagcctggccctggcgacaagcgcgccaggaaagggtcggtgaagaggaggaggctctgggagctcaggttcggctgccggcacatcgtgtggcgcggctggaagcctgcgatcgtgaaggacatctgaggagggcggggtggctccggtgctgtaagtacagtagctagctagctgttcatagagacggtggtaacagtttgttccaccgtgtagtgcttggttggtatatagggtgagttcatgcttgcataataccagtcgagaagaagaagaagaaaggtgcacagttgagtggggtggcgttggaatggagtacatagagtagtgctgtgtgtaatttccagtgcaacttctgctgctggctttcttcgtctttgggacaagtttggtgtggtcttcggggatgattcagatacccattcccttgtatgccatttttgactgatgtccagggacccagcgcaccctggtctcattcatttcttcgtccacccttctgatggtctcatatacccttttcataacgaggaatggagaaagaggatagatgctagaagacagaagagaaagtatggatcaaaagggtgtagtggaagagagatgggagagcacaacaaggtggagatcgaggatggtggcataccacaatggtgtagagacatatctatgcatggattcgccatgtgtgattgctccttcatgtgcctgaacccacaacacaacaatgttgagattgaggacaacaacatacctcaatggtgtggaggtcggtctccatctagatttattatgttcgcctgctccttcatctacatcggcccacaacatgacaaggtggagatcgacgacgatagccacaggctcaccgcctccttcatccatctttacacacgtgagatctacatgacctcactccatcgccttctccttgggcaaatatgcaagcaaaggaaggagcgaatctaa

SEQ ID NO: 215971 - DNA, 1302 bp, Zea Mays
gtcttccccctccctctgccctcgtgctcctcccgtcaccctcgtctccactccccgtgacgaccaggaaggaattcttcctccgtccccgttcgccccgtcgtctcgtcgttttctcacctgcgtgctgcgttcgcggacaaagtgtgggaaaatgaaaacctgagcgcaaacaaacactctggtattgtactatatagattattataagaaagagggaatggtctttgcctcgcagcttcttggttggtgactcggcggatcctgagccagagcctcgcaggagggagaggggggagagcggaggagaaaccacctttctttccgttccagacaagctcccagctttgaccgccgccgccgccgccgctgtgtgtgtgtgctcccttagtagttagtccctgtcgcgtcccggatcggagctcccctccgtgcacgggacaccgccggtccgggcgtctccactcccccccggatcgatcagctccgcctccgcaagatagcaatgaggtgcctgcctttcttgcatggagacaccaaagagaaggatccagtcactaagtcggcctctctacggtccatgagcacaacatcaacggagcgcgatgtccgctccggttcagacttcacctccttgaatgtttccgacatgagcgccgagtcgataaggaggacgcagtaccccagcttcactgaccgcccgtctaacctgagggtgttctcctttgctgaactgaagagtgccacccgcaacttcagccggtctctcatggttggcgagggtggctttggctgtgtgtacaggggtgtcatcaagacctccgatgaaccgaacgaacgaattgagatcgctgttaagcagttgaatcgtaaaggacttcaggggcagaaggagtggttaacagagatgaatgtgcttggaattgtggatcatccaaacctagttaaacttataggctactgtgctgaagatgatgagaggggagtacaacggcttttagtgtacgaatatatgcctaatggaagtgtggatgatcacttgtcgagtaggtcaacttctactctgtcatggccaatgagactaaaagtagctcttgattctgctcggggactgaagtatctgcatgaagaaatggaattccaggttattttccgggacctgaaaacatctaacattttgttggatgagaactggaatgctaaactgtcagactttggtttggctaggcatggaccagcagaaggtctgacccatgtctccacagcgacatgaagaacagagtcaaaaaaaattgagaatgg

SEQ ID NO: 215972 - DNA, 1784 bp, Zea Mays
gtacacgccaaccagcaccttttgcctaccccggcaccaccccgcctttgccttggtgttgaaaagtcgccgcgttcctcttgcctgatgaaatcaatcctcttctcgtctagatctgagcctccgcgtggcttccagatcagatgcttggtccgatcaacgacgaccttcagagctgcgacgttccggcttccgggggatctggatcttggctgactggacaattgcgaggcgttgacgggcttctaaagcgtggctggattgctggatctcctttctgccccgcgactcgatgatatctctttgtattggtaattattggatgaaatttcgataattattagatcggagagatgttggtcgcggcggtccgtgcctaactgaaggcaaggtaaggtccgagacaaaagaggggaaaaggatacatgaaaaagaagtgagatgtgacatcttgaaggcctttgccatgttgggtgcgctcgcatggcaggcatcgtaataaagatgttggttttgtgtgctgggtgggagatcgcacagggaattgtttttttcatccctgggttctcccgcccattgtgtccctgtgccctgcttcgtgttgtttggcttctcgtcctacgcttcatcaccggtgctgctgcaaattgaacggcgtttctcgtctcacggcgtgctgcaaattgaacggggctacatcgcaacgcaacacacaagcgcgccacaaacttctacgcctatactacgccatgcatatgcagttcattcacccaacgcttatcccgtaaggctataaagcacatgcgaaaggcgttcattcactctgtaaggcgttcttgttcttcacccaacgcttctcgcacgggggtcttctattgaccattgaagaaaaacatttgactggagatagcatctggaatatatgaatctagtataacgaactaggtctgaaaatctgggcaattccagattcgattctcatgtgagatgataaaaacgtcataattatcctgcgtactaaaaaatattcgctagttgagtcgttccggcatatacaaaattattagctacagttgttcctgcatgcgtgtaatgtccttcggtgaacttgtctgtcattatcatttaaaaacgtatctagatgcattacggaagatttttagtttcctttgttatatttgagaagttatatattgtatatacagagagatgcagctgtgtattatttgctgtagcttcgattgcgagacgcatggttgcagtcattttattgtagttagtttatatgatacgtcgttgtcaccgcatgaagattaactgctgtgccatatgaagacctcctgcctcatcacggtgtttgtatataagatcaactgcagtgcctacacggtggacggagtatttgtatgatgtgaaggtcactattcagcatcgtcagtatgaaatggctatggccttcaaagctttctttcttggtcaccggacagggaagaaatattctgctcaagctcacaattagatacaagacataactcagataagagcttgttcaacttgcactatagttcatttgagtatttacctattattgatctcttgagttgaagctaggtttcaagtatctcctaaggattcgtatatgtgaaaaccagggattctcttttttttttgcactacaatctgtgacgttttaatatttgatgactagttgttcatgcattgctattgtatttgcatatcccctaggtttaagagcatttctaacaaggtgactcaatgatgtc

SEQ ID NO: 215973 - DNA, 631 bp, Zea Mays
ttaggtagtgaacagaataagtcagcagatggtggaggaacttgtagttgatgatacacctgaaacttcaagaggaataattggcctctgtagtgatccatctacaggacttttctatgcatatgatgaaagttctatattccaggtttccacttcagacgagggttgtgacatgtggcaagtttacttggatatgaatcattatgctgctgctttatcccattgccgtaatcctttccagcgtgatcaagtctacctagttcaggctgatgctgcatttgctgcaaaagagtattacatagcagcatccttctatgcaaagataaattacatcctgtcgtttgaggagatcagcctgaaatttatatcaataggatgctctcagaactttcttattgagaaggctcgataacctcaccaaagaggacaagatgcagattacgatgatctcaacttgggctactgagctgtacttagacaagtgacagcaaagatgtattagatgaagcaacaacaatgaaactactggaaagttacggaagagtggatgagcttgtgtactttgccggtttgaaggagcagtatgaaattgtagttcatcattacattcagtggcttcagctgagacacc

SEQ ID NO: 215974 - DNA, 2066 bp, Zea Mays
ggcgcatgcgtgggagcggacgaaaacatgcaggatgcattcccattcccgtccagcggatctcgatgacaacaaaagctagctaggtggcctacatatactctaaacccttcgctcggtcgccggaaccacgccccacagagagagagagagaaaaaaaaaccctcgtttggtcgccggcacacaagacggtagtaggcggcgatcgatcggtggacgacggacggaactcagctaagcaatctcgcctcgtcttctccggcggcgacacacacgcgccccttctacgtcgagaaatcagttccccatcctccatcatccattccgattctccatctatcgctggtgcggcaggatcgcagtagctagcacgcgtccgtcgtctcgggtccgtccggcggcgcaatggccgcctgtgccggcgtaggacctgttgtggggatggtggtgttccagattatctttgcatttgtcaatatcttctataagctagctgtgtcggacggcatggatctgagggaaaaaccgaacgaaactgacatggagggtggtgttcttgtctttcgcgtgtggcctctcagggggcacgatggcgcagaacctgtacatcgccggcatgaagttcacctcggccactttcgcctccgcgacaaccaacctcctcccggcgtgtaccttcgtcatcgccctcgtcttccgctacgagaagttcgccatccgcagcctggccagccaggccaaggtcgccgggaccctgctgggcgtcggcggggccatgctgctcaccttctacaagggcgtcgacatcacgccctggcacagcaacctgaacctcgtcgccacgctcacccagcaccaccaccatcacaccaccaccaccaccaccaactacgccatggggtcgctgctctgcgtctgcagctgcttcttctacgcgctttggatcgtcgtgcaggccaagctgagcaacgagtacccgttccactactccagcaccgccctcatgtgcatcatgaccacgctgcagtcctccatcttcgcgctctgcttcgacagggacgcctcgcaatggcgactcaagttcgacatcaggctgctctcctgcgcctactcgggcatctttgcgtcgggcgtcgcgctggtgataatggcgtggtgcgtgcagcagcgcgggccactgttcgtctccgtgtttagcccgctgatgctgctcattgtggccgtgctgagctcgctgctgctgggtgagaagctgcacctcggcacggcaatgggcgcggtgctcatcgtcatgggactctacgccgtgctctggggcaagggacgcgaggcagcggctgaggcggccagggtcagcgtcaacgaccaccccaccaccagcaacagcaacagcagcgaggaggacgacgacaagaagcggcacgttagcgtcccaatgcctcccgcaccaaactccgtctgatgttaagctacaaacggggccggggttggggcgaaaataaatacggagtactagctagtatatataattatatatatatatacgactatggtgatacttccattcccatgcccatacatccagtctctcacaacagaaatcggatctctcaaaacatgatgatagccgatccgtcgccgtcgtcccaatcagactagctagcgcagcgccggaagagtctcgctctcgacctcgttccccatcgagctcgatcggccacccgccggcctcgctcctttcttcatcgctagctctcttgcgcagtggccggtgccggccctgcggtggcctcgcggcgatgcagacatgcagaggcttcattctctcctccacctaatccagattcaccattggcctaattgatccactggtacatatagtcttgcattgattgtatctatttttaagttgcctcggttcatgacatgggttagttagtgtattcaaaaatatttttgagcgatgaccttgtaagctgtatttttcatgtgcacattaagacaaattcccctcgctaccggaacaaagttatttgtcaagtgccgcagtctcaaaaacactcggt

SEQ ID NO: 215975 - DNA, 1530 bp, Zea Mays
cttgtgatatgtgagatgctatgagtaaagagtctcttatcagagttgaaagtattgagaaaaggtcccctgaagctatggtgtgataacaagtcagctataaatatagtcaataatccagttcagcatgacagaacaaaacatagagatcgatcggttcttcatcaaggagaagctagacaatggtactttagagctgggtcatctgcgagggataccacagtatgcagaaggaagccgcgtagaggtgatgtgtgataaacagggcagagtttggaggccggctactatcaagaacatggtcggcggtaccaactatgttgttagctatggaaatgggcagagctcgattgaggtcctccacacaatgttcattcggcggccagaacccatccaaatggaagttgaagcccctaatgatagcaatatggagataaaaaacgaaagaatgggtatgtctcttgtggtagcagaaaggtttcacctggaaacctgtacgaactccaatgatattacaattgtatcatcacaacatccttgggctgaacctctacaacctgtttctgagaaatcacctggaccatcttcattgcttcatcctgttgtgatggcggatacatcagcattcatggcattggcagtgcctaacagtagtgatctttcaacggcgttctcgacaacttccttgctgctgatgcccaatgacaaaatggaggtcttccagaagctaccacagattccacacttccgcgaggcatggaattgccctccagaacttcgtgaaggaagagccctaggacttatggtctgttttgcaaacatggccaaaagcataaaagacatgcgaattcaggaggaaccacgactttatcaagagaagatgaacatcctgttagagatggaagagaatgggtttgaaactgggcccctgaaggttcgtctccataatcttctttgtacaaggaatcaccatatgaatctcaagagcaggaaagtaagattagagaaggagatacttgagatagaagcaataaactgtggattagagcagcgactcaagttccttgacatgtgcatcatggggatggaggagaagaaataccaagagatgaaaggttcacttgacatccaaaaaacagaaaattgttcacttatttcaaagctccaagtatatttgtgtcaagttgaggaatcactcaagtatgctgaagccgatttttgtagtattgctactgcaccgtggcaaccacatgttgtgccttcgataccgtaaccttgcttagctattaggggggagggggtaacccttctcctccacgcttgaactgtgtaattatgtatatatgcatgctttctccatggagctgagagacaaaccaatgtgtattttgagtttgcagtctgctccacctaacctaagtgatcttcagatacgtgtattttgagtcgtagtgctggttgctctctccagttgtagctcatacttaatgttgcaatttgagaagttgagcatcctatgtgatatttcca

SEQ ID NO: 215976 - DNA, 1645 bp, Zea Mays
gtcaacttcagattattgtgtgtttgttggaggaaatttgatatcatggagaagcaagaaacaatcagtggtatctcgttccactgctaaggcggaatatagagctatgttacttgtgatatgtgagatgctatgagtaaagagtctcttatcagagttgaaagtattgagaaaaggtcccctgaagctatggtgtgataacaagtcagctataaatatagtcaataatccagttcagcatgacagaacaaaacatagagatcgatcggttcttcatcaaggagaagctagacaatggtactttagagctgggtcatctgcgagggataccacagtatgcagaaggaagccgcgtagaggtgatgtgtgataaacagggcagagtttggaggccggctactatcaagaacatggtcggcggtaccaactatgttgttagctatggaaatgggcagagctcgattgaggtcctccacacaatgttcattcggcggccagaacccatccaaatggaagttgaagcccctaatgatagcaatcagatggagataaaaaacgaaagaatgggtatgtctcttgtggtagcagaaaggtttcacctggaaacctgtacgaactccaatgatattacaattgtatcatcacaacatccttgggctgaacctctacaacctgtttctgagaaatcacctggaccatcttcattgcttcatcctgttgtgatggcggatacatcagcattcatggcattggcagtgcctaacagtagtgatctttcaacggcgttctcgacaacttccttgctgctgatgcccaatgacaaaatggaggtcttccagaagctaccacagattccacacttccgcgaggcatggaattgccctccagaacttcgtgaaggaagagccctaggacttatggtctgttttgcaaacatggccaaaagcataaaagacatgcgaattcaggaggaaccacgactttatcaagagaagatgaacatcctgttagagatggaagagaatgggtttgaaactgggcccctgaaggttcgtctccataatcttctttgtacaaggaatcaccatatgaatctcaagagcaggaaagtaagattagagaaggagatacttgagatagaagcaataaactgtggattagagcagcgactcaagttccttgacatgtgcatcatggggatggaggagaagaaataccaagagatgaaaggttcacttgacatccaaaaaacagaaaattgttcacttatttcaaagctccaagtatatttgtgtcaagttgaggaatcactcaagtatgctgaagccgatttttgtagtattgctactgcaccgtggcaaccacatgttgtgccttcgataccgtaaccttgcttagctattaggggggagggggtaacccttctcctccacgcttgaactgtgtaattatgtatatatgcatgctttctccatggagctgagagacaaaccaatgtgtattttgagtttgcagtctgctccacctaacctaagtgatcttcagatacgtgtattttgagtcgtagtgctggttgctctctccagttgtagctcatacttaatgttgcaatttgagaagttgagcatcctatgtgatatttcca

SEQ ID NO: 215977 - DNA, 2450 bp, Zea Mays
atggatcgatcgcctgcgttggaggggaaggatgccggcaggggctccggcagctggccacgcaccccacgcttcgccgtgggggatgaggtcgaggtcctcttcaccggatcgggctttcgtggcgcgcgcttcgaggccaccgtcactgcgcgcttcccggactcccgtcgctacgaggtcgtgggagtctccgagctacggccgaggccgccgccgccgcagccggggcgcgagttcgagctgtttgacctcgtcgaggcgtacaacaacgacggatggtggccgggcgtcgtgtccgacatccggcccaagcggaggcggaaccaagcgaaacgattcgccgtgtcgctcccgctgttccgcgaggtactggagctctcggcctcgttcgtgcggcccaggcgggagttcgtgtacggaagctggatagacgcgcaggaagtgctcgtagcctcttataaaattttacatgcattggtcacgaactatctgcccgatgggaccctcagccatgcaagccaaacagtacatggaatggaaaggctagtgtcagcaaaggtttatttgtcttatcagggcggaatgcccggtaatggcgagcagtggcgtcatgcgttgaggagttggatccggcggcgaggagagacatccggctgggtggaccactgcgtgaaggaccagacgctcgtcgtggttgccgagaagaagcaaaaggaggagctcaaagaggtgctgggcgacggcagggtggtggtgacagacgacaagaagaagagggtgcagcgcgccaagaagaagccagcgacgttccacggtgaaggtaaggttgcagtccagtgaaggagtcagaagcgcaacaaggagtagagaagacaatcacctagaattgagtgaagagcgagtaggctgcctgagctatgcgtactgcagctgtgagctctccatcaacggtggtttgtctacaagttgaagctgaaagggttgcgcaaatcagctgcgagggataccacagtatgcagaaggaagccgcgtagaggtgatgtgtgataaacagggcagagtttggaggccggctactatcaagaacatggtcggcggtaccaactatgttgttagctatggaaatgggcagagctcgattgaggtcctccacacaatgttcattcggcggccagaacccatccaaatggaagttgaagcccctaatgatagcaatgtaattactcgtcattgttagaatcagctattgccattttcatatcttcccttttggttttcttctagtttattgaattccatatattttttcaaacactctgcgtctgttgatgattctatcagcagatggagataaaaaacgaaagaatgggtatgtctcttgtggtagcagaaaggtttcacctggaaacctgtacgaactccaatgatattacaattgtatcatcacaacatccttgggctgaacctctacaacctgtttctgagaaatcacctggaccatcttcattgcttcatcctgttgtgatggcggatacatcagcattcatggcattggcagtgcctaacagtagtgatctttcaacggcgttctcgacaacttccttgctgctgatgcccaatgacaaaatggaggtcttccagaagctaccacagattccacacttccgcgaggcatggaattgccctccagaacttcgtgaaggaagagccctaggacttatggtctgttttgcaaacatggccaaaagcataaaagacatgcgaattcaggaggaaccacgactttatcaagagaagatgaacatcctgttagagatggaagagaatgggtttgaaactgggcccctgaaggttcgtctccataatcttctttgtacaaggaatcaccatatgaatctcaagagcaggaaagtaagattagagaaggagatacttgagatagaagcaataaactgtggattagagcagcgactcaagttccttgacatgtgcatcatggggatggaggagaagaaataccaagagatgaaaggttcacttgacatccaaaaaacagaaaattgttcacttatttcaaagctccaagtatatttgtgtcaagttgaggaatcactcaagtatgctgaagccgatttttgtagtattgctactgcaccgtggcaaccacatgttgtgccttcgataccgtaaccttgcttagctattaggggggagggggtaacccttctcctccacgcttgaactgtgtaattatgtatatatgcatgctttctccatggagctgagagacaaaccaatgtgtattttgagtttgcagtctgctccacctaacctaagtgatcttcagatacgtgtattttgagtcgtagtgctggttgctctctccagttgtagctcatacttaatgttgcaatttgagaagttgagcatcctatgtgatatttcca

SEQ ID NO: 215978 - DNA, 2325 bp, Zea Mays
atggatcgatcgcctgcgttggaggggaaggatgccggcaggggctccggcagctggccacgcaccccacgcttcgccgtgggggatgaggtcgaggtcctcttcaccggatcgggctttcgtggcgcgcgcttcgaggccaccgtcactgcgcgcttcccggactcccgtcgctacgaggtcgtgggagtctccgagctacggccgaggccgccgccgccgcagccggggcgcgagttcgagctgtttgacctcgtcgaggcgtacaacaacgacggatggtggccgggcgtcgtgtccgacatccggcccaagcggaggcggaaccaagcgaaacgattcgccgtgtcgctcccgctgttccgcgaggtactggagctctcggcctcgttcgtgcggcccaggcgggagttcgtgtacggaagctggatagacgcgcaggaagtgctcgtagcctcttataaaattttacatgcattggtcacgaactatctgcccgatgggaccctcagccatgcaagccaaacagtacatggaatggaaaggctagtgtcagcaaaggtttatttgtcttatcagggcggaatgcccggtaatggcgagcagtggcgtcatgcgttgaggagttggatccggcggcgaggagagacatccggctgggtggaccactgcgtgaaggaccagacgctcgtcgtggttgccgagaagaagcaaaaggaggagctcaaagaggtgctgggcgacggcagggtggtggtgacagacgacaagaagaagagggtgcagcgcgccaagaagaagccagcgacgttccacggtgaaggtaaggttgcagtccagtgaaggagtcagaagcgcaacaaggagtagagaagacaatcacctagaattgagtgaagagcgagtaggctgcctgagctatgcgtactgcagctgtgagctctccatcaacggtggtttgtctacaagttgaagctgaaagggttgcgcaaatcagctgcgagggataccacagtatgcagaaggaagccgcgtagaggtgatgtgtgataaacagggcagagtttggaggccggctactatcaagaacatggtcggcggtaccaactatgttgttagctatggaaatgggcagagctcgattgaggtcctccacacaatgttcattcggcggccagaacccatccaaatggaagttgaagcccctaatgatagcaatatggagataaaaaacgaaagaatgggtatgtctcttgtggtagcagaaaggtttcacctggaaacctgtacgaactcagccaatgatattacaattgtatcatcacaacatccttgggctgaacctctacaacctgtttctgagaaatcacctggaccatcttcattgcttcatcctgttgtgatggcggatacatcagcattcatggcattggcagtgcctaacagtagtgatctttcaacggcgttctcgacaacttccttgctgctgatgcccaatgacaaaatggaggtcttccagaagctaccacagattccacacttccgcgaggcatggaattgccctccagaacttcgtgaaggaagagccctaggacttatggtctgttttgcaaacatggccaaaagcataaaagacatgcgaattcaggaggaaccacgactttatcaagagaagatgaacatcctgttagagatggaagagaatgggtttgaaactgggcccctgaaggttcgtctccataatcttctttgtacaaggaatcaccatatgaatctcaagagcaggaaagtaagattagagaaggagatacttgagatagaagcaataaactgtggattagagcagcgactcaagttccttgacatgtgcatcatggggatggaggagaagaaataccaagagatgaaaggttcacttgacatccaaaaaacagaaaattgttcacttatttcaaagctccaagtatatttgtgtcaagttgaggaatcactcaagtatgctgaagccgatttttgtagtattgctactgcaccgtggcaaccacatgttgtgccttcgataccgtaaccttgcttagctattaggggggagggggtaacccttctcctccacgcttgaactgtgtaattatgtatatatgcatgctttctccatggagctgagagacaaaccaatgtgtattttgagtttgcagtctgctccacctaacctaagtgatcttcagatacgtgtattttgagtcgtagtgctggttgctctctccagttgtagctcatacttaatgttgcaatttgagaagttgagcatcctatgtgatatttcca

SEQ ID NO: 215979 - DNA, 2054 bp, Zea Mays
  misc_feature (2053)..(2054): n is a, c, g, or t
ctcgtcccgatcacgcagctatagtatagcttccccgctgcgctccagcagaattctcgcgccgcaacgcgacgcaatgccccacccgcacggtcgcgccgcgcagcgcaggaacccccaccacgcggtcggcgtcggcgtcggcggcggtgctcccgcctccccgccgtcggcgtagctcccgcgcgcttcggccctgggcgccggtgtggtttctccatcacgctctctcgcgcttcctacctgcgtgcgccctgctgcccggtgatggccagccgtctcttcgtgctccgtcggcacacgaggtggtggcagcggcaggcgccacggcctcgctcgctttgcccgccgtctcacggtggggactcggcgtcttcccatgggacgctggagctgctcgcgcgtctgcgcagctcaccatcttatactttccacaaggttttcaaccgagatgctaggttcttcaggttgttgcagagttgtagcattcaagcctgccattgtatccatacgagtccatcagtcaatagcggaaatcaggctactgcagagcctcaacaacagaatccaggagtgcctgtaccggttgatggttctagtgaactaaaacccaagaggacaaagctgaaaggaaggagggcagtgacaaattttttgaaatccttgagatggaaaaagaaaaaggagtttcaaagaatgactgcagaggagaagattttgtacaaactgaagctagctcgaaagaaggaagagcggcttgttgtggcactgaagaaaattgaaccagaggatccatcagaacctacacatgatcccgaggtgcttacacctgaagagcacttctatttcctcaagatgggccaaaaatgtaaaaattatgtgcctgttggaagacgtggaatttaccagggagtgatcttgaacatgcacttgcattggaaaaagcatcaaactctccaggtaattgtgaagacatttacaccagaggaggtcaaggaaattgccatcgagttagccacactaagtggtgggattgtgcttgacattcaagatgggaacacaattattatgtacagagggaaaaactatgcacagccaccaccagagatcatgtctccaaaagtttccctctctagaaaaaaggcactggataaatccaaatatatggaaaagctcagagctcttaggcggtacattcccagacttgagcaggagcttgaagatcttcatgcacagatgaagttagctggagagcatcaaggacaaaatgcagggaaacatgttgcttcaatttcacataatacaaacagtatgccagtgagaaaagaaccttgtggttcaattcgcaacaaaacagtatctgatctcctatcagaaactgtagagggatccaagaggttagaggatgaaagttctgcgattgaagacgactcagcttcagagtctctgtcatttacagagtctgaggatctctctgacatttttgagacagaatcagaggagcaggaagaggacaacaaggatcgccccttatatctcgataggctggataagtttccctcaggaaaaaatgataatgaaccagatgattttgaggagcatctgcggaggatcgcttcactttcagataagactgattcaccttcaaaagaactgaaagtgtcagagctcgatgagattgataaaatctttctgagagcaagttcgttgttgaagaaaaggtgacgcaaaagttcagctgatgcaagaacgatctcactgccaagatcaggaacgatgaagtagtcctcgtcgtcgtcgtcaggcacctccatccgtgacttcttgaacaggcgcgccccgttcgccttgtagaacccggcgttactcactggctgcggcgaggcgaagaactccgccatggcagttttagctggcgaatgggcgtggaacaggtcgatgtcctcgaaccactccagctccttgagcccaagagacgagtctttctgcaacagcaaacacaaaacagatggaaaaggaaaactgagataagaataagaacgtgaaaagcttnn

SEQ ID NO: 215980 - DNA, 1985 bp, Zea Mays
ttctcgcgccgcaacgcgacgcaatgccccacccgcacggtcgcgccgcgcagcgcaggaacccccaccacgcggtcggcgtcggcgtcggcggcggtgctcccgcctccccgccgtcggcgtagctcccgcgcgcttcggccctgggcgccggtgtggtttctccatcacgctctctcgcgcttcctacctgcgtgcgccctgctgcccggtgatggccagccgtctcttcgtgctccgtcggcacacgaggtggtggcagcggcaggcgccacggcctcgctcgctttgcccgccgtctcacggtggggactcggcgtcttcccatgggacgctggagctgctcgcgcgtctgcgcagctcaccatcgttcttcaggttgttgcagagttgtagcattcaagcctgccattgtatccatacgagtccatcagtcaatagcggaaatcaggctactgcagagcctcaacaacagaatccaggagtgcctgtaccggttgatggttctagtgaactaaaacccaagaggacaaagctgaaaggaaggagggcagtgacaaattttttgaaatccttgagatggaaaaagaaaaaggagtttcaaagaatgactgcagaggagaagattttgtacaaactgaagctagctcgaaagaaggaagagcggcttgttgtggcactgaagaaaattgaaccagaggatccatcagaacctacacatgatcccgaggtgcttacacctgaagagcacttctatttcctcaagatgggccaaaaatgtaaaaattatgtgcctgttggaagacgtggaatttaccagggagtgatcttgaacatgcacttgcattggaaaaagcatcaaactctccaggtaattgtgaagacatttacaccagaggaggtcaaggaaattgccatcgagttagccacactaagtggtgggattgtgcttgacattcaagatgggaacacaattattatgtacagagggaaaaactatgcacagccaccaccagagatcatgtctccaaaagtttccctctctagaaaaaaggcactggataaatccaaatatatggaaaagctcagagctcttaggcggtacattcccagacttgagcaggagcttgaagatcttcatgcacagatgaagttagctggagagcatcaaggacaaaatgcagggaaacatgttgcttcaatttcacataatacaaacagtatgccagtgagaaaagaaccttgtggttcaattcgcaacaaaacagtatctgatctcctatcagaaactgtagagggatccaagaggttagaggatgaaagttctgcgattgaagacgactcagcttcagagtctctgtcatttacagagtctgaggatctctctgacatttttgagacagaatcagaggagcaggaagaggacaacaaggatcgccccttatatctcgataggctggataagtttccctcaggaaaaaatgataatgaaccagatgattttgaggagcatctgcggaggatcgcttcactttcagataagactgattcaccttcaaaagaactgaaagtgtcagagctcgatgagattgataaaatctttctgagagcaagttcgttgttgaagaaaaggtgaacctttgggatttgtatatgacaatcgtcatatttatatgcactgcgaaaagtattttgtgcagttttaatggcatcttcagaaaaaaagtttatgatcgtctagtgatagggccaaccctcaaagtttgtggtcaccattgttttacggtgattataatataactggaattctgtggggttgtttgaatttgttgactgataacttcgatgtgtcatacagcagattcttgttgtttcatgcttttgttgcagtttctgatgttagttgtagccatcctttgtaaaattgtaagtgctattttttttctaaaaccttgaacatatgcgactacccactcgtacaaaac

SEQ ID NO: 215981 - DNA, 951 bp, Zea Mays
tatattataaaatattgactttctcctgtgcacatgatggcgggagtattagaggcaataagaataagctgccttggatatccaacaaggaggagatttgatgaatttgttgaccgttttggtgttttactacctgaagttcttggtgaaagttatgatgaagttactgctacaaacatgcttcttgacaaagtcaatctcacaggatatcagatagggaaaactaaagtgtttctgcgtgctggtcaaatggctgaattagatgctatgagaactgaggtcttgggatgttctgctagtaaaatccagagaaaagtacggtcatacttagctcgaaaaaaattcattcagttgcgaatatctgctactcatctccaggctatttgcagagggcaaattgcaaggcattattacgatgatctccgcagggaggctgcttcattgaccatacaaacctgctaccgtatgtactttgcaaggaagaactacataaatctctgtactgcatcaactactatccaatctggtctacgtggtatggctgctcgcaagaaactccagttccgtcaacatacaaaagctgcggtgaccattcagagtttctggcgtagttatgtagcacgctctcgattcatgagtttgaagaaggcagccattgctactcaatgtgcttggagaggaagagtggccagaaaagagcttcgaaaacttaaaatggctgctaaagaaactggtgctctccaagctgctaagaataaattagagaaacaagttgaggagctcacgtggcggctgcaactagagaaacgcatgagggagtacaatatgttgatctctaccgatgaccaggaggtgatctgggagatcaggtacataagccaaccagagaatcacgtaaacagggaaataaggtaaccaatcaatcacctaaacaggaaaagggtgcctaag

SEQ ID NO: 215982 - DNA, 3885 bp, Zea Mays
tagctgtgcagtccgaccacgcctacggcaaaatggcgtcgcacacccagttcatggctgcagcaattcatttactgaatacggcggtaacgtatgctttagagtcatcactgcggacagcctgagtccaccccccgtccctttccctctcctacctccacctccacgacaacaagcaaatccccatccagttccaaaccctaactcaaatgctcgctttgactgcctcagcctcatccgcttcgtcccatccttatcgccacgcctccgcgcacactcgtcgcccccgcctacgtgcggtcctcgcgatggcgggctccgacgacccccgtgcagcgcccgccagatcggtcgccgtcgtcggcgccggggtcagcgggctcgcggcggcgtacaggctcagacagagcggcgtgaacgtaacggtgttcgaagcggccgacagggcgggaggaaagatacggaccaattccgagggcgggtttgtctgggatgaaggagctaacaccatgacagaaggtgaatgggaggccagtagactgattgatgatcttggtctacaagacaaacagcagtatcctaactcccaacacaagcgttacattgtcaaagatggagcaccagcactgattccttcggatcccatttcgctaatgaaaagcagtgttctttcgacaaaatcaaaggtatgttcagccattgagtacaaactgccgagtgccgactaacaaaatgtcataacattgctagtatcaatgcctaccatcatcaattgaagtagtttgttagttactttaaggtaactacttgataaattcttatattcctccatttatttttccttcaagctatgtgtttatgatctgcggtgattatgtcattttattctaaaaaaaactcgacctgcggagggtaagacaacccctggacattatattaagaagaccttctcaagtgggttgagaaaaccctcaaacccctgctccacccatacacagcggcaccgtagcccatgtgagaatgacagcgattggggccatgcattagacctgtgctttggcgtgggacggacgaggggatttcccccgaacccctgccgtagcccatgtgagaatgaccgcaactagggccggacattagacttgtgctttagcgtggaacagatgaggagatttccccccgaacctctgccacacccatacacaacggcactgtagcccatatgagaatgaccgcgaccagagccggacattagacatgttctttggcgtgggacagacgagtggaatttttaaccttagattgaaattcactctcacagggagttgaactcaggacatgagggtgctactcagaccacgtaaccaactcagttagaggccttcgtatgtcattatgttttaactgaattatgttttatctgtggctctttgaagattgcgttattttttgaaccatttctctacaagaaagctaacacaagaaactctggaaaagtgtctgaggagcacttgagtgagaggtgaaccttcgtattcttcgtgtcttgcattgatatgaaatttaaaattgcaatcatatatcaatatatcatactagtattattttctttaagtaagtcttgagctatgcgttatacctatcgattcctcattattttcaaattctgaaaatcaatattatggtatcccatataatatacaccattgcagtgttctcttttgagtgtagagaactagagataatagaattatcttgtttgaaaacatttgcagtgttgggagcttctgtgaacgccactttggaagagaagttgttgactattttgttgatccatttgtagctggaacaagtgcaggagatccagagtcactatctattcgtcatgcattcccagcattgtggaatttggaaagaaagtatggttcagttattgttggtgccatcttgtctaagctagcagctaaaggtgatccagtaaagacaagacatgattcatcagggaaaagaaggaatagacgagtgtcgttttcatttcatggtggaatgcaggtattctcctccattgtttttttccaattagaatcccttgattgaattccttttgtctgttttattactatcaaatattttaatttggagcccttgaaattttcatcagccctactaattttgttggtgccgtttaaaaatggtgagttcagatttcagactgcaagttatttatttgttaaactcaaggatattacttcacaatgagtatcactttaacacttagaaaagctattagtgtgtggtactgtggttatgctttacattcatatccaactcaaggattctgttacatcctaccataatcattctttgtagacatgatacatgcttattagcttgcgaagatatgtgttttgagcaaataaattgaagtgaaaatatatcttttaaacaaactatatgtttttgacattgcagatagtttgcatggaagcagtgatgagtcctgaatatactcatctatcatgagaaatacaaacaaatctagatttttatacttactttggctccttatcccttacccactctatggaatgcatgttttatagcattcaagtatacatactgtctgacatttcacatttatgttgttaagttatatgttttgttttcctggctgagtaagttcaaaagttctttgttatttcagtcactaataaatgcacttcacaatgaagttggagatgataatgtgaagcttggtacagaagtgttgtcattggcatgtacatttgatggagttcctgcactaggcaggtggtcaatttctgttgattcgaaggatagcggtgacaaggaccttgctagtaaccaaacctttgatgctgttataatgacagctccattgtcaaatgtccggaggatgaagttcacaaaaggtggagctccggttgttcttgactttcttcctaagatggattatctaccactatctctcatggtgactgcttttaagaaggatgatgtcaagaaacctctggaaggatttggggtcttaataccttacaaggaacagcaaaaacatggtctgaaaacccttgggactctcttttcctcaatgatgttcccagatcgagctcctgatgaccaatatttatatacaacatttgttgggggtagccacaatagagatcttgctggagctccaacgtctattctgaaacaacttgtgacctctgaccttaaaaaactcttgggcgtagaggggcaaccaacttttgtcaagcatgtatactggggaaatgcttttcctttgtatggccatgattatagttctgtattggaagctatagaaaagatggagaaaaaccttccagggttcttctacgcaggaaataacaaggatgggcttgctgttggaagtgttatagcttcaggaagcaaggctgctgaccttgcaatctcatatcttgaatctcacaccaagcataataattcacattgaaagcgtctgacctatcctctagcagttgtcgacaaatttgtccagttcatgtacagtagaaaccgatgcgttgcagtctcagaacatcttcacttcagatattaacccttcgttgaacatccaccagaaaggtagtcacatgtgtaagtcggaaaatgaggttaaaaactattatggtggccgaaatgctcttttttgttttcctcacaagtggcctacgacacttgatgttggaaatacatttaaatttgttgaattgtttgagaacacatgcgtgacgtgtaatatttgcctattgtgattttagcagtagattctttgccagattatgctttacgcctttacagtgacctaggagtcaagggccccacatattatatttattt

SEQ ID NO: 215983 - DNA, 3142 bp, Zea Mays
gtatgctttagagtcatcactgcggacagcctgagtccaccccccgtccctttccctctcctacctccacctccacgacaacaagcaaatccccatccagttccaaaccctaactcaaatgctcgctttgactgcctcagcctcatccgcttcgtcccatccttatcgccacgcctccgcgcacactcgtcgcccccgcctacgtgcggtcctcgcgatggcgggctccgacgacccccgtgcagcgcccgccagatcggtcgccgtcgtcggcgccggggtcagcgggctcgcggcggcgtacaggctcagacagagcggcgtgaacgtaacggtgttcgaagcggccgacagggcgggaggaaagatacggaccaattccgagggcgggtttgtctgggatgaaggagctaacaccatgacagaaggtgaatgggaggccagtagactgattgatgatcttggtctacaagacaaacagcagtatcctaactcccaacacaagcgttacattgtcaaagatggagcaccagcactgattccttcggatcccatttcgctaatgaaaagcagtgttctttcgacaaaatcaaaggtatgttcagccattgagtacaaactgccgagtgccgactaacaaaatgtcataacattgctagtatcaatgcctaccatcatcaattgaagtagtttgttagttactttaaggtaactacttgataaattcttatattcctccatttatttttccttcaagctatgtgtttatgatctgcggtgattatgtcattttattctaaaaaaaactcgacctgcggagggtaagacaacccctggacattatattaagaagaccttctcaagtgggttgagaaaaccctcaaacccctgctccacccatacacagcggcaccgtagcccatgtgagaatgacagcgattggggccatgcattagacctgtgctttggcgtgggacggacgaggggatttcccccgaacccctgccgtagcccatgtgagaatgaccgcaactagggccggacattagacttgtgctttagcgtggaacagatgaggagatttccccccgaacctctgccacacccatacacaacggcactgtagcccatatgagaatgaccgcgaccagagccggacattagacatgttctttggcgtgggacagacgagtggaatttttaaccttagattgaaattcactctcacagggagttgaactcaggacatgagggtgctactcagaccacgtaaccaactcagttagaggccttcgtatgtcattatgttttaactgaattatgttttatctgtggctctttgaagattgcgttattttttgaaccatttctctacaagaaagctaacacaagaaactctggaaaagtgtctgaggagcacttgagtgagaggtgaaccttcgtattcttcgtgtcttgcattgatatgaaatttaaaattgcaatcatatatcaatatatcatactagtattattttctttaagtaagtcttgagctatgcgttatacctatcgattcctcattattttcaaattctgaaaatcaatattatggtatcccatataatatacaccattgcagtgttctcttttgagtgtagagaactagagataatagaattatcttgtttgaaaacatttgcagtgttgggagcttctgtgaacgccactttggaagagaagttgttgactattttgttgatccatttgtagctggaacaagtgcaggagatccagagtcactatctattcgtcatgcattcccagcattgtggaatttggaaagaaagtatggttcagttattgttggtgccatcttgtctaagctagcagctaaaggtgatccagtaaagacaagacatgattcatcagggaaaagaaggaatagacgagtgtcgttttcatttcatggtggaatgcagtcactaataaatgcacttcacaatgaagttggagatgataatgtgaagcttggtacagaagtgttgtcattggcatgtacatttgatggagttcctgcactaggcaggtggtcaatttctgttgattcgaaggatagcggtgacaaggaccttgctagtaaccaaacctttgatgctgttataatgacagctccattgtcaaatgtccggaggatgaagttcacaaaaggtggagctccggttgttcttgactttcttcctaagatggattatctaccactatctctcatggtgactgcttttaagaaggatgatgtcaagaaacctctggaaggatttggggtcttaataccttacaaggaacagcaaaaacatggtctgaaaacccttgggactctcttttcctcaatgatgttcccagatcgagctcctgatgaccaatatttatatacaacatttgttgggggtagccacaatagagatcttgctggagctccaacgtctattctgaaacaacttgtgacctctgaccttaaaaaactcttgggcgtagaggggcaaccaacttttgtcaagcatgtatactggggaaatgcttttcctttgtatggccatgattatagttctgtattggaagctatagaaaagatggagaaaaaccttccagggttcttctacgcaggaaataacaaggatgggcttgctgttggaagtgttatagcttcaggaagcaaggctgctgaccttgcaatctcatatcttgaatctcacaccaagcataataattcacattgaaagcgtctgacctatcctctagcagttgtcgacaaatttgtccagttcatgtacagtagaaaccgatgcgttgcagtctcagaacatcttcacttcagatattaacccttcgttgaacatccaccagaaaggtagtcacatgtgtaagtcggaaaatgaggttaaaaactattatggtggccgaaatgctcttttttgttttcctcacaagtggcctacgacacttgatgttggaaatacatttaaatttgttgaattgtttgagaacacatgcgtgacgtgtaatatttgcctattgtgattttagcagtagattctttgccagattatgctttacgcctttacagtgacctaggagtcaagggccccacatattatatttattt

SEQ ID NO: 215984 - DNA, 2842 bp, Zea Mays
gacagcctgagtccaccccccgtccctttccctctcctacctccacctccacgacaacaagcaaatccccatccagttccaaaccctaactcaaatgctcgctttgactgcctcagcctcatccgcttcgtcccatccttatcgccacgcctccgcgcacactcgtcgcccccgcctacgtgcggtcctcgcgatggcgggctccgacgacccccgtgcagcgcccgccagatcggtcgccgtcgtcggcgccggggtcagcgggctcgcggcggcgtacaggctcagacagagcggcgtgaacgtaacggtgttcgaagcggccgacagggcgggaggaaagatacggaccaattccgagggcgggtttgtctgggatgaaggagctaacaccatgacagaaggtgaatgggaggccagtagactgattgatgatcttggtctacaagacaaacagcagtatcctaactcccaacacaagcgttacattgtcaaagatggagcaccagcactgattccttcggatcccatttcgctaatgaaaagcagtgttctttcgacaaaatcaaaggtatgttcagccattgagtacaaactgccgagtgccgactaacaaaatgtcataacattgctagtatcaatgcctaccatcatcaattgaagtagtttgttagttactttaaggtaactacttgataaattcttatattcctccatttatttttccttcaagctatgtgtttatgatctgcggtgattatgtcattttattctaaaaaaaactcgacctgcggagggtaagacaacccctggacattatattaagaagaccttctcaagtgggttgagaaaaccctcaaacccctgctccacccatacacagcggcaccgtagcccatgtgagaatgacagcgattggggccatgcattagacctgtgctttggcgtgggacggacgaggggatttcccccgaacccctgccgtagcccatgtgagaatgaccgcaactagggccggacattagacttgtgctttagcgtggaacagatgaggagatttccccccgaacctctgccacacccatacacaacggcactgtagcccatatgagaatgaccgcgaccagagccggacattagacatgttctttggcgtgggacagacgagtggaatttttaaccttagattgaaattcactctcacagggagttgaactcaggacatgagggtgctactcagaccacgtaaccaactcagttagaggccttcgtatgtcattatgttttaactgaattatgttttatctgtggctctttgaagattgcgttattttttgaaccatttctctacaagaaagctaacacaagaaactctggaaaagtgtctgaggagcacttgagtgagagtgttgggagcttctgtgaacgccactttggaagagaagttgttgactattttgttgatccatttgtagctggaacaagtgcaggagatccagagtcactatctattcgtcatgcattcccagcattgtggaatttggaaagaaagtatggttcagttattgttggtgccatcttgtctaagctagcagctaaaggtgatccagtaaagacaagacatgattcatcagggaaaagaaggaatagacgagtgtcgttttcatttcatggtggaatgcagttggagatgataatgtgaagcttggtacagaagtgttgtcattggcatgtacatttgatggagttcctgcactaggcaggtggtcaatttctgttgattcgaaggatagcggtgacaaggaccttgctagtaaccaaacctttgatgctgttataatgacagctccattgtcaaatgtccggaggatgaagttcacaaaaggtggagctccggttgttcttgactttcttcctaaggtcagatggattatctaccactatctctcatggtgactgcttttaagaaggatgatgtcaagaaacctctggaaggatttggggtcttaataccttacaaggaacagcaaaaacatggtctgaaaacccttgggactctcttttcctcaatgatgttcccagatcgagctcctgatgaccaatatttatatacaacatttgttgggggtagccacaatagagatcttgctggagctccaacgtctattctgaaacaacttgtgacctctgaccttaaaaaactcttgggcgtagaggggcaaccaacttttgtcaagcatgtatactggggaaatgcttttcctttgtatggccatgattatagttctgtattggaagctatagaaaagatggagaaaaaccttccagggttcttctacgcaggaaataacaaggatgggcttgctgttggaagtgttatagcttcaggaagcaaggctgctgaccttgcaatctcatatcttgaatctcacaccaagcataataattcacattgaaagcgtctgacctatcctctagcagttgtcgacaaatttgtccagttcatgtacagtagaaaccgatgcgttgcagtctcagaacatcttcacttcagatattaacccttcgttgaacatccaccagaaaggtagtcacatgtgtaagtcggaaaatgaggttaaaaactattatggtggccgaaatgctcttttttgttttcctcacaagtggcctacgacacttgatgttggaaatacatttaaatttgttgaattgtttgagaacacatgcgtgacgtgtaatatttgcctattgtgattttagcagtagattctttgccagattatgctttacgcctttacagtgacctaggagtcaagggccccacatattatatttattt

SEQ ID NO: 215985 - DNA, 2861 bp, Zea Mays
gacagcctgagtccaccccccgtccctttccctctcctacctccacctccacgacaacaagcaaatccccatccagttccaaaccctaactcaaatgctcgctttgactgcctcagcctcatccgcttcgtcccatccttatcgccacgcctccgcgcacactcgtcgcccccgcctacgtgcggtcctcgcgatggcgggctccgacgacccccgtgcagcgcccgccagatcggtcgccgtcgtcggcgccggggtcagcgggctcgcggcggcgtacaggctcagacagagcggcgtgaacgtaacggtgttcgaagcggccgacagggcgggaggaaagatacggaccaattccgagggcgggtttgtctgggatgaaggagctaacaccatgacagaaggtgaatgggaggccagtagactgattgatgatcttggtctacaagacaaacagcagtatcctaactcccaacacaagcgttacattgtcaaagatggagcaccagcactgattccttcggatcccatttcgctaatgaaaagcagtgttctttcgacaaaatcaaaggtatgttcagccattgagtacaaactgccgagtgccgactaacaaaatgtcataacattgctagtatcaatgcctaccatcatcaattgaagtagtttgttagttactttaaggtaactacttgataaattcttatattcctccatttatttttccttcaagctatgtgtttatgatctgcggtgattatgtcattttattctaaaaaaaactcgacctgcggagggtaagacaacccctggacattatattaagaagaccttctcaagtgggttgagaaaaccctcaaacccctgctccacccatacacagcggcaccgtagcccatgtgagaatgacagcgattggggccatgcattagacctgtgctttggcgtgggacggacgaggggatttcccccgaacccctgccgtagcccatgtgagaatgaccgcaactagggccggacattagacttgtgctttagcgtggaacagatgaggagatttccccccgaacctctgccacacccatacacaacggcactgtagcccatatgagaatgaccgcgaccagagccggacattagacatgttctttggcgtgggacagacgagtggaatttttaaccttagattgaaattcactctcacagggagttgaactcaggacatgagggtgctactcagaccacgtaaccaactcagttagaggccttcgtatgtcattatgttttaactgaattatgttttatctgtggctctttgaagattgcgttattttttgaaccatttctctacaagaaagctaacacaagaaactctggaaaagtgtctgaggagcacttgagtgagagtgttgggagcttctgtgaacgccactttggaagagaagttgttgactattttgttgatccatttgtagctggaacaagtgcaggagatccagagtcactatctattcgtcatgcattcccagcattgtggaatttggaaagaaagtatggttcagttattgttggtgccatcttgtctaagctagcagctaaaggtgatccagtaaagacaagacatgattcatcagggaaaagaaggaatagacgagtgtcgttttcatttcatggtggaattcactaataaatgcacttcacaatgaagttggagatgataatgtgaagcttggtacagaagtgttgtcattggcatgtacatttgatggagttcctgcactaggcaggtggtcaatttctgttgattcgaaggatagcggtgacaaggaccttgctagtaaccaaacctttgatgctgttataatgacagctccattgtcaaatgtccggaggatgaagttcacaaaaggtggagctccggttgttcttgactttcttcctaagatggattatctaccactatctctcatggtgactgcttttaagaaggatgatgtcaagaaacctctggaaggatttggggtcttaataccttacaaggaacagcaaaaacatggtctgaaaacccttgggactctcttttcctcaatgatgttcccagatcgagctcctgatgaccaatatttatatacaacatttgttgggggtagccacaatagagatcttgctggagctccaacgtctattctgaaacaacttgtgacctctgaccttaaaaaactcttgggcgtagaggggcaaccaacttttgtcaagcatgtatactggggaaatgcttttcctttgtatggccatgattatagttctgtattggaagctatagaaaagatggagaaaaaccttccagggttcttctacgcaggaaataacaaggatgggcttgctgttggaagtgttatagcttcaggaagcaaggctgctgaccttgcaatctcatatcttgaatctcacaccaagcataataattcacattgaaagcgtctgacctatcctctagcagttgtcgacaaatttgtccagttcatgtacagtagaaaccgatgcgttgcagtctcagaacatcttcacttcagatattaacccttcgttgaacatccaccagaaaggtagtcacatgtgtaagtcggaaaatgaggttaaaaactattatggtggccgaaatgctcttttttgttttcctcacaagtggcctacgacacttgatgttggaaatacatttaaatttgttgaattgtttgagaacacatgcgtgacgtgtaatatttgcctattgtgattttagcagtagattctttgccagattatgctttacgcctttacagtgacctaggagtcaagggccccacatattatatttattt

SEQ ID NO: 215986 - DNA, 2870 bp, Zea Mays
gacagcctgagtccaccccccgtccctttccctctcctacctccacctccacgacaacaagcaaatccccatccagttccaaaccctaactcaaatgctcgctttgactgcctcagcctcatccgcttcgtcccatccttatcgccacgcctccgcgcacactcgtcgcccccgcctacgtgcggtcctcgcgatggcgggctccgacgacccccgtgcagcgcccgccagatcggtcgccgtcgtcggcgccggggtcagcgggctcgcggcggcgtacaggctcagacagagcggcgtgaacgtaacggtgttcgaagcggccgacagggcgggaggaaagatacggaccaattccgagggcgggtttgtctgggatgaaggagctaacaccatgacagaaggtgaatgggaggccagtagactgattgatgatcttggtctacaagacaaacagcagtatcctaactcccaacacaagcgttacattgtcaaagatggagcaccagcactgattccttcggatcccatttcgctaatgaaaagcagtgttctttcgacaaaatcaaaggtatgttcagccattgagtacaaactgccgagtgccgactaacaaaatgtcataacattgctagtatcaatgcctaccatcatcaattgaagtagtttgttagttactttaaggtaactacttgataaattcttatattcctccatttatttttccttcaagctatgtgtttatgatctgcggtgattatgtcattttattctaaaaaaaactcgacctgcggagggtaagacaacccctggacattatattaagaagaccttctcaagtgggttgagaaaaccctcaaacccctgctccacccatacacagcggcaccgtagcccatgtgagaatgacagcgattggggccatgcattagacctgtgctttggcgtgggacggacgaggggatttcccccgaacccctgccgtagcccatgtgagaatgaccgcaactagggccggacattagacttgtgctttagcgtggaacagatgaggagatttccccccgaacctctgccacacccatacacaacggcactgtagcccatatgagaatgaccgcgaccagagccggacattagacatgttctttggcgtgggacagacgagtggaatttttaaccttagattgaaattcactctcacagggagttgaactcaggacatgagggtgctactcagaccacgtaaccaactcagttagaggccttcgtatgtcattatgttttaactgaattatgttttatctgtggctctttgaagattgcgttattttttgaaccatttctctacaagaaagctaacacaagaaactctggaaaagtgtctgaggagcacttgagtgagagtgttgggagcttctgtgaacgccactttggaagagaagttgttgactattttgttgatccatttgtagctggaacaagtgcaggagatccagagtcactatctattcgtcatgcattcccagcattgtggaatttggaaagaaagtatggttcagttattgttggtgccatcttgtctaagctagcagctaaaggtgatccagtaaagacaagacatgattcatcagggaaaagaaggaatagacgagtgtcgttttcatttcatggtggaatgcagtcactaataaatgcacttcacaatgaagttggagatgataatgtgaagcttggtacagaagtgttgtcattggcatgtacatttgatggagttcctgcactaggcaggtggtcaatttctgttgattcgaaggatagcggtgacaaggaccttgctagtaaccaaacctttgatgctgttataatgacagctccattgtcaaatgtccggaggatgaagttcacaaaaggtggagctccggttgttcttgactttcttcctaaggtcagatggattatctaccactatctctcatggtgactgcttttaagaaggatgatgtcaagaaacctctggaaggatttggggtcttaataccttacaaggaacagcaaaaacatggtctgaaaacccttgggactctcttttcctcaatgatgttcccagatcgagctcctgatgaccaatatttatatacaacatttgttgggggtagccacaatagagatcttgctggagctccaacgtctattctgaaacaacttgtgacctctgaccttaaaaaactcttgggcgtagaggggcaaccaacttttgtcaagcatgtatactggggaaatgcttttcctttgtatggccatgattatagttctgtattggaagctatagaaaagatggagaaaaaccttccagggttcttctacgcaggaaataacaaggatgggcttgctgttggaagtgttatagcttcaggaagcaaggctgctgaccttgcaatctcatatcttgaatctcacaccaagcataataattcacattgaaagcgtctgacctatcctctagcagttgtcgacaaatttgtccagttcatgtacagtagaaaccgatgcgttgcagtctcagaacatcttcacttcagatattaacccttcgttgaacatccaccagaaaggtagtcacatgtgtaagtcggaaaatgaggttaaaaactattatggtggccgaaatgctcttttttgttttcctcacaagtggcctacgacacttgatgttggaaatacatttaaatttgttgaattgtttgagaacacatgcgtgacgtgtaatatttgcctattgtgattttagcagtagattctttgccagattatgctttacgcctttacagtgacctaggagtcaagggccccacatattatatttattt

SEQ ID NO: 215987 - DNA, 2856 bp, Zea Mays
cctgagtccaccccccgtccctttccctctcctacctccacctccacgacaacaagcaaatccccatccagttccaaaccctaactcaaatgctcgctttgactgcctcagcctcatccgcttcgtcccatccttatcgccacgcctccgcgcacactcgtcgcccccgcctacgtgcggtcctcgcgatggcgggctccgacgacccccgtgcagcgcccgccagatcggtcgccgtcgtcggcgccggggtcagcgggctcgcggcggcgtacaggctcagacagagcggcgtgaacgtaacggtgttcgaagcggccgacagggcgggaggaaagatacggaccaattccgagggcgggtttgtctgggatgaaggagctaacaccatgaaggtgaatgggaggccagtagactgattgatgatcttggtctacaagacaaacagcagtatcctaactcccaacacaagcgttacattgtcaaagatggagcaccagcactgattccttcggatcccatttcgctaatgaaaagcagtgttctttcgacaaaatcaaaggtatgttcagccattgagtacaaactgccgagtgccgactaacaaaatgtcataacattgctagtatcaatgcctaccatcatcaattgaagtagtttgttagttactttaaggtaactacttgataaattcttatattcctccatttatttttccttcaagctatgtgtttatgatctgcggtgattatgtcattttattctaaaaaaaactcgacctgcggagggtaagacaacccctggacattatattaagaagaccttctcaagtgggttgagaaaaccctcaaacccctgctccacccatacacagcggcaccgtagcccatgtgagaatgacagcgattggggccatgcattagacctgtgctttggcgtgggacggacgaggggatttcccccgaacccctgccgtagcccatgtgagaatgaccgcaactagggccggacattagacttgtgctttagcgtggaacagatgaggagatttccccccgaacctctgccacacccatacacaacggcactgtagcccatatgagaatgaccgcgaccagagccggacattagacatgttctttggcgtgggacagacgagtggaatttttaaccttagattgaaattcactctcacagggagttgaactcaggacatgagggtgctactcagaccacgtaaccaactcagttagaggccttcgtatgtcattatgttttaactgaattatgttttatctgtggctctttgaagattgcgttattttttgaaccatttctctacaagaaagctaacacaagaaactctggaaaagtgtctgaggagcacttgagtgagagtgttgggagcttctgtgaacgccactttggaagagaagttgttgactattttgttgatccatttgtagctggaacaagtgcaggagatccagagtcactatctattcgtcatgcattcccagcattgtggaatttggaaagaaagtatggttcagttattgttggtgccatcttgtctaagctagcagctaaaggtgatccagtaaagacaagacatgattcatcagggaaaagaaggaatagacgagtgtcgttttcatttcatggtggaatgcagtcactaataaatgcacttcacaatgaagttggagatgataatgtgaagcttggtacagaagtgttgtcattggcatgtacatttgatggagttcctgcactaggcaggtggtcaatttctgttgattcgaaggatagcggtgacaaggaccttgctagtaaccaaacctttgatgctgttataatgacagctccattgtcaaatgtccggaggatgaagttcacaaaaggtggagctccggttgttcttgactttcttcctaagatggattatctaccactatctctcatggtgactgcttttaagaaggatgatgtcaagaaacctctggaaggatttggggtcttaataccttacaaggaacagcaaaaacatggtctgaaaacccttgggactctcttttcctcaatgatgttcccagatcgagctcctgatgaccaatatttatatacaacatttgttgggggtagccacaatagagatcttgctggagctccaacgtctattctgaaacaacttgtgacctctgaccttaaaaaactcttgggcgtagaggggcaaccaacttttgtcaagcatgtatactggggaaatgcttttcctttgtatggccatgattatagttctgtattggaagctatagaaaagatggagaaaaaccttccagggttcttctacgcaggaaataacaaggatgggcttgctgttggaagtgttatagcttcaggaagcaaggctgctgaccttgcaatctcatatcttgaatctcacaccaagcataataattcacattgaaagcgtctgacctatcctctagcagttgtcgacaaatttgtccagttcatgtacagtagaaaccgatgcgttgcagtctcagaacatcttcacttcagatattaacccttcgttgaacatccaccagaaaggtagtcacatgtgtaagtcggaaaatgaggttaaaaactattatggtggccgaaatgctcttttttgttttcctcacaagtggcctacgacacttgatgttggaaatacatttaaatttgttgaattgtttgagaacacatgcgtgacgtgtaatatttgcctattgtgattttagcagtagattctttgccagattatgctttacgcctttacagtgacctaggagtcaagggccccacatattatatttattt

SEQ ID NO: 215988 - DNA, 2001 bp, Zea Mays
cctgagtccaccccccgtccctttccctctcctacctccacctccacgacaacaagcaaatccccatccagttccaaaccctaactcaaatgctcgctttgactgcctcagcctcatccgcttcgtcccatccttatcgccacgcctccgcgcacactcgtcgcccccgcctacgtgcggtcctcgcgatggcgggctccgacgacccccgtgcagcgcccgccagatcggtcgccgtcgtcggcgccggggtcagcgggctcgcggcggcgtacaggctcagacagagcggcgtgaacgtaacggtgttcgaagcggccgacagggcgggaggaaagatacggaccaattccgagggcgggtttgtctgggatgaaggagctaacaccatgacagaaggtgaatgggaggccagtagactgattgatgatcttggtctacaagacaaacagcagtatcctaactcccaacacaagcgttacattgtcaaagatggagcaccagcactgattccttcggatcccatttcgctaatgaaaagcagtgttctttcgacaaaatcaaagtgttgggagcttctgtgaacgccactttggaagagaagttgttgactattttgttgatccatttgtagctggaacaagtgcaggagatccagagtcactatctattcgtcatgcattcccagcattgtggaatttggaaagaaagtatggttcagttattgttggtgccatcttgtctaagctagcagctaaaggtgatccagtaaagacaagacatgattcatcagggaaaagaaggaatagacgagtgtcgttttcatttcatggtggaatgcagttggagatgataatgtgaagcttggtacagaagtgttgtcattggcatgtacatttgatggagttcctgcactaggcaggtggtcaatttctgttgattcgaaggatagcggtgacaaggaccttgctagtaaccaaacctttgatgctgttataatgacagctccattgtcaaatgtccggaggatgaagttcacaaaaggtggagctccggttgttcttgactttcttcctaaggtcagatggattatctaccactatctctcatggtgactgcttttaagaaggatgatgtcaagaaacctctggaaggatttggggtcttaataccttacaaggaacagcaaaaacatggtctgaaaacccttgggactctcttttcctcaatgatgttcccagatcgagctcctgatgaccaatatttatatacaacatttgttgggggtagccacaatagagatcttgctggagctccaacgtctattctgaaacaacttgtgacctctgaccttaaaaaactcttgggcgtagaggggcaaccaacttttgtcaagcatgtatactggggaaatgcttttcctttgtatggccatgattatagttctgtattggaagctatagaaaagatggagaaaaaccttccagggttcttctacgcaggaaataacaaggatgggcttgctgttggaagtgttatagcttcaggaagcaaggctgctgaccttgcaatctcatatcttgaatctcacaccaagcataataattcacattgaaagcgtctgacctatcctctagcagttgtcgacaaatttgtccagttcatgtacagtagaaaccgatgcgttgcagtctcagaacatcttcacttcagatattaacccttcgttgaacatccaccagaaaggtagtcacatgtgtaagtcggaaaatgaggttaaaaactattatggtggccgaaatgctcttttttgttttcctcacaagtggcctacgacacttgatgttggaaatacatttaaatttgttgaattgtttgagaacacatgcgtgacgtgtaatatttgcctattgtgattttagcagtagattctttgccagattatgctttacgcctttacagtgacctaggagtcaagggccccacatattatatttattt

SEQ ID NO: 215989 - DNA, 2082 bp, Zea Mays
cctgagtccaccccccgtccctttccctctcctacctccacctccacgacaacaagcaaatccccatccagttccaaaccctaactcaaatgctcgctttgactgcctcagcctcatccgcttcgtcccatccttatcgccacgcctccgcgcacactcgtcgcccccgcctacgtgcggtcctcgcgatggcgggctccgacgacccccgtgcagcgcccgccagatcggtcgccgtcgtcggcgccggggtcagcgggctcgcggcggcgtacaggctcagacagagcggcgtgaacgtaacggtgttcgaagcggccgacagggcgggaggaaagatacggaccaattccgagggcgggtttgtctgggatgaaggagctaacaccatgacagaaggtgaatgggaggccagtagactgattgatgatcttggtctacaagacaaacagcagtatcctaactcccaacacaagcgttacattgtcaaagatggagcaccagcactgattccttcggatcccatttcgctaatgaaaagcagtgttctttcgacaaaatcaaagattgcgttattttttgaaccatttctctacaagaaagctaacacaagaaactctggaaaagtgtctgaggagcacttgagtgagagtgttgggagcttctgtgaacgccactttggaagagaagttgttgactattttgttgatccatttgtagctggaacaagtgcaggagatccagagtcactatctattcgtcatgcattcccagcattgtggaatttggaaagaaagtatggttcagttattgttggtgccatcttgtctaagctagcagctaaaggtgatccagtaaagacaagacatgattcatcagggaaaagaaggaatagacgagtgtcgttttcatttcatggtggaatgcagttggagatgataatgtgaagcttggtacagaagtgttgtcattggcatgtacatttgatggagttcctgcactaggcaggtggtcaatttctgttgattcgaaggatagcggtgacaaggaccttgctagtaaccaaacctttgatgctgttataatgacagctccattgtcaaatgtccggaggatgaagttcacaaaaggtggagctccggttgttcttgactttcttcctaagatggattatctaccactatctctcatggtgactgcttttaagaaggatgatgtcaagaaacctctggaaggatttggggtcttaataccttacaaggaacagcaaaaacatggtctgaaaacccttgggactctcttttcctcaatgatgttcccagatcgagctcctgatgaccaatatttatatacaacatttgttgggggtagccacaatagagatcttgctggagctccaacgtctattctgaaacaacttgtgacctctgaccttaaaaaactcttgggcgtagaggggcaaccaacttttgtcaagcatgtatactggggaaatgcttttcctttgtatggccatgattatagttctgtattggaagctatagaaaagatggagaaaaaccttccagggttcttctacgcaggaaataacaaggatgggcttgctgttggaagtgttatagcttcaggaagcaaggctgctgaccttgcaatctcatatcttgaatctcacaccaagcataataattcacattgaaagcgtctgacctatcctctagcagttgtcgacaaatttgtccagttcatgtacagtagaaaccgatgcgttgcagtctcagaacatcttcacttcagatattaacccttcgttgaacatccaccagaaaggtagtcacatgtgtaagtcggaaaatgaggttaaaaactattatggtggccgaaatgctcttttttgttttcctcacaagtggcctacgacacttgatgttggaaatacatttaaatttgttgaattgtttgagaacacatgcgtgacgtgtaatatttgcctattgtgattttagcagtagattctttgccagattatgctttacgcctttacagtgacctaggagtcaagggccccacatattatatttattt

SEQ ID NO: 215990 - DNA, 2115 bp, Zea Mays
cctgagtccaccccccgtccctttccctctcctacctccacctccacgacaacaagcaaatccccatccagttccaaaccctaactcaaatgctcgctttgactgcctcagcctcatccgcttcgtcccatccttatcgccacgcctccgcgcacactcgtcgcccccgcctacgtgcggtcctcgcgatggcgggctccgacgacccccgtgcagcgcccgccagatcggtcgccgtcgtcggcgccggggtcagcgggctcgcggcggcgtacaggctcagacagagcggcgtgaacgtaacggtgttcgaagcggccgacagggcgggaggaaagatacggaccaattccgagggcgggtttgtctgggatgaaggagctaacaccatgacagaaggtgaatgggaggccagtagactgattgatgatcttggtctacaagacaaacagcagtatcctaactcccaacacaagcgttacattgtcaaagatggagcaccagcactgattccttcggatcccatttcgctaatgaaaagcagtgttctttcgacaaaatcaaagattgcgttattttttgaaccatttctctacaagaaagctaacacaagaaactctggaaaagtgtctgaggagcacttgagtgagagtgttgggagcttctgtgaacgccactttggaagagaagttgttgactattttgttgatccatttgtagctggaacaagtgcaggagatccagagtcactatctattcgtcatgcattcccagcattgtggaatttggaaagaaagtatggttcagttattgttggtgccatcttgtctaagctagcagctaaaggtgatccagtaaagacaagacatgattcatcagggaaaagaaggaatagacgagtgtcgttttcatttcatggtggaatgcagtcactaataaatgcacttcacaatgaagttggagatgataatgtgaagcttggtacagaagtgttgtcattggcatgtacatttgatggagttcctgcactaggcaggtggtcaatttctgttgattcgaaggatagcggtgacaaggaccttgctagtaaccaaacctttgatgctgttataatgacagctccattgtcaaatgtccggaggatgaagttcacaaaaggtggagctccggttgttcttgactttcttcctaaggtcagatggattatctaccactatctctcatggtgactgcttttaagaaggatgatgtcaagaaacctctggaaggatttggggtcttaataccttacaaggaacagcaaaaacatggtctgaaaacccttgggactctcttttcctcaatgatgttcccagatcgagctcctgatgaccaatatttatatacaacatttgttgggggtagccacaatagagatcttgctggagctccaacgtctattctgaaacaacttgtgacctctgaccttaaaaaactcttgggcgtagaggggcaaccaacttttgtcaagcatgtatactggggaaatgcttttcctttgtatggccatgattatagttctgtattggaagctatagaaaagatggagaaaaaccttccagggttcttctacgcaggaaataacaaggatgggcttgctgttggaagtgttatagcttcaggaagcaaggctgctgaccttgcaatctcatatcttgaatctcacaccaagcataataattcacattgaaagcgtctgacctatcctctagcagttgtcgacaaatttgtccagttcatgtacagtagaaaccgatgcgttgcagtctcagaacatcttcacttcagatattaacccttcgttgaacatccaccagaaaggtagtcacatgtgtaagtcggaaaatgaggttaaaaactattatggtggccgaaatgctcttttttgttttcctcacaagtggcctacgacacttgatgttggaaatacatttaaatttgttgaattgtttgagaacacatgcgtgacgtgtaatatttgcctattgtgattttagcagtagattctttgccagattatgctttacgcctttacagtgacctaggagtcaagggccccacatattatatttattt

SEQ ID NO: 215991 - DNA, 2861 bp, Zea Mays
cctgagtccaccccccgtccctttccctctcctacctccacctccacgacaacaagcaaatccccatccagttccaaaccctaactcaaatgctcgctttgactgcctcagcctcatccgcttcgtcccatccttatcgccacgcctccgcgcacactcgtcgcccccgcctacgtgcggtcctcgcgatggcgggctccgacgacccccgtgcagcgcccgccagatcggtcgccgtcgtcggcgccggggtcagcgggctcgcggcggcgtacaggctcagacagagcggcgtgaacgtaacggtgttcgaagcggccgacagggcgggaggaaagatacggaccaattccgagggcgggtttgtctgggatgaaggagctaacaccatgacagaaggtgaatgggaggccagtagactgattgatgatcttggtctacaagacaaacagcacctaactcccaacacaagcgttacattgtcaaagatggagcaccagcactgattccttcggatcccatttcgctaatgaaaagcagtgttctttcgacaaaatcaaaggtatgttcagccattgagtacaaactgccgagtgccgactaacaaaatgtcataacattgctagtatcaatgcctaccatcatcaattgaagtagtttgttagttactttaaggtaactacttgataaattcttatattcctccatttatttttccttcaagctatgtgtttatgatctgcggtgattatgtcattttattctaaaaaaaactcgacctgcggagggtaagacaacccctggacattatattaagaagaccttctcaagtgggttgagaaaaccctcaaacccctgctccacccatacacagcggcaccgtagcccatgtgagaatgacagcgattggggccatgcattagacctgtgctttggcgtgggacggacgaggggatttcccccgaacccctgccgtagcccatgtgagaatgaccgcaactagggccggacattagacttgtgctttagcgtggaacagatgaggagatttccccccgaacctctgccacacccatacacaacggcactgtagcccatatgagaatgaccgcgaccagagccggacattagacatgttctttggcgtgggacagacgagtggaatttttaaccttagattgaaattcactctcacagggagttgaactcaggacatgagggtgctactcagaccacgtaaccaactcagttagaggccttcgtatgtcattatgttttaactgaattatgttttatctgtggctctttgaagattgcgttattttttgaaccatttctctacaagaaagctaacacaagaaactctggaaaagtgtctgaggagcacttgagtgagagtgttgggagcttctgtgaacgccactttggaagagaagttgttgactattttgttgatccatttgtagctggaacaagtgcaggagatccagagtcactatctattcgtcatgcattcccagcattgtggaatttggaaagaaagtatggttcagttattgttggtgccatcttgtctaagctagcagctaaaggtgatccagtaaagacaagacatgattcatcagggaaaagaaggaatagacgagtgtcgttttcatttcatggtggaatgcagtcactaataaatgcacttcacaatgaagttggagatgataatgtgaagcttggtacagaagtgttgtcattggcatgtacatttgatggagttcctgcactaggcaggtggtcaatttctgttgattcgaaggatagcggtgacaaggaccttgctagtaaccaaacctttgatgctgttataatgacagctccattgtcaaatgtccggaggatgaagttcacaaaaggtggagctccggttgttcttgactttcttcctaaggtcagatggattatctaccactatctctcatggtgactgcttttaagaaggatgatgtcaagaaacctctggaaggatttggggtcttaataccttacaaggaacagcaaaaacatggtctgaaaacccttgggactctcttttcctcaatgatgttcccagatcgagctcctgatgaccaatatttatatacaacatttgttgggggtagccacaatagagatcttgctggagctccaacgtctattctgaaacaacttgtgacctctgaccttaaaaaactcttgggcgtagaggggcaaccaacttttgtcaagcatgtatactggggaaatgcttttcctttgtatggccatgattatagttctgtattggaagctatagaaaagatggagaaaaaccttccagggttcttctacgcaggaaataacaaggatgggcttgctgttggaagtgttatagcttcaggaagcaaggctgctgaccttgcaatctcatatcttgaatctcacaccaagcataataattcacattgaaagcgtctgacctatcctctagcagttgtcgacaaatttgtccagttcatgtacagtagaaaccgatgcgttgcagtctcagaacatcttcacttcagatattaacccttcgttgaacatccaccagaaaggtagtcacatgtgtaagtcggaaaatgaggttaaaaactattatggtggccgaaatgctcttttttgttttcctcacaagtggcctacgacacttgatgttggaaatacatttaaatttgttgaattgtttgagaacacatgcgtgacgtgtaatatttgcctattgtgattttagcagtagattctttgccagattatgctttacgcctttacagtgacctaggagtcaagggccccacatattatatttattt

SEQ ID NO: 215992 - DNA, 2227 bp, Zea Mays
ttgcgccgcggcagcagaacaccttcctgacccgaattcaatccgtgcgcaggcaccctccgccggcgatggctcacgcatcgctcggcgcccgccccacgtccccgaggcgacgaccggcacaacgcgccctcgcggcgctacccgacacctgcgacgaaacgcgccaagttcaggagcgcgtcgacacaggggctcgggaacacggtgtcgccatcgcggaaccctagcgagatcgtcgggaaggtccgaaggtgagcacgtgtttgtgtaacctttggctccggttcgcaatggtggacggcgatggtgacagggaacaccagcaatagccggttgtggcagctgccgccgcgtcacatagcgccgagttggaggggcacatcacgtgaatagatctgcgcagtctcgcatcatggcagtgccggcggcctcccgggcatggcgactctccccagtcgaccaggcacctcttcgtcctttgggcccgtaccctccgcttcctcgggcgtgtccgccggccatttggacgccgtcaaaccggttggccgtgtccgggtcatctccgcgcccctcctccaaatggccaaaccctaccttgttgtagctagcctacccctccagacgccattatcttcttggtcagtcctgcccactactcgtctcatcaggtaacactttgtatatggcagtcaacaaggaaactctagtcagtgcaaagctagccttaacacaactttctgctccgataagtttagcaacacataaatgctgacttcttgtctatggatttcaattaacccctaagttggtgtattgtgcagccaatgggcatggttttgcctggtgtggttggattcaagttgagtgggaagttataggatggtgtcactactactgacattgttcttactatgacccaaatgctaaggaagcacggtgctattggcaaattcgttgaattctatggtgttggtgtgggcgagctatctttgcctgctagggccacaattgccaacatgtctccagaatatggagctaccatgggcttcttccttgtgtcgatgattgaagcatacctgcgagctaacaaaatgtttgtggacaagcatgagcctgagacggaacgagttttctcttcatatctggagctggaccttagtgaggtggagccttgcgtttcaggccccaaaaggcctcatgatcgtgtccctttgaaggaaatgaagtcagactggcatgcttgcctggacaacgaagttggtttcaaggtgaagccatgggtaaagacaagccttacccctggatctgtggttgctactgagtacttgaaacatagatatcgttgctgctgcggtgctgtatcctactacctgctcaaccttggggacagcatcaccacggaccacatctcctactcggggaagatccccgagggcacacctgcggccaagtatctgctcgagtatggcgtggagcccaagaacttcagctcctatggtggccgccgcgggaacaatgaggtggtgatgaggggagcgtttgccaatatgaggatcgtgaataagcttcttaatggcgaggctggtccctggacaatccatgttcctaccggggagaagctctacgtttacgacgcggcaatgaaatggaaggagatgctgtcagttttacccaattatcgagtgaaggagtatatgaagaaactttacaagacatctgtacaaccctagatgagttgcagtagattccacccattaaggacaaatggacaataatccatcatcgaagccaaatcataagctaaaaggttgagaagatggtgcttctggcatgtggatggcgctatacgattactgtttgtgactcaagtaatctatacacttatggttggcgcaaatacgttcaactaggacatattgattttgaagatgatttagttccacataaactagaagcattgaaagatagcactatatctcaggaaaagatagaatggaactcaaattttggtggttacactggtgtggagacttgaattcatgtatacacttagttagactcaatgttagtgcaaacagttgatgaccaagttttttaattagtattttagtttggatgtatagtacacttatgtatgagttatttgacaatgcttatttatgagatattgaatgacacttgtctatgttatattaattataatgttattaaatatatgggcatc

SEQ ID NO: 215993 - DNA, 1841 bp, Zea Mays
ttgcgccgcggcagcagaacaccttcctgacccgaattcaatccgtgcgcaggcaccctccgccggcgatggctcacgcatcgctcggcgcccgccccacgtccccgaggcgacgaccggcacaacgcgccctcgcggcgctacccgacacctgcgacgaaacgcgccaagttcaggagcgcgtcgacacaggggctcgggaacacggtgtcgccatcgcggaaccctagcgagatcgtcgggaaggtccgaagccaatgggcatggttttgcctggtgtggttggattcaagttgagtgggaagttataggatggtgtcactactactgacattgttcttactatgacccaaatgctaaggaagcacggtgctattggcaaattcgttgaattctatgttctcttttgcatttaggtgttggtgtgggcgagctatctttgcctgctagggccacaattgccaacatgtctccagaatatggagctaccatgggcttcttccttgtagacaagtagcattggactatctcaaattgacaggccgaagcgatgaaactgtatatttcactatgtgcagactactcttttaccatacccgttccatcattctgatatgtatatatttttattaataaagcaaagttgtatatattgcattaaatgtgattcaggtgtcgatgattgaagcatacctgcgagctaacaaaatgtttgtggacaagcatgagcctgagacggaacgagttttctcttcatatctggagctggaccttagtgaggtggagccttgcgtttcaggccccaaaaggcctcatgatcgtgtccctttgaaggaaatgaagtcagactggcatgcttgcctggacaacgaagttggtttcaaggtgaagccatgggtaaagacaagccttacccctggatctgtggttgctactgagtacttgaaacatagatatcgttgctgctgcggtgctgtatcctactacctgctcaaccttggggacagcatcaccacggaccacatctcctactcggggaagatccccgagggcacacctgcggccaagtatctgctcgagtatggcgtggagcccaagaacttcagctcctatggtggccgccgcgggaacaatgaggtggtgatgaggggagcgtttgccaatatgaggatcgtgaataagcttcttaatggcgaggctggtccctggacaatccatgttcctaccggggagaagctctacgtttacgacgcggcaatgaaatggaaggagatgctgtcagttttacccaattatcgagtgaaggagtatatgaagaaactttacaagacatctgtacaaccctagatgagttgcagtagattccacccattaaggacaaatggacaataatccatcatcgaagccaaatcataagctaaaaggttgagaagatggtgcttctggcatgtggatggcgctatacgattactgtttgtgactcaagtaatctatacacttatggttggcgcaaatacgttcaactaggacatattgattttgaagatgatttagttccacataaactagaagcattgaaagatagcactatatctcaggaaaagatagaatggaactcaaattttggtggttacactggtgtggagacttgaattcatgtatacacttagttagactcaatgttagtgcaaacagttgatgaccaagttttttaattagtattttagtttggatgtatagtacacttatgtatgagttatttgacaatgcttatttatgagatattgaatgacacttgtctatgttatattaattataatgttattaaatatatgggcatc

SEQ ID NO: 215994 - DNA, 1711 bp, Zea Mays
acagctcttctttggccttaagcagttgtgacataacggtattaggaacatatttggttttctgcacttttgtctaaatgaagatggtccttcctgttgctgttgaagacgtaaagagagaagttaaaatcttaaaggcattacaagggcacgaaaatgttgtacacttttacaatgcattcgaagatgacaactatgtttatatagtcatggaattatgtgagggtggcgagctacttgatcggatattagccaagaaagatagtcgttacagcgagaaagatgctgcagtagttgtccgacagatgctcaaggttgcagctgagtgccacctgcatggtttggttcatcgggacatgaaacctgagaacttcctattcaaatcaaaaaaggaggactcgccccttaaggctacagattttggtctttcagacttcataaaaccagggaggcaattccgtgacattgttggaagtgcctactacgtagcaccagaagtactcaaacgcaggtcagggccagaatccgatgtttggagtataggtgttataacctatattttgctgtgtggaagacgaccattctgggacaaaacagaagatgggatatttaaagaggtcttaaaaaagaagccagatttccgccgcaagccttggtcaaacattacttcgagtgcaaaagattttgtacaaaaattactagttaaggatccccgtgcaagactaactgctgcacaggcattatcacatgattgggtgagagaaggaggaaaggcatctgaaatacccttggatatatcagtattacataatatgcgtcagtttgtgaaatacagtcgtttcaagcaatttgctttaagggcattagcatctacattaaactcagaagagatgtctgatcttcgtgatcaattcaatgccattgatgttgacaaaaatggaacgattagtcttgaggaactgaagcaggctcttgcaaaggatgttccatggagattaaagggtccacgtgttttagagatcattgaagcgattgacagtaatacagatgggctagttgattttgaggagtttgttgctgcaacactacacgtgcatcagctggtggaacatgatactgagaagtggaaatcattgtctcaagctgcatttgataaatttgatgttgacagagatggctacatcacacctgatgaacttagaatgcatacaggaatgaagggttctattgatcccctcctggaggaggctgacattgacaaagatggcaagataagcctagatgaatttcgccggctcttgaagactgcaagcatgagcgcacgcaatgtacaaactcctaggggtgttcgcaagtcatagttttctgttttttgtagttcacataactgaactagagagcagcagcacatgtgattggagaaaggcttttccatgtaaattagacaatcaataatacacatgaatggaggtaatccgtagttgttccttgaaaacgagcactgtattcttgctattgcaatactatgtttggtttgttcccagcaagttctgcagttgagctttccatgctcgaaatcgaatgttgtaaaaatgttgcactgctagttcagtttagattaggtttgagtcagttagagataagatgggactatgtagttcagaattaggtttgagtcaactaatgataggttatgccatttgggattgta

SEQ ID NO: 215995 - DNA, 1221 bp, Zea Mays
gtattattgtcagtcaataaaacatgccactgctaatctgaccatgtaccgtgaattggcccatagggtggatgatgctcttgggttcatgactgcatcggggcttacagtcgaccacccgataatgacgactactgacttctggacctcgcacgagtgccttctcttaccctacgagcaggctcttacccgtgaggattccaccagtggccttttctatgattgttcggcccacatgttgtgggttggtgagcgcactcgacaactcgatggagctcatgttgaattcctccgtggtgttgccaaccctctgggcataaaggtgagcgacaaaatgaaccccagtgagttggtgaagctgattgatattctgaacccttcaaacaaacctggaaggatcaccataattacaaggatgggggcagagaacatgagggtgaagttgcctcatctcatccgtgctgttcgcaatgctggactgattgtcacatggattactgatcctatgcatggaaacaccatcaaggccccttgtggcctgaagactcgtccatttgactccattctggctgaagtgcgtgccttcttcgatgtgcatgaccaagaaggaagccaccctgggggcgtccaccttgaaatgactgggcagaatgtgaccgagtgcatcggtggatcacggaccgtgaccttcgacgatctgagcgaccgctaccacacccactgcgacccaaggctgaatgcctcccagtccctggagctcgcctttatcatcgcagagaggctgaggaagaggaggatgcgatcggggctcaacagcagcctgccactgccgccactggctttctgagtagccggagccaaacacaaaggagggtaggaatagctgtggtgactcggaagagaaagagacagtcgacgccttgttttgttgatgcttagtgtggtgacctggtggtggtggtggtgggtgttcttggcacaagttacatgctggggatagctataggaggtacctgttgaggtgtgtaagacagtagctagcaaccgtatgccttggtttcctgtttgggtgcgtgacttgccgactttctagctgcttctggggttttgacctcggtaaggaaagaataaaaagataatcggagtgcaatgcttgctgaactggtgctcaataaattgatcccttgatgcctctattttcttcttttgtgtttcaggcgc

SEQ ID NO: 215996 - DNA, 1201 bp, Zea Mays
attgattcttttgtgtgtaaacaaggtaccgtgaattggcccatagggtggatgatgctcttgggttcatgactgcatcggggcttacagtcgaccacccgataatgacgactactgacttctggacctcgcacgagtgccttctcttaccctacgagcaggctcttacccgtgaggattccaccagtggccttttctatgattgttcggcccacatgttgtgggttggtgagcgcactcgacaactcgatggagctcatgttgaattcctccgtggtgttgccaaccctctgggcataaaggtgagcgacaaaatgaaccccagtgagttggtgaagctgattgatattctgaacccttcaaacaaacctggaaggatcaccataattacaaggatgggggcagagaacatgagggtgaagttgcctcatctcatccgtgctgttcgcaatgctggactgattgtcacatggattactgatcctatgcatggaaacaccatcaaggccccttgtggcctgaagactcgtccatttgactccattctggctgaagtgcgtgccttcttcgatgtgcatgaccaagaaggaagccaccctgggggcgtccaccttgaaatgactgggcagaatgtgaccgagtgcatcggtggatcacggaccgtgaccttcgacgatctgagcgaccgctaccacacccactgcgacccaaggctgaatgcctcccagtccctggagctcgcctttatcatcgcagagaggctgaggaagaggaggatgcgatcggggctcaacagcagcctgccactgccgccactggctttctgagtagccggagccaaacacaaaggagggtaggaatagctgtggtgactcggaagagaaagagacagtcgacgccttgttttgttgatgcttagtgtggtgacctggtggtggtggtggtgggtgttcttggcacaagttacatgctggggatagctataggaggtacctgttgaggtgtgtaagacagtagctagcaaccgtatgccttggtttcctgtttgggtgcgtgacttgccgactttctagctgcttctggggttttgacctcggtaaggaaagaataaaaagataatcggagtgcaatgcttgctgaactggtgctcaataaattgatcccttgatgcctctattttcttcttttgtgtttcaggcgc

SEQ ID NO: 215997 - DNA, 5956 bp, Zea Mays
atcctctgtttgagtgcgcacatgaaaagtcaaagttccagccctacccctcgctccctcgtcttcctcctccgctcaattcctccccacgcacccgtcacctctttccattccaatttcttccacctccctctctcagatctccacccctcccccaatgatgtgacggtcatcacgagggcgaaaaccaacgcacagaacccctcaccatggctacgtccacgatgccactcggcggggcgtctccgtcgggccgcgttctgggtccggcgctggaccggatcataaaaaacgccgcatggcggaagcactcagcgctcgtggccgcggcaaaggcggcactcgacctcctctcttcatcgccggcatacccgtcttcggaccctatctcgccgcaatcctcgctgctgctcggcctgccctccgccgccgccgacgcggccctccacgcgctgctgctcgctctcgagtcagcttcgcccaaggtcgtcgaccccgctctcgattgcgtcaccaaacttctttaccaccgcctcctctttggcgacctcggctgcgccggggacgatgcctcttcccccacctccaggctcttcaccgccgtccttacctgtggcgctctctctgatgatgcaatggagcttgccaccctccgtgttatcatcgccgccgcgcggtgccccactgtcgccatccgcggggagggcctcggccaggtgctcaagacctgctacaacatatacctcagcagcaacagtggggccaatcagctctgcgccaagcttgcgctggcgcaggtcctgctgattgtgtttgcacgcgtggaggtggattcgatggacgtgcgcattcggacggtgtcgatcacggagatgatggacgtgtctgatcgcaacctgaacgactccagcatcgtgcaggtggctcaggggtttataaacgagacaatggaggggagtgttgcaccagagccagggtcacatttggagccaaccgaggtggatggaaaggaggatactgggatgagcaagattagagaggatgggcttgcactcttgaagaacctgtgtaagctgtcaatgaagttctcgacgccagataaccctgaggatcagatgttgctgcgcggcaaggtgttgtcacttgagttgctgaaaatggttatcgacaatgctggccctttctggagaacaaatgaaaagtacattggagcaatcaagcagtatctttgtttgtccttattgaagaacagtgctttgtcagcaatgagtattttccagttgttgtgctccatatttgtgggcttactgtcaaggtttagatctggactgaaagaggaaattggaatattctttccaatgcttgttctaagggttcttgagaatgtccatcaacctagctttctacaaaaaatgacagttctaaacttgttggagaagatctgtaaagaatctcaggttcttattgatatctttgtgaactatgattgtgatgtagatgcaccaaatatttttgaaagggttgtcaatggacttctaaagactgctttaggtgttcctccaggatctacaacaacattaactatagcccaagaccaaacatttcgtattgagtcagtgaagtgccttgcaaccataatcaagtcaatgggttcatggatggaccaacagctgagaattggtgatttttcaccaaaaatatctgaagcttctttaagttctttaagttcaatagataaccccaacatccttattggagaagatggtagtggaattgattatgaactgcaatctgactctggtagcccagatgtatctggtgctccctcccttgagcagcgtcgtgcttttaaaatagaacttcaggaatatccttgtttaaccgaaaaccttccaagggaattaattttctcgttaaaagcaagaagatagggcatacaccagaagatgttgcttgtttcttgagaaatactgctggtttaaatgcaacaatgattggagactatttgggtgaaagagatgaattccctatcaaagttatgcatgcatatgttgatgcactaaactttgaaggtatggacttcggtgaagctattaggtattatttgcgaggcttcaggttgcctggggaagcacagaaaattgatcggatcatggaaaagtttgctgaacgatactgcaaatgcaatccaaactcctttaccagtgcagatactgcatatgttcttgcttattctgtaatcatgctcaacactgatgctcacaatactatggtcaaggataagatgtctaaatctgacttcattcgcaataaccgaggaatagatgatggaaaggatttgccagaaacttatctgggtacactatatgaccaaattgtcaaaaatgagatcaaaatgagtgctggttcatcagttccacaaaacaagcaacctagtagtgtgatgaagctactaggattggacaatattattagctttgttaactggaaacaggctgatgacagggtagttggagcaaacgacctgctcatcaaaaccatacaagagaaatttaaactaaagagtggaaagtcggagtctgtgttttctgttatcactgatacaacaattttaagattcatgatggaggtttgttgggcccctatgatggctgcattcagtgtgacacttgatcagagtgatgataaggcggccacgtcgcagtgtttgcagggattcagatctgctgtgcatgttacctctgttatgtgcatggagacacagagagatgcctttgtgacatctgtagccaaattcacatatctgcattgtgctgctgacatgaaacaaaagaatgtggatgctgtgaaggctattatatccattgcaatcgaagatggtgattatttgcaggaagcttgggagcatgtactaacatgcctttcacggtttgagcatttacaccttcttggagagggggcacctactgatgcttcatttctcacagtaccactggttgactcagaagaaaaaacacagaagtctacctctatgtcatcaaagagaactaatgcacttcagaatccagctgtaatggctgctgttagaggaggttcttatgacagcacaacagcaaaaaataaagcatcaccgttggttactcctgaacagattaataatttcatatcaaacataaacctgctagaccagattggcatttttgagttaaatcacatatttgctcatagcccaagattaaatagtgatgctattgttgcttttgtgaaagctctttgcaaagtttcaatgacagagttgcagtctcctacagatcctcgtattttctgcctaacaaagattgttgagattgcgcattacaatatgaaccgcattcgtttggtttggtcccgtatttggaaagttctgtcagatttttttgtttctgttgggttgtcagagaacctttcagttgcaatatttgttatggactctttaaggcagctagctatgaagtttctggaaagagaagaactggcaaattataatttccaaaatgaattcctgcaaccttttgcggttgttatgcagaagagcaatgcttcagaagttcgtgaacttatagttcgatgtgtctcccaaatggttctgagtcgtgtcaacaatataaaatctggttggaaaagtgtttttacggtttttactgcagctgctgctgatgatcgaaaaaatattgttttgttggcatttgaaaccatggaaaagattgttcgggactatttcccttacataactgaaactgaaacaacaacgtttactgattgtgttaaatgccttatcacattcacaagtagtaaattcagcagtgatgccagtcttaatgccattgcatttcttcggttttgtgctgtcaaactcgctgaggaaggatttattagtcatgagaaggatactgaacagcaaccaagtaaaatagattcatcagatgggaacagcatggtgcataaggacgatcatgtttacttctgggttcctttgcttgctggtctagctagattgacaacggactcaagaccaactatcagaaaaggttctgcagaagtgctctttgacatcttggcagatcatgggcacctcttttctcagtccttctgggctaatatcttcgaatcagttatctatcctctttttagcagtgaaagttttgcaccaaatggccagatctcaagtgtaaatagtactgaggatgattcttggaattttgaaactaaaacggtggctctaaaatgtttagcagatttgtatattatgttttttgaagtgatgcgtccagaactttctagagttacttctgttattacgaatttcatcagaagcccttataaacaatcagctagcacgggtatatcagtttttcagcgtttaacagaaggactcgcgagcaagctctccaatgatgagtggggaacggtcctgttgtgcttcaaagaatcagcatcacatacatttgttgtgtttgacaaaatagttaaaatgatgaaagtcattgaaattccagatagaaatgaatcttactctgaagctgagcaatattcagatcatgacatatacaatgatgaagaagaggaagccaatatggaaacggcgtcttatgctattgtcagaatgaagaatcatatggctttgcaactcttaatcgttgagggcatcatcaaattgtatgaggttcacaggagctttcttggtgctgagcatatagtcataatgttggagattctatctgccattgcatcacatgcaagtgaagtgaactctgaatctaacttgcacaggaaactacataaagcatgctctattttggaggtacctgagccagcggttatccatttcgagagcgagtcctaccagagctacctcaaacttctccaagctcttcttcatgataacccatctttgtcagaaactatgaatgtggagtcacaaattatgctcgtctgtgagaaaatactgcgaatgtatctgacctgcgcagagcatgaactgtctaatggtgtttctggtaggggtccagctttacaacggatgcctctgggtacttctaaaaaggaggagctgggtgctagaactccatttgtccttcatgtgatggggttattgggcagtttagagaagaactgctttaggagaaacttgccccgctttttccccttattagctaatcttattcgctgcgagcataactctggagaagttcaagttgcactgtatgatatcttccaatcatcaataggccccataatatcagcatagcgtatattgtttcctcgccagttgtacaattttgtcagattgtggtataagaaaagggtacagctttacagtactgtaaatgattcatggttgaggcatttctggtgttgaagctacatggaacatcgacccagatgtctaaacaaggtttttgctgcgcacatttgccattcttttttctaacattcactgggtaatcattgacacgttaaagaggatggacattggaataagtccctaattcctgttttggtgtcatttcccccctttcatcttggctctgtatagtgtcgtctcccgaacctcagctaccagtgaagagggacttctgtcatatgttactgttcaacatattcgtctgtcgaataccattttaacagtatctacattgtagttagtatatatatactttcattctaacagcaatggatatcccaatggatgtctattaaagaaaggtgagcaatatagttcaataccttttctcacgtcccattgccatcaggatcacgacttggtactctaatcagaataccttccccctccctaagaatcttcaattatatgagcactttccgtcagataggctacggtcagcagattgtacatatagttgtgcaaaatactgttctaaacactgtagattcatagagtgaagtttgaattgag

SEQ ID NO: 215998 - DNA, 3126 bp, Zea Mays
ggcgacgcctttaaaacaccagctattatatccattgcaatcgaagatggtgattatttgcaggaagcttgggagcatgtactaacatgcctttcacggtttgagcatttacaccttcttggagagggggcacctactgatgcttcatttctcacagtaccactggttgactcagaagaaaaaacacagaagtctacctctatgtcatcaaagagaactaatgcacttcagaatccagctgtaatggctgctgttagaggaggttcttatgacagcacaacagcaaaaaataaagcatcaccgttggttactcctgaacagattaataatttcatatcaaacataaacctgctagaccagattggcatttttgagttaaatcacatatttgctcatagcccaagattaaatagtgatgctattgttgcttttgtgaaagctctttgcaaagtttcaatgacagagttgcagtctcctacagatcctcgtattttctgcctaacaaagattgttgagattgcgcattacaatatgaaccgcattcgtttggtttggtcccgtatttggaaagttctgtcagatttttttgtttctgttgggttgtcagagaacctttcagttgcaatatttgttatggactctttaaggcagctagctatgaagtttctggaaagagaagaactggcaaattataatttccaaaatgaattcctgcaaccttttgcggttgttatgcagaagagcaatgcttcagaagttcgtgaacttatagttcgatgtgtctcccaaatggttctgagtcgtgtcaacaatataaaatctggttggaaaagtgtttttacggtttttactgcagctgctgctgatgatcgaaaaaatattgttttgttggcatttgaaaccatggaaaagattgttcgggactatttcccttacataactgaaactgaaacaacaacgtttactgattgtgttaaatgccttatcacattcacaagtagtaaattcagcagtgatgccagtcttaatgccattgcatttcttcggttttgtgctgtcaaactcgctgaggaaggatttattagtcatgagaaggatactgaacagcaaccaagtaaaatagattcatcagatgggaacagcatggtgcataaggacgatcatgtttacttctgggttcctttgcttgctggtctagctagattgacaacggactcaagaccaactatcagaaaaggttctgcagaagtgctctttgacatcttggcagatcatgggcacctcttttctcagtccttctgggctaatatcttcgaatcagttatctatcctctttttagcagtgaaagttttgcaccaaatggccagatctcaagtgtaaatagtactgaggatgattcttggaattttgaaactaaaacggtggctctaaaatgtttagcagatttgtatattatgttttttgaagtgatgcgtccagaactttctagagttacttctgttattacgaatttcatcagaagcccttataaacaatcagctagcacgggtatatcagtttttcagcgtttaacagaaggactcgcgagcaagctctccaatgatgagtggggaacggtcctgttgtgcttcaaagaatcagcatcacatacatttgttgtgtttgacaaaatagttaaaatgatgaaagtcattgaaattccagatagaaatgaatcttactctgaagctgagcaatattcagatcatgacatatacaatgatgaagaagaggaagccaatatggaaacggcgtcttatgctattgtcagaatgaagaatcatatggctttgcaactcttaatcgttgagggcatcatcaaattgtatgaggttcacaggagctttcttggtgctgagcatatagtcataatgttggagattctatctgccattgcatcacatgcaagtgaagtgaactctgaatctaacttgcacaggaaactacataaagcatgctctattttggaggtacctgagccagcggttatccatttcgagagcgagtcctaccagagctacctcaaacttctccaagctcttcttcatgataacccatctttgtcagaaactatgaatgtggagtcacaaattatgctcgtctgtgagaaaatactgcgaatgtatctgacctgcgcagagcatgaactgtctaatggtgtttctggtaggggtccagctttacaacggatgcctctgggtacttctaaaaaggaggagctgggtgctagaactccatttgtccttcatgtgatggggttattgggcagtttagagaagaactgctttaggagaaacttgccccgctttttccccttattagctaatcttattcgctgcgagcataactctggagaagttcaagttgcactgtatgatatcttccaatcatcaataggccccataatatcagcatagcgtatattgtttcctcgccagttgtacaattttgtcagattgtggtataagaaaagggtacagctttacagtactgtaaatgattcatggttgaggcatttctggtgttgaagctacatggaacatcgacccagatgtctaaacaaggtttttgctgcgcacatttgccattcttttttctaacattcactgggtaatcattgacacgttaaagaggatggacattggaataagtccctaattcctgttttggtgtcatttcccccctttcatcttggctctgtatagtgtcgtctcccgaacctcagctaccagtgaagagggacttctgtcatatgttactgttcaacatattcgtctgtcgaataccattttaacagtatctacattgtagttagtatatatatactttcattctaacagcaatggatatcccaatggatgtctattaaagaaaggtgagcaatatagttcaataccttttctcacgtcccattgccatcaggatcacgacttggtactctaatcagaataccttccccctccctaagaatcttcaattatatgagcactttccgtcagataggctacggtcagcagattgtacatatagttgtgcaaaatactgttctaaacactgtagattcatagagtgaagtttgaattgag

SEQ ID NO: 215999 - DNA, 2443 bp, Zea Mays
ccaccatttttaagagtagagaagaaaacactggaccgccttcaccctgcttttcgtcttcctttcaccccgcttgcgctctctctccctctccccacctctctcctgcgccaactgggcgaccgccgccgccggctgccgggccgccgcacgcctccaggtgcccaggtcttcgtaggtcccttagctcggccttcgtcagggttcggggtccttcgctggcgacgatcacccatcaggtctcctttgaaagaagaattaggcagcacatctttacgaatcgaggatgtcagtttctatgaaggacctggacccagctttccgtggctctggacaaaaggacggcttggaaatatggcgtattgagaatttcaagccgatccctgcccctgcatcttcgtatggaaagttcttcatgggtgattcttacattatcttgaagacaacagccttgaaaaatggttctcttcgccatgatatccattactggattggtaaagatactagtcaggacgaagctggaactgctgcgattttaacagtagagcttgatgctgctcttggcgggcgtgctgttcagtaccgagaaatacaaggcaatgaaacagaaaaattcctgtcctattttagaccatgcatcatgccacagccaggaggagtggcatctggattcaaccatgttgaggtcaatgagcaggattacaagacccacttatatgtctgccatgggaagcatgttgttcatgttaacgaggttccctttgctcgatcatcccttaatcatgatgacatatttattttggatacgaagtccaaaattttccagttcagtggctcaaactcatccattcaagagcgagcaaaagctcttgaagttgtgcagtacatcaaagatacatttcatgagggcaagtgtgaaattgcatctgttggatggtagaatgatggctgatgcggaagctggtgaattctggggtttttttggcggctttgcccctcttcctaggagggcacctgcagaaggcaatgagaaacatgatgaaactgctttcaaattgctatgttttgaccaaggaaagctggagcctgtcgactgccaatctttagcacatgaattacttgagacaaacaagtgttacttcttagactgtggtgctgaattgtatgtttggatgggtagaattacatccctgatggagagaaagggtgctagtgaagctgctgagaaattgctctctgattcaaaccgaacaagaacacatataatcaaagtgattgaagggtttgagactgttacgttcaagtcaaaatttaaggagtggccacagacacctgagttgaagttgtcatcggaggatggaagaggcaaagttgcagctcttctcaaacgccagggcttaaatgttaagggtttgatgaaagctgctcctacacaagaagaacctcaatcctatattgattccactggcaatctgcaggtttggcgtgtaaatgataaagacaaggttcaactctcaccctctgaccaatccaaattttacaccggcgattgctacatatttcagtatacttatcctggagatgataaggaggaatgtcttattggaacctggtttgggaaaaagagtattgaggaggatagggtaatagcagtttcacttgcaagtaagatggttgaatctgctaagtttcaggctgtccaggcgcgcttttatgaggggaaagaaccgatccagttctttgtgatatttcaaagcttccaagtgtttaagggtggtcttagttctggatacaagagatttatcgctgaaaatggcatcgatgatgaaagttattctgaagatgggcttgcactctttcgtattcaaggttcaggaccagaaaacatgcaggcgattcaagttgaacctgtggcctcatcattgaattcatcatattgttacattctacataatggaaacactgtgttcacttgggctggaaatctgaccactgcattggaccaagagttaatggaaaggcagcttgatgttattaagccaaacacacagtctaggtcacaaaaggaagggtcagaaacggaccagttttggagtttactggggggcaaatctgagtactcaggccaaaaaatggtgcgagaactcgaaagtgacccccatcttttctcatgcatcctgtcgaaaggtcaaagaaatacaccactttactcaagatgatctaatgacagaagatgttttcattctggactgtcacacgagcatatttgtttgggttggtcagcaggtggatgttaaaggcaggttacaagctctggatgctggggagttttcaccgttatggaggggaatgagcctccctttttcactagattcttcacctgggactccgcaaaatcactgatgcatggcaattcataccagaggaagctcgccattgtaaa

SEQ ID NO: 216000 - DNA, 739 bp, Zea Mays
gttggagtgtgctttgaagttgtgcgcaaggtttggcgtgtaaatgataaagacaaggttcaactctcaccctctgaccaatccaaattttacaccggcgattgctacatatttcagtatacttatcctggagatgataaggaggaatgtcttattggaacctggtttgggaaaaagagtattgaggaggatagggtaatagcagtttcacttgcaagtaagatggttgaatctgctaagtttcaggctgtccaggcgcgcttttatgaggggaaagaaccgatccagttctttgtgatatttcaaagcttccaagtgtttaagggtggtcttagttctggatacaagagatttatcgctgaaaatggcatcgatgatgaaagttattctgaagatgggcttgcactctttcgtattcaaggttcaggaccagaaaacatgcaggcgattcaagttgaacctgtggcctcatcattgaattcatcatattgttacattctacataatggaaacactgtgttcacttgggctggaaatctgaccactgcattggaccaagagttaatggaaaggcagcttgatgttattaagccaaacacacagtctaggtcacaaaaggaagggtcagaaacggaccagttttggagtttactggggggcaaatctgagtactcaggccaaaaaatggtgcgagaactcgaaagtgacccccatcttttctcatgcatcctgtcgaaag

SEQ ID NO: 216001 - DNA, 1494 bp, Zea Mays
cggctgtcatccgcgtgcggcaaccgtgctcatacatcactgtgtcgcccccacccccctcgccgcatgatgcccgcaacgtccgtggccgtcgcgcccgcccctccccccacctcgagagcggcacccggcaaccaccccactgtcaagatcaccgtgtccatataaggatggatcccctcacccgagaaccactcacgtcgagactaacgcatcccaagccagataaggatggatcccctcacatctccgattatttcgccgtccaaacacatgatttcctggttcaccctcctcccctttggcgtcctccagatcttgccttcgcccgcatcgacgtaggcgacgggggcatgacaggtcggttggtggagcggggctagaggccatcgatggtggttgtggcgacgtgctgctgggaagacgaggcaactctctcctccagcacaccctgtggtggagacttgccatacatatgacgcagctgaagctgcagagggcgcgcctgtgccgacgacggaagcaaagaagctggcgtcctctgtcacgaggtccaagcaggagatcacagaggacttctcgtcgattggcgggacatggcccccacggccgcccaagaagagaccagatcacaaagaagatccgaaaggcgagaggatttcatttcccggatcgacttacttctaccctccggttgtttgtggacagtattttggtttttttaagaaggaagccccaattcctgtgctagatccaccatgccattcaatgttgcagatcatgacgaatcttgtgattggtttgtgtcaaagcaatggatacacatatattcgcattgcatcatttctatggaggtgaaggatgaggaagaaaaaggggaggagttgcctccagatgttgagactttgaccacaacaattgaataaacatgatgagtgattggaaaatgttcggattcttttgcaagatcaaagtttctatgcacttaatcagcttgtggatttcatcatcttggtcggcaagtttgtacgacaaaggcgacccggagtcaccgtcccttgaaagcgccccacttccggatgatgataggttgcgcattgccagcgagtttagaattgtgccacatggtgatgggggccattatctccttgtcgccctctgtgacaaagtgaaattgaaggattacatgtttcacatcttctttatgttgaaattgtcttgtatgttgtttagaccttttaaaggcaacatgccacacatatctttgttttggtgttcagagctacatatggtactcttcatggtttctgttgcgagtaacagggatatcaggtttttgtacttacctatatggtcatatctgaacctataaactgttgttaggatagatacaaggtgtgcatgatcttctttctattgattcatacttacatatgtagaccatattttatcaacttatctatactatactcaaagcaccagtttcaacggtca

SEQ ID NO: 216002 - DNA, 1404 bp, Zea Mays
catcactgtgtcgcccccacccccctcgccgcatgatgcccgcaacgtccgtggccgtcgcgcccgcccctccccccacctcgagagcggcacccggcaaccaccccactgtcaagatcaccgtgtccatataaggatggatcccctcacccgagaaccactcacgtcgagactaacgcatcccaagccagataaggatggatcccctcacatctccgattatttcgccgtccaaacacatgatttcctggttcaccctcctcccctttggcgtcctccagatcttgccttcgcccgcatcgacgtaggcgacgggggcatgacaggtcggttggtggagcggggctagaggccatcgatggtggttgtggcgacgtgctgctgggaagacgaggcaactctctcctccagcacaccctgtggtggagacttgccatacatatgacgcagctgaagctgcagagggcgcgcctgtgccgacgacggaagcaaagaagctggcgtcctctgtcacgaggtccaagcaggagatcacagaggacttctcgtcgattggcgggacatggcccccacggccgcccaagaagagaccaggtgcaacgacaactcaatatcacaaagaagatccgaaaggcgagaggatttcatttcccggatcgacttacttctaccctccggtttttttaagaaggaagccccaattcctgtgctagatccaccatgccattcaatgttgcagatcatgacgaatcttgtgattggaggtgaaggatgaggaagaaaaaggggaggagttgcctccagatgttgagactttgaccacaacaattgaataaacatgatgagtgattggaaaatgttcggattcttttgcaagatcaaagtttctatgcacttaatcagcttgtggatttcatcatcttggtcggcaagtttgtacgacaaaggcgacccggagtcaccgtcccttgaaagcgccccacttccggatgatgataggttgcgcattgccagcgagtttagaattgtgccacatggtgatgggggccattatctccttgtcgccctctgtgacaaagtgaaattgaaggattacatgtttcacatcttctttatgttgaaattgtcttgtatgttgtttagaccttttaaaggcaacatgccacacatatctttgttttggtgttcagagctacatatggtactcttcatggtttctgttgcgagtaacagggatatcaggtttttgtacttacctatatggtcatatctgaacctataaactgttgttaggatagatacaaggtgtgcatgatcttctttctattgattcatacttacatatgtagaccatattttatcaacttatctatactatactcaaagcaccagtttcaacggtca

SEQ ID NO: 216003 - DNA, 2772 bp, Zea Mays
atgccccgcccgccctgctctccgtcgcgcccttccagggatcctccatcgccgctcccgccatcatcgcgcccgcgctccatcgatggaaggtgtcgccccgccatcctcgcctcgctccccgcgacacgcggcgccagcttgtgtcgcatcttctatctattcaccagcaaggtacctggcacagaacccagccgaatcctagaacccagccggatcctagaaatttcccattggcatctggtgaccgtatccggtggttgggcgtcagacgcagcggggcggtaccggtgcttggagttggaccacccgtgcaaggcaccgtggtgcgacgggccgctcggcgcgctggagagcaacgggtgggtgtactcggcgcactgctccttcaagctctttgtggccgatgcgtcgtggtggtgccttgacgggaagtggctcttcttctggggcgactctaaccacgtcgacaccatccggaacctcctcaccttcgtcctcggcatcacggacacgtctgctgtgacacgccagtttgatgcagtgttcaccaatcccattggtggggcagggactctaaggatcacaagcatcttcaacggccactggaacatgagcatgaactatctcggcttgcattccctccggaacagaggtttccggcagctcatccggtcctacttcatgtccggtgatcgtgttccagacgtcatggtcctgaactctcgcctgcacgatggctgctactggaccagcgtccgcatctacgcgcaggctgcggatttcgcagcacagttctggtccggagtcatggacaaagtccgggctcgtgggcatgcagtgcccagggtgttctaccggacgcagatgcctcagggtggtatagatgcagggaaaaaccacgcgactcccttcacggaattgagagatgaagctggtgtcacatactcacatccgcagggatgggtcacgttgcagacacttcctaatgaagtccttgtagtgctgcgaaaggtaatcagattttgttagtagacaacacaaggaaggaagcacaaggaagtttaacctgtatagcacaaggaagcaagcagctcagcctccattttatttggaaaagtcttatacttatcagaaaaagaaaagctaaaactctaccctctgcgcccaccttcaagggtcgctccctatcttccttcactctccatcaaagctttgctcgcatcaaattaaatttcttttcgttacgaatttagcttcattatataatattttgctcagtgaattgatcaagtttggtgcacgagtgtcatgctcctaggttttgtactaattgaagaagtagcaaatgtagttcgtggtggtggtttaagtcatgtctgatgaaattgatgcttatatagaggggttctttgtgctttcgaaagaattctgcaggaaaatcgactgcatttgttgttcttgggtacacaatgaaagatgggaaggcatattttcccccacatgacagtatctatacatattgcagttgaaatggaaataattgaaatacaaggtatgtgcaggtgcagtctattatattggagttaagagagcgctagcttgcagtcacactcgatgaagtcctatagggctagattttaaaagtaagatccagtacaaggttacttcaattgcaattagcgattagccaaaactttcatcttcggtctcactaggcctcactaggcctttcatcttcaaaagaatttataaagatattatttttcagtctatctctacatccctctctccatcttgttatgcaattatgagttcattagatgtcattgatctaaattaatttctatccattatgaacttatttttaatgaaccatgctccttcttcgttgctcacaacagggtccatgtacttggcacatgatatacatatacgagatggacttaaaaattaacaaaggtcttcttttggtggtagataattttggttttcttatgattctctttatgaagtgggtgtggtacctctaaacaaatagatgatctgttgacttatggcagtcaggcattacatttttttgcatgaaatcgacatctgagaagtgataattttgttttgatcgcttctctattgcaagatttagatggctactatcctttgcaattgatcaagaatggtgagctattctaaggaagcttctgaacaatatacctgttgtcctggagtgtcacagatggcaaagatttgcgcttagagaaggaggaagaacggtcggtgctagagtcatctccaaagttcttagctgatcagtttccactttcttctctgtagtctggttgcaactgttgatgttttaagggtctgttcaatccctctccaagatattgtaggtgtatgaaatcttctaagcaaactgttaaatacattgcacccgatcagaagggatgctctataatgcagcctgggtgtgatctccgtacatcgtgctccagccgcactcagatctagccttggccgggagacaccgcgacagaggctggacgtgctcttcccgtcctcatgccccatgccgctgcgcgctcttcccttcacctctcactacacggcggctgcggggcaggggtgaaagaggcgaggcttctccagcttctcgaggccggagaccgtttgctcaagggtgtcgttcttgacggcctcctccgacagcgtggacgcgtggttctcaaccatggccttggtcacggcaggaagcagagcctggtaataatt

SEQ ID NO: 216004 - DNA, 3816 bp, Zea Mays
atgccccgcccgccctgctctccgtcgcgcccttccagggatcctccatcgccgctcccgccatcatcgcgcccgcgctccatcgatggaaggtgtcgccccgccatcctcgcctcgctccccgcgacacgcggcgccagcttgtgtcgcatcttctatctattcaccagcaaggtacctggcacagaacccagccgaatcctagaacccagccggatcctagaaatttcccattggcatctggtgaccgtatccggtggttgggcgtcagacgcagcggggcggtaccggtgcttggagttggaccacccgtgcaaggcaccgtggtgcgacgggccgctcggcgcgctggagagcaacgggtgggtgtactcggcgcactgctccttcaagctctttgtggccgatgcgtcgtggtggtgccttgacgggaagtggctcttcttctggggcgactctaaccacgtcgacaccatccggaacctcctcaccttcgtcctcggcatcacggacacgtctgctgtgacacgccagtttgatgcagtgttcaccaatcccattggtggggcagggactctaaggatcacaagcatcttcaacggccactggaacatgagcatgaactatctcggcttgcattccctccggaacagaggtttccggcagctcatccggtcctacttcatgtccggtgatcgtgttccagacgtcatggtcctgaactctcgcctgcacgatggctgctactggaccagcgtccgcatctacgcgcaggctgcggatttcgcagcacagttctggtccggagtcatggacaaagtccgggctcgtgggcatgcagtgcccagggtgttctaccggacgcagatgcctcagatgcagggaaaaaccacgcgactcccttcacggaattgagagatgaagctggtgtcacatactcacatccgcagggatgggtcacgttgcagacacttcctaatgaagtccttgtagtgctgcgaaaggtaatcagattttgttagtagacaacacaaggaaggaagcacaaggaagtttaacctgtatagcacaaggaagcaagcagctcagcctccattttatttggaaaagtcttatacttatcagaagtaagtttttgatcctctattttattacagattttgtgattccagatctgttgacctcaaggcagattggaaacaaccttattgttgttttgttgaccaactctagaaagaaaagctaaaactctaccctctgcgcccaccttcaagggtcgctccctatcttccttcactctccatcaaagctttgctcgcatcaaattaaatttcttttcgttacgaatttagcttcattatataatattttgctcagtgaattgatcaagtttggtgcacgagtgtcatgctcctaggttttgtactaattgaagaagtagcaaatgtagttcgtggtggtggtttaagtcatgtctgatgaaattgatgcttatatagaggggttctttgtgctttcgaaagaattctgcaggaaaatcgactgcatttgttgttcttgggtacacaatgaaagatgggaaggcatattttcccccacatgacagtatctatacatattgcagttgaaatggaaataattgaaatacaaggtatgtgcaggtgcagtctattatattggagttaagagagcgctagcttgcagtcacactcgatgaagtcctatagggctagattttaaaagtaagatccagtacaaggttacttcaattgcaattagcgattagccaaaactttcatcttcggtctcactaggcctcactaggcctttcatcttcaaaagaatttataaagatattatttttcagtctatctctacatccctctctccatcttgttatgcaattatgagttcattagatgtcattgatctaaattaatttctatccattatgaacttatttttaatgaaccatgctccttcttcgttgctcacaacagggtccatgtacttggcacatgatatacatatacgagatggacttaaaaattaacaaaggtcttcttttggtggtagataattttggttttcttatgattctctttatgaagtgggtgtggtacctctaaacaaatagatgatctgttgacttatggcagtcaggcattacatttttttgcatgaaatcgacatctgagaagtgataattttgttttgatcgcttctctattgcaagatttagatggctactatcctttgcaattgatcaagaatggtgagctattctaaggaagcttctgaacaatatacctgttgtcctggagtgtcacagatggcaaagatttgcgcttagagaaggaggaagaacggtcggtgctagagtcatctccaaagttcttagctgatcagtttccactttcttctctgtagtctggttgcaactgttgatggttagcacattctttatcttcaattattggaagaaacatttttgcgccaattacatgaaagtggttgcagttttaagggtctgttcaatccctctccaagatattgtaggtgtatgaaatcttctaagcaaactgttaaatacattgcacccgatcagaagggatgctctataatgcagcctgggtgtgatctccgtacatcgtgctccagccgcactcagatctagccttggccgggagacaccgcgacagaggctggacgtgctcttcccgtcctcatgccccatgccgctgcgcgctcttcccttcacctctcactacacggcggctgcggggcaggggtgaaagaggcgaggcttctccagcttctcgaggccggagaccgtttgctcaagggtgtcgttcttgacggcctcctccgacagcgtggacgcgtggttctcaaccatggccttggtcacggcaggaagcagagcctggtgccagagaagctcccagtgccccatgtgttggcagcatatcagcatgaaagatcctatgaggtgaaaattgcaacctctactctgtcttaactcctaagggactgaattgctggttctcacttattcttgcgacactctgcagccaagagctactagaggctgttgaacaagagaggaacatccgatctaatccttcacgtaatactgctgttttccaccatccaatgctgggtgattttgaggttaagaaactccatcaagaaaagcagttaggaatgatggtggacaaaggcctggtagcaactaggacagggttgagtcagtaccacctgtctcactggcctagaatgtttgaggtgatcaggatgctggaaggagacatgctcacagagagatgggaggtgtcgcagaacgtggacatgccagagttcgtctcatcggagctcctacttcaaaagtacatggattttgcagcggacgaatgctcgcttggtgtagaagccatggagctctctggactaaggtgaccatctgatcgatcgaatcggccatcacacaggtcgcataggtgtcttgccatatcaagcctatattattgttgtattacattggacacatagggaagggaaaaaatccggtgaattatagggtgtgatctgtctgcctatacttgtggtggcattcatttgtgcaaatgattttgatatattgatgtagagaatatatatgttgtttatttctatgtaatcgttgcacactataattttatcaaacaacttttgtattgttgcaaggggcgacaaaaatccagtggattgtagtgtgtgatttgtctatctataactgtggtggtattcatttgtgcaaatgatttgttgtatatt

SEQ ID NO: 216005 - DNA, 3110 bp, Zea Mays
atgccccgcccgccctgctctccgtcgcgcccttccagggatcctccatcgccgctcccgccatcatcgcgcccgcgctccatcgatggaaggtgtcgccccgccatcctcgcctcgctccccgcgacacgcggcgccagcttgtgtcgcatcttctatctattcaccagcaaggtacctggcacagaacccagccgaatcctagaacccagccggatcctagaaatttcccattggcatctggtgaccgtatccggtggttgggcgtcagacgcagcggggcggtaccggtgcttggagttggaccacccgtgcaaggcaccgtggtgcgacgggccgctcggcgcgctggagagcaacgggtgggtgtactcggcgcactgctccttcaagctctttgtggccgatgcgtcgtggtggtgccttgacgggaagtggctcttcttctggggcgactctaaccacgtcgacaccatccggaacctcctcaccttcgtcctcggcatcacggacacgtctgctgtgacacgccagtttgatgcagtgttcaccaatcccattggtggggcagggactctaaggatcacaagcatcttcaacggccactggaacatgagcatgaactatctcggcttgcattccctccggaacagaggtttccggcagctcatccggtcctacttcatgtccggtgatcgtgttccagacgtcatggtcctgaactctcgcctgcacgatggctgctactggaccagcgtccgcatctacgcgcaggctgcggatttcgcagcacagttctggtccggagtcatggacaaagtccgggctcgtgggcatgcagtgcccagggtgttctaccggacgcagatgcctcagggtggtatagatgcagggaaaaaccacgcgactcccttcacggaattgagagatgaagctggtgtcacatactcacatccgcagggatgggtcacgttgcagacacttcctaatgaagtccttgtagtgctgcgaaaggtaatcagattttgttagtagacaacacaaggaaggaagcacaaggaagtttaacctgtatagcacaaggaagcaagcagctcagcctccattttatttggaaaagtcttatacttatcagaagtgcagtctattatattggagttaagagagcgctagcttgcagtcacactcgatgaagtcctatagggctagattttaaaagtaagatccagtacaaggttacttcaattgcaattagcgattagccaaaactttcatcttcggtctcactaggcctcactaggcctttcatcttcaaaagaatttataaagatattatttttcagtctatctctacatccctctctccatcttgttatgcaattatgagttcattagatgtcattgatctaaattaatttctatccattatgaacttatttttaatgaaccatgctccttcttcgttgctcacaacagggtccatgtacttggcacatgatatacatatacgagatggacttaaaaattaacaaaggtcttcttttggtggtagataattttggttttcttatgattctctttatgaagtgggtgtggtacctctaaacaaatagatgatctgttgacttatggcagtcaggcattacatttttttgcatgaaatcgacatctgagaagtgataattttgttttgatcgcttctctattgcaagatttagatggctactatcctttgcaattgatcaagaatggtgagctattctaaggaagcttctgaacaatatacctgttgtcctggagtgtcacagatggcaaagatttgcgcttagagaaggaggaagaacggtcggtgctagagtcatctccaaagttcttagctgatcagtttccactttcttctctgtagtctggttgcaactgttgatgatattgtaggtgtatgaaatcttctaagcaaactgttaaatacattgcacccgatcagaagggatgctctataatgcagcctgggtgtgatctccgtacatcgtgctccagccgcactcagatctagccttggccgggagacaccgcgacagaggctggacgtgctcttcccgtcctcatgccccatgccgctgcgcgctcttcccttcacctctcactacacggcggctgcggggcaggggtgaaagaggcgaggcttctccagcttctcgaggccggagaccgtttgctcaagggtgtcgttcttgacggcctcctccgacagcgtggacgcgtggttctcaaccatggccttggtcacggcaggaagcagagcctggtgccagagaagctcccagtgccccatgtgttggcagcatatcagcatgaaagatcctatgagccaagagctactagaggctgttgaacaagagaggaacatccgatctaatccttcacgtaatactgctgttttccaccatccaatgctgggtgattttgaggttaagaaactccatcaagaaaagcagttaggaatgatggtggacaaaggcctggtagcaactaggacagggttgagtcagtaccacctgtctcactggcctagaatgtttgaggtgatcaggatgctggaaggagacatgctcacagagagatgggaggtgtcgcagaacgtggacatgccagagttcgtctcatcggagctcctacttcaaaagtacatggattttgcagcggacgaatgctcgcttggtgtagaagccatggagctctctggactaaggtgaccatctgatcgatcgaatcggccatcacacaggtcgcataggtgtcttgccatatcaagcctatattattgttgtattacattggacacatagggaagggaaaaaatccggtgaattatagggtgtgatctgtctgcctatacttgtggtggcattcatttgtgcaaatgattttgatatattgatgtagagaatatatatgttgtttatttctatgtaatcgttgcacactataattttatcaaacaacttttgtattgttgcaaggggcgacaaaaatccagtggattgtagtgtgtgatttgtctatctataactgtggtggtattcatttgtgcaaatgatttgttgtatatt

SEQ ID NO: 216006 - DNA, 3630 bp, Zea Mays
atgccccgcccgccctgctctccgtcgcgcccttccagggatcctccatcgccgctcccgccatcatcgcgcccgcgctccatcgatggaaggtgtcgccccgccatcctcgcctcgctccccgcgacacgcggcgccagcttgtgtcgcatcttctatctattcaccagcaaggtacctggcacagaacccagccgaatcctagaacccagccggatcctagaaatttcccattggcatctggtgaccgtatccggtggttgggcgtcagacgcagcggggcggtaccggtgcttggagttggaccacccgtgcaaggcaccgtggtgcgacgggccgctcggcgcgctggagagcaacgggtgggtgtactcggcgcactgctccttcaagctctttgtggccgatgcgtcgtggtggtgccttgacgggaagtggctcttcttctggggcgactctaaccacgtcgacaccatccggaacctcctcaccttcgtcctcggcatcacggacacgtctgctgtgacacgccagtttgatgcagtgttcaccaatcccattggtggggcagggactctaaggatcacaagcatcttcaacggccactggaacatgagcatgaactatctcggcttgcattccctccggaacagaggtttccggcagctcatccggtcctacttcatgtccggtgatcgtgttccagacgtcatggtcctgaactctcgcctgcacgatggctgctactggaccagcgtccgcatctacgcgcaggctgcggatttcgcagcacagttctggtccggagtcatggacaaagtccgggctcgtgggcatgcagtgcccagggtgttctaccggacgcagatgcctcagggtggtatagatgcagggaaaaaccacgcgactcccttcacggaattgagagatgaagctggtgtcacatactcacatccgcagggatgggtcacgttgcagacacttcctaatgaagtccttgtagtgctgcgaaagattttgttagtagacaacacaaggaaggaagcacaaggaagtttaacctgtatagcacaaggaagcaagcagctcagcctccattttatttggaaaagtcttatacttatcagaaaaagaaaagctaaaactctaccctctgcgcccaccttcaagggtcgctccctatcttccttcactctccatcaaagctttgctcgcatcaaattaaatttcttttcgttacgaatttagcttcattatataatattttgctcagtgaattgatcaagtttggtgcacgagtgtcatgctcctaggttttgtactaattgaagaagtagcaaatgtagttcgtggtggtggtttaagtcatgtctgatgaaattgatgcttatatagaggggttctttgtgctttcgaaagaattctgcaggaaaatcgactgcatttgttgttcttgggtacacaatgaaagatgggaaggcatattttcccccacatgacagtatctatacatattgcagttgaaatggaaataattgaaatacaaggtatgtgcaggtgcagtctattatattggagttaagagagcgctagcttgcagtcacactcgatgaagtcctatagggctagattttaaaagtaagatccagtacaaggttacttcaattgcaattagcgattagccaaaactttcatcttcggtctcactaggcctcactaggcctttcatcttcaaaagaatttataaagatattatttttcagtctatctctacatccctctctccatcttgttatgcaattatgagttcattagatgtcattgatctaaattaatttctatccattatgaacttatttttaatgaaccatgctccttcttcgttgctcacaacagggtccatgtacttggcacatgatatacatatacgagatggacttaaaaattaacaaaggtcttcttttggtggtagataattttggttttcttatgattctctttatgaagtgggtgtggtacctctaaacaaatagatgatctgttgacttatggcagtcaggcattacatttttttgcatgaaatcgacatctgagaagtgataattttgttttgatcgcttctctattgcaagatttagatggctactatcctttgcaattgatcaagaatggtgagctattctaaggaagcttctgaacaatatacctgttgtcctggagtgtcacagatggcaaagatttgcgcttagagaaggaggaagaacggtcggtgctagagtcatctccaaagttcttagctgatcagtttccactttcttctctgtagtctggttgcaactgttgatggttagcacattctttatcttcaattattggaagaaacatttttgcgccaattacatgaaagtggttgcagttttaagggtctgttcaatccctctccaagatattgtaggtgtatgaaatcttctaagcaaactgttaaatacattgcacccgatcagaagggatgctctataatgcagcctgggtgtgatctccgtacatcgtgctccagccgcactcagatctagccttggccgggagacaccgcgacagaggctggacgtgctcttcccgtcctcatgccccatgccgctgcgcgctcttcccttcacctctcactacacggcggctgcggggcaggggtgaaagaggcgaggcttctccagcttctcgaggccggagaccgtttgctcaagggtgtcgttcttgacggcctcctccgacagcgtggacgcgtggttctcaaccatggccttggtcacggcaggaagcagagcctggtgccagagaagctcccagtgccccatgtgttggcagcatatcagcatgaaagatcctatgagccaagagctactagaggctgttgaacaagagaggaacatccgatctaatccttcacgtaatactgctgttttccaccatccaatgctgggtgattttgaggttaagaaactccatcaagaaaagcagttaggaatgatggtggacaaaggcctggtagcaactaggacagggttgagtcagtaccacctgtctcactggcctagaatgtttgaggtgatcaggatgctggaaggagacatgctcacagagagatgggaggtgtcgcagaacgtggacatgccagagttcgtctcatcggagctcctacttcaaaagtacatggattttgcagcggacgaatgctcgcttggtgtagaagccatggagctctctggactaaggtgaccatctgatcgatcgaatcggccatcacacaggtcgcataggtgtcttgccatatcaagcctatattattgttgtattacattggacacatagggaagggaaaaaatccggtgaattatagggtgtgatctgtctgcctatacttgtggtggcattcatttgtgcaaatgattttgatatattgatgtagagaatatatatgttgtttatttctatgtaatcgttgcacactataattttatcaaacaacttttgtattgttgcaaggggcgacaaaaatccagtggattgtagtgtgtgatttgtctatctataactgtggtggtattcatttgtgcaaatgatttgttgtatatt

SEQ ID NO: 216007 - DNA, 1351 bp, Zea Mays
agttcctgaaacctgtgttttatggacggaaattagatgtcacaagccagctgaaaggttcaagaagcgaggtaaaagagagaagtgtaatgaagttagttagagagactggggtacaacaaagaaatagccttttgggtgatcttggtacctcaaaaaagcatgcaactgggaaaaggagcaatgctctaatttctggaatggagaatggaaatgaaactggtactagaaaccggccatttgcacagaaacaatctcattctagtcaggtggacgagaaccagggaactgctgactctcctgataacttgaagccatcattgctcaaactcaagtttaagcgtccacattatgagcagctaaacacccaggcctctcaaccagaggagccgacctcctgggtttctcagcaagaagaccagttcaatgttgctaaaggccagagatcaaagaggaagaggccttcgatggagaaggcagatggtttggatggtacgactccagccaagaggcatcatcagagcactgatgatgaagtgatggacgcaaattggatcctacgcaagttgggcaaggatgctatcggaaagaggattgaagtccatctaacttctgatggcaaatggcatcaagggatggtgtcgaatgtcatgggtggcacactgtgtattcagttagacaatggcaggtctgagaacgtggagctggggaagcaggccatccgcttgattgcttcaagatcaaagggccggaagcgatgaaacctttttccccatgtgcagcttaggacctgttctcgctcaacccattgccgtgattatggcaggtagagttctccccttgaggtttgacatccgctgaagcacagcagtgaccacctgctgttcatgtggggaaacgcgctgcctctcagcctttgctgctgactggacgagataccgagcgcaacgtcatctgttgcgccatgtttcgctagcctagcgtgtaacagactttgttgccggaagcccatttgctttccattagaatctgctagggtagggaaaccgaggaggttttagattaccttggatgtaaaagaagcaggtaacgccgctgtatctggggtgttttgtacatgtggttttcggacgagtttctgaacaactcgttattgacttatttggtggcgttatttgctggccactggccgggattttgttgtcttgttacatatactgacagtaataatttgtctacatatataagctggcgcgaaacgggggctttgttggaggcgaatgcgacgaggacaaaggcgactcagcatcattattgtaataccatggtttcaaagggaatttcaggaagg

SEQ ID NO: 216008 - DNA, 3581 bp, Zea Mays
atggaggccccaccctccgccctcccgtggtggctcgccaccactgcctgctccgcgccgccgacgcccgccgcgtcctccgtcgccggccgcctcgccttcctcttcctctccccctgcctgcagcgcgcgctgctcgccgcgatcgacctcctattcctcgtcgttgcgctcgccgtcatcctacgcgcccgcctcgcccggagcaacgatggcctgagcctcggcctcgaccaccgcgagcgggagcccctcctcgccaagccggccaccacggaccaggcgccgcctcccctccgccgtagctggagcttccagcacggcctagcgctcgcgacttccgcggtccaagcggcggccgcccttgtgcttctacttctcctcgcgttgctgcgccgcagcgggaggaccacggggctgcttgcggcggagtgcgcgttcctcgccgcgcacgccgtcgcgcacctcgcggccgcatgggttgtcgcggtggagaagaacacggcagggacgtcacccgcgcgactccacccactccacctcaggttcttctggctcgccacggccgctttcgccgcgctctacgccgggtgcgcggctgcgcggtacgccgccgccgagccgctcgtccccgatgacccgcttgcgttcgcgtggctggctctctcgctcccgctactctatttctcggccaccggctccaccggcctcgtcgtcgattccaatggtggtggtcgtgccgccgccgccacggaggagacgtacgccacggcgtcgtggttctcgctagccacgttcggatggatcaacccgctcatcgccaagggctccagagcgacgctcgcggccgaccaagtcccgcccgtggcgccgcccgacaccgccgaggcggcgtacgtgctcttcacctccaactggcccgcgccggcgccaggttcgtccaaggctcagcgcccggtgctcaccgcgctgctgcgctccttctggccgcagttccttctcaccgccgtgctcggcgtcgcgcacctctcggtcatgtacatcggcccgtcgcttgtggaccggttcgtcgaattcgtgcgacgcggcggggagttcacggaggggctgcagctcgtcgctgtcctcctcgttggcaaggcggccgagacgctggcgtcgcaccactacgagttccagggccagaagctgggcatgcgcatcaacgccgcgctgctcgccgctgtgtaccggaagtctctgcggctgtccacgggcgcgcgccgggcgcacggcgccggtgcgatcgtgaactacatggaggtggacgcccaagaggtggctgacgtcacgcaccagctccacaacctttggctcatgccactggagatcgccgtcgctcttgcccttctctacacccacctcggccccgccgtgctcactgcggtcgctgctatcgccgtggtcaccgtggtcgtggcctttgccaacaagctcaacatcgagtaccagttcaagttcctcgccaagcgcgacgagcgcatgaaggccatcaccgagctgcttaactacatcggcgtcatcaagctgcaggcgtgggaggagacgttcgggaacaagatccgcaagctccgggaagaagagctcgggtggctagccaagtccatgtacttcatgtgtgctaacaccgtcgtgctctggagcggccctctcgccatgaccgtgcttgtgttcggcacgtgcgtgttgactggcatccagctcgatgccgggaaggtcttcacggcgaccgcattcttccgaatgctggacggacctatgcagagcttccccgaggcgatcgctgctgtgacgcaggcaaccgtgtctgttggcaggcttgatagataccttcttgatgcagagcttgatgactcggcagtggagcaggtggacggcaccggcattgacactagcgcggtggtcgtggaggtgtgtgacggtgtttttgcgtgggacatgaggggaaacaagcagaggaaagaaagtgaggatggtgaaagcgaggaggagaaagatgtggaggggacaccggtactggagacggtgctgaaggggatcaatgttgaggtaaggaagggtgaacttgtggcagtggttgggatggtaggatctggcaagtcatcactgctttcttgcatcatgggggagatggagaagatctccggcacggttagagtatgtgggagcactgcatatgtttcacagactgcttggatccaaaatgggaccattcaagagaatatcttatttggacagccgatgtatgctgaaagatataaagaagtcattcattcttgctgcctggaaaaagattttgaaatgatggaatttggagaccagactgaaataggagagcgaggaatcaatctcagtggtgggcagaaacagcgtattcagctcgccagagcagtctaccaacattgtgatatatatcttcttgatgatgtctttagtgctgttgatgcacacactggttcaaatatctttaaggagtgtctaagggggacacttaaggggaagaccgtcatacttgttacacaccaaatggatttcttgcacaatgtggaaaacatatttgtcatgagagatggtatgattgcacaatcaggaaagtatgatgaattaatagaagcagattctgattttgccgatcttgttgctgctcatgacagttcaatggaactggtggagcaacgttgtcaagtagagaaacctgaacattttcagcctactacagtagttagaatcccttctctacgctctagatccattggaaagggtgagaaggtggttgttgcaccagaaatagaagcagccacttctaagattataaaagaagaggaaagggagagtggtcaagtaagttggcgagtgtacaagctgtatatgacagaggcctggggctggtggggagttatgggcatggtttcctttgcagtcgtgtggcagtgctctgatatggctagtgactattggctatcatatgaaacgtcaggcggcattcaatttaacccatcgttgttcattggagtgtatgtggccatagctgctttttcaatggtccttcaagtaatcaagactcttcttgagacagttttgggtcttcaaacagctcagatatttttcgagaagatgtttgacagcattctgcatgcccctatgtcatttttcgataccactccttcaggaaggattctcagtcgggttgcctggccatcagttgtagctgtaattccacttctattattgaacatttggtacaggaatctctatcttgcaacctcacgggagttaactcgacttgaaggagtgacaaaggcaccggttattgatcacttgtctgaaactgttcttggtgtcacaactataagatgtttcaaaaaggagaaagaatttttccatgagaatttagacaaaattaattcaagtttgcgcatgtacttccacaactatgccgcaaatgaatggcttggtttccgactggagctaattggaacacttctattgtcaataactgcatttctcatgatcagcctgcccagtaattttatcaagaaagg

SEQ ID NO: 216009 - DNA, 3723 bp, Zea Mays
atggaggccccaccctccgccctcccgtggtggctcgccaccactgcctgctccgcgccgccgacgcccgccgcgtcctccgtcgccggccgcctcgccttcctcttcctctccccctgcctgcagcgcgcgctgctcgccgcgatcgacctcctattcctcgtcgttgcgctcgccgtcatcctacgcgcccgcctcgcccggagcaacgatggcctgagcctcggcctcgaccaccgcgagcgggagcccctcctcgccaagccggccaccacggaccaggcgccgcctcccctccgccgtagctggagcttccagcacggcctagcgctcgcgacttccgcggtccaagcggcggccgcccttgtgcttctacttctcctcgcgttgctgcgccgcagcgggaggaccacggggctgcttgcggcggagtgcgcgttcctcgccgcgcacgccgtcgcgcacctcgcggccgcatgggttgtcgcggtggagaagaacacggcagggacgtcacccgcgcgactccacccactccacctcaggttcttctggctcgccacggccgctttcgccgcgctctacgccgggtgcgcggctgcgcggtacgccgccgccgagccgctcgtccccgatgacccgcttgcgttcgcgtggctggctctctcgctcccgctactctatttctcggccaccggctccaccggcctcgtcgtcgattccaatggtggtggtcgtgccgccgccgccacggaggagacgtacgccacggcgtcgtggttctcgctagccacgttcggatggatcaacccgctcatcgccaagggctccagagcgacgctcgcggccgaccaagtcccgcccgtggcgccgcccgacaccgccgaggcggcgtacgtgctcttcacctccaactggcccgcgccggcgccaggttcgtccaaggctcagcgcccggtgctcaccgcgctgctgcgctccttctggccgcagttccttctcaccgccgtgctcggcgtcgcgcacctctcggtcatgtacatcggcccgtcgcttgtggaccggttcgtcgaattcgtgcgacgcggcggggagttcacggaggggctgcagctcgtcgctgtcctcctcgttggcaaggcggccgagacgctggcgtcgcaccactacgagttccagggccagaagctgggcatgcgcatcaacgccgcgctgctcgccgctgtgtaccggaagtctctgcggctgtccacgggcgcgcgccgggcgcacggcgccggtgcgatcgtgaactacatggaggtggacgcccaagaggtggctgacgtcacgcaccagctccacaacctttggctcatgccactggagatcgccgtcgctcttgcccttctctacacccacctcggccccgccgtgctcactgcggtcgctgctatcgccgtggtcaccgtggtcgtggcctttgccaacaagctcaacatcgagtaccagttcaagttcctcgccaagcgcgacgagcgcatgaaggccatcaccgagctgcttaactacatcggcgtcatcaagctgcaggcgtgggaggagacgttcgggaacaagatccgcaagctccgggaagaagagctcgggtggctagccaagtccatgtacttcatgtgtgctaacaccgtcgtgctctggagcggccctctcgccatgaccgtgcttgtgttcggcacgtgcgtgttgactggcatccagctcgatgccgggaaggtcttcacggcgaccgcattcttccgaatgctggacggacctatgcagagcttccccgaggcgatcgctgctgtgacgcaggcaaccgtgtctgttggcaggcttgatagataccttcttgatgcagagcttgatgactcggcagtggagcaggtggacggcaccggcattgacactagcgcggtggtcgtggaggtgtgtgacggtgtttttgcgtgggacatgaggggaaacaagcagaggaaagaaagtgaggatggtgaaagcgaggaggagaaagatgtggaggggacaccggtactggagacggtgctgaaggggatcaatgttgaggtaaggaagggtgaacttgtggcagtggttgggatggtaggatctggcaagtcatcactgctttcttgcatcatgggggagatggagaagatctccggcacggttagagtatgtgggagcactgcatatgtttcacagactgcttggatccaaaatgggaccattcaagagaatatcttatttggacagccgatgtatgctgaaagatataaagaagtcattcattcttgctgcctggaaaaagattttgaaatgatggaatttggagaccagactgaaataggagagcgaggaatcaatctcagtggtgggcagaaacagcgtattcagctcgccagagcagtctaccaacattgtgatatatatcttcttgatgatgtctttagtgctgttgatgcacacactggttcaaatatctttaaggagtgtctaagggggacacttaaggggaagaccgtcatacttgttacacaccaaatggatttcttgcacaatgtggaaaacatatttgtaagttagatgctacaccattgcagttacttatcaggtcatgagagatggtatgattgcacaatcaggaaagtatgatgaattaatagaagcagattctgattttgccgatcttgttgctgctcatgacagttcaatggaactggtggagcaacgttgtcaagtagagaaacctgaacattttcagcctactacagtagttagaatcccttctctacgctctagatccattggaaagggtgagaaggtggttgttgcaccagaaatagaagcagccacttctaagattataaaagaagaggaaagggagagtggtcaagtaagttggcgagtgtacaagctgtatatgacagaggcctggggctggtggggagttatgggcatggtttcctttgcagtcgtgtggcagtgctctgatatggctagtgactattggctatcatatgaaacgtcaggcggcattcaatttaacccatcgttgttcattggagtgtatgtggccatagctgctttttcaatggtccttcaagtaatcaagactcttcttgagacagttttgggtcttcaaacagctcagatatttttcgagaagatgtttgacagcattctgcatgcccctatgtcatttttcgataccactccttcaggaaggattctcagtcgggcatcgtctgaccaaacgaccattgatgttgtgctggcatttttcattggtctgacaatttcaatgtacatttcagtattgagcaccattattgtcacttgtcaggttgcctggccatcagttgtagctgtaattccacttctattattgaacatttggtacaggaatctctatcttgcaacctcacgggagttaactcgacttgaaggagtgacaaaggcaccggttattgatcacttgtctgaaactgttcttggtgtcacaactataagatgtttcaaaaaggagaaagaatttttccatgagaatttagacaaaattaattcaagtttgcgcatgtacttccacaactatgccgcaaatgaatggcttggtttccgactggagctaattggaacacttctattgtcaataactgcatttctcatgatcagcctgcccagtaattttatcaagaaagg

SEQ ID NO: 216010 - DNA, 1539 bp, Zea Mays
gttccttgaccagtcgccgttcaccaacgctcactaggactaggttagagtatgtgggagcactgcatatgtttcacagactgcttggatccaaaatgggaccattcaagagaatatcttatttggacagccgatgtatgctgaaagatataaagaagtcattcattcttgctgcctggaaaaagattttgaaatgatggaatttggagaccagactgaaataggagagcgaggaatcaatctcagtggtgggcagaaacagcgtattcagctcgccagagcagtctaccaacattgtgatatatatcttcttgatgatgtctttagtgctgttgatgcacacactggttcaaatatctttaaggagtgtctaagggggacacttaaggggaagaccgtcatacttgttacacaccaaatggatttcttgcacaatgtggaaaacatatttgtcatgagagatggtatgattgcacaatcaggaaagtatgatgaattaatagaagcagattctgattttgccgatcttgttgctgctcatgacagttcaatggaactggtggagcaacgttgtcaagtagagaaacctgaacattttcagcctactacagtagttagaatcccttctctacgctctagatccattggaaagggtgagaaggtggttgttgcaccagaaatagaagcagccacttctaagattataaaagaagaggaaagggagagtggtcaagtaagttggcgagtgtacaagctgtatatgacagaggcctggggctggtggggagttatgggcatggtttcctttgcagtcgtgtggcagtgctctgatatggctagtgactattggctatcatatgaaacgtcaggcggcattcaatttaacccatcgttgttcattggagtgtatgtggccatagctgctttttcaatggtccttcaagtaatcaagactcttcttgagacagttttgggtcttcaaacagctcagatatttttcgagaagatgtttgacagcattctgcatgcccctatgtcatttttcgataccactccttcaggaaggattctcagtcgggcatcgtctgaccaaacgaccattgatgttgtgctggcatttttcattggtctgacaatttcaatgtacatttcagtattgagcaccattattgtcacttgtcaggttgcctggccatcagttgtagctgtaattccacttctattattgaacatttggtacaggaatctctatcttgcaacctcacgggagttaactcgacttgaaggagtgacaaaggcaccggttattgatcacttgtctgaaactgttcttggtgtcacaactataagatgtttcaaaaaggagaaagaatttttccatgagaatttagacaaaattaattcaagtttgcgcatgtacttccacaactatgccgcaaatgaatggcttggtttccgactggagctaattggaacacttctattgtcaataactgcatttctcatgatcagcctgcccagtaattttatcaagaaagg

SEQ ID NO: 216011 - DNA, 2448 bp, Zea Mays
atctccaatcccatcttcatcttcctcctagcgccgggccctctccatcttccgctcccccctactcgcgctcggcacgcaggcggcagcggcggcgctcaggttcggtctctcagcgacggcgtcagcggcttcccctcccgcccctcgatagttgcctcgcgccctcgactccggccctccgcacacctgccggtgaccctgcgtgcccccctctctctcctcccgcctccggtggatcgtcaacggcgcccgcccctgcggctgcgccgcgcctggcctgagggcagcgggagccagcagccgctgttccaccaaggcggtcgcgcctctttgggagcgcttatgccagccgtcctctcagcacttcagcgcgctgaagcgtgcgactgatttcaaccctggatctcgaggatgcgactctagtcactctacactgcaacaggtcacgggcggtgagagctttctcgctcagtcactaagtcttggttctaagccgcctctccgcatttgtgggaaggcttgcctcggtttatcccttcacgagaccccactcatgtggctggcagcctacctacggcagtgggtctgcctttttatgctttatgtcatcatctttgtcctgaacattgaaatggttgtaggaatcctactgttttgattaaatcactaccgcatcatcaaatatggaagttgatgatgacgtggaggaggatgacatagattttaaccctttccttagggaaggatctccgtctgagacctcatcaagccttacctcagaagcagaatgcgaggaacatagttctgaaaatcaaccaagtaaccatacatatcagcagaatactgtagttaatgaaaatacaagtgacagtgcacttcctcaaaatagattgtcgtctcaagatgctgttaacgaaatgtttccagaagaaacgtctacccaggttaatattgagaatgatggtcacttgaatggattggaaaaagacgttttagcaagcgaagctgcttgctctccaacagtgcaagaccctcatcatctatctctcgaaattagtgaggaagatgcaatttgcaaacggacaagggcaagatactcactagcaaactattcactcgaggaattggagacctttctccaggaatctgatgatgatagtggtctgcaaaatgttgatgaagaagaggaataccgcaagtttcttgctgctgtcctgtctggtgtaggcaatgacacacaaacattccagggggatgaaaatcaagatgaagatgataatgatgcagactttgagctcgagattgaggaggctctagaaagtgatggtgatgaaaatgttgagaactatcacaacacaaatcctagaaaagagaaagatgtccgtaggcctcagactaggcagaggcggccattaactgggatgtctggggctggtagtgatcaccaggaatccaataaaactcatttaagaccaattgtgccatatattccgtctgcattggtgactcctgcgcatgcttttggatggcaatatgctaaccagaatgcctttttcccttcatccttggtttcactaacacgtccacctttagcatgtggatttacttatcagcaactcgggcaattgcatgtgttgatatatgagcatgttcagctccttatccaaacattttccctatgtgttcttgattcatctaaacaagatgtggctaataatgtcaaaaagatgatagttgagttggttggtgctcgtgatcaagcattggccaggagctctcctcaacggcatatcttctttgaaacccaacatctctcatctagttttgtttcttctgataatttggaacgccaatggattccgttaatcaagagtcctattatatccgtccttgatgttgcaccgcttgagttggtcctcgactatttaagtgacgtcgcaactgctgtcgtgaagtatagaaaaagtcatgtggatggtactgctgacaaaacccgcaggaaagagcccctgtttccttcagcagcgattaacagttgcaaacaagtgaataatgtttctcaagatagatcaaatggtgtgcctacagcatcacctccatctgggcagttgcagcagaagaaatcgttggctgctaccctgcttgagaatattaaaaaggatacaattgctcttgttcctgctgacattgcaagattagcacagagattcttttcacttttcaattttgcactctttcctcataagtcacctccttcacctatggccaatagggttcttttcactgatgcagaggacagattattagctctaggaattctggaatataataatgactgggcagcaatacaaaagcgctttcttccttgtaaatcaaagcatcagatatttgtgagacaaaaaaatcgtagctcctccaaagctcctgataatccagttaaggata

SEQ ID NO: 216012 - DNA, 2045 bp, Zea Mays
ggcaatccgcacagtagccgccgcagcagattggcggacactgcaatcaccaacaatggaggatgctgacccttcgtcttccctcgctgggccttggaacgaccgcttaccaggaaaagaggactatacagatgagcctaagaagacaggggggagggaacccagtgtcgccatgggggagggaaggaggggtggttgccggcgtgggcttgtggtgggaagggtgcattggcaagttgatgatgacgtggaggaggatgacatagattttaaccctttccttagggaaggatctccgtctgagacctcatcaagccttacctcagaagcagaatgcgaggaacatagttctgaaaatcaaccaagtaaccatacatatcagcagaatactgtagttaatgaaaatacaagtgacagtgcacttcctcaaaatagattgtcgtctcaagatgctgttaacgaaatgtttccagaagaaacgtctacccaggttaatattgagaatgatggtcacttgaatggattggaaaaagacgttttagcaagcgaagctgcttgctctccaacagtgcaagaccctcatcatctatctctcgaaattagtgaggaagatgcaatttgcaaacggacaagggcaagatactcactagcaaactattcactcgaggaattggagacctttctccaggaatctgatgatgatagtggtctgcaaaatgttgatgaagaagaggaataccgcaagtttcttgctgctgtcctgtctggtgtaggcaatgacacacaaacattccagggggatgaaaatcaagatgaagatgataatgatgcagactttgagctcgagattgaggaggctctagaaagtgatggtgatgaaaatgttgagaactatcacaacacaaatcctagaaaagagaaagatgtccgtaggcctcagactaggcagaggcggccattaactgggatgtctggggctggtagtgatcaccaggaatccaataaaactcatttaagaccaattgtgccatatattccgtctgcattggtgactcctgcgcatgcttttggatggcaatatgctaaccagaatgcctttttcccttcatccttggtttcactaacacgtccacctttagcatgtggatttacttatcagcaactcgggcaattgcatgtgttgatatatgagcatgttcagctccttatccaaacattttccctatgtgttcttgattcatctaaacaagatgtggctaataatgtcaaaaagatgatagttgagttggttggtgctcgtgatcaagcattggccaggagctctcctcaacggcatatcttctttgaaacccaacatctctcatctagttttgtttcttctgataatttggaacgccaatggattccgttaatcaagagtcctattatatccgtccttgatgttgcaccgcttgagttggtcctcgactatttaagtgacgtcgcaactgctgtcgtgaagtatagaaaaagtcatgtggatggtactgctgacaaaacccgcaggaaagagcccctgtttccttcagcagcgattaacagttgcaaacaagtgaataatgtttctcaagatagatcaaatggtgtgcctacagcatcacctccatctgggcagttgcagcagaagaaatcgttggctgctaccctgcttgagaatattaaaaaggatacaattgctcttgttcctgctgacattgcaagattagcacagagattcttttcacttttcaattttgcactctttcctcataagtcacctccttcacctatggccaatagggttcttttcactgatgcagaggacagattattagctctaggaattctggaatataataatgactgggcagcaatacaaaagcgctttcttccttgtaaatcaaagcatcagatatttgtgagacaaaaaaatcgtagctcctccaaagctcctgataatccagttaagggttcaaaatttaatattatggtcaaggtgtccattgagttgcatagtactgtaacag

SEQ ID NO: 216013 - DNA, 2314 bp, Zea Mays
cttcatctccaatcccatcttcatcttcctcctagcgccgggccctctccatcttccgctcccccctactcgcgctcggcacgcaggcggcagcggcggcgctcaggttcggtctctcagcgacggcgtcagcggcttcccctcccgcccctcgatagttgcctcgcgccctcgactccggccctccgcacacctgccggtgaccctgcgtgcccccctctctctcctcccgcctccggtggatcgtcaacggcgcccgcccctgcggctgcgccgcgcctggcctgagggcagcgggagccagcagccgctgttccaccaaggcggtcgcgcctctttgggagcgcttatgccagccgtcctctcagcacttcagcgcgctgaagcgtgcgactgatttcaaccctggatctcgaggatgcgactctagtcactctacactgcaacaggttgtaggaatcctactgttttgattaaatcactaccgcatcatcaaatatggaagttgatgatgacgtggaggaggatgacatagattttaaccctttccttagggaaggatctccgtctgagacctcatcaagccttacctcagaagcagaatgcgaggaacatagttctgaaaatcaaccaagtaaccatacatatcagcagaatactgtagttaatgaaaatacaagtgacagtgcacttcctcaaaatagattgtcgtctcaagatgctgttaacgaaatgtttccagaagaaacgtctacccaggttaatattgagaatgatggtcacttgaatggattggaaaaagacgttttagcaagcgaagctgcttgctctccaacagtgcaagaccctcatcatctatctctcgaaattagtgaggaagatgcaatttgcaaacggacaagggcaagatactcactagcaaactattcactcgaggaattggagacctttctccaggaatctgatgatgatagtggtctgcaaaatgttgatgaagaagaggaataccgcaagtttcttgctgctgtcctgtctggtgtaggcaatgacacacaaacattccagggggatgaaaatcaagatgaagatgataatgatgcagactttgagctcgagattgaggaggctctagaaagtgatggtgatgaaaatgttgagaactatcacaacacaaatcctagaaaagagaaagatgtccgtaggcctcagactaggcagaggcggccattaactgggatgtctggggctggtagtgatcaccaggaatccaataaaactcatttaagaccaattgtgccatatattccgtctgcattggtgactcctgcgcatgcttttggatggcaatatgctaaccagaatgcctttttcccttcatccttggtttcactaacacgtccacctttagcatgtggatttacttatcagcaactcgggcaattgcatgtgttgatatatgagcatgttcagctccttatccaaacattttccctatgtgttcttgattcatctaaacaagatgtggctaataatgtcaaaaagatgatagttgagttggttggtgctcgtgatcaagcattggccaggagctctcctcaacggcatatcttctttgaaacccaacatctctcatctagttttgtttcttctgataatttggaacgccaatggattccgttaatcaagagtcctattatatccgtccttgatgttgcaccgcttgagttggtcctcgactatttaagtgacgtcgcaactgctgtcgtgaagtatagaaaaagtcatgtggatggtactgctgacaaaacccgcaggaaagagcccctgtttccttcagcagcgattaacagttgcaaacaagtgaataatgtttctcaagatagatcaaatggtgtgcctacagcatcacctccatctgggcagttgcagcagaagaaatcgttggctgctaccctgcttgagaatattaaaaaggatacaattgctcttgttcctgctgacattgcaagattagcacagagattcttttcacttttcaattttgcactctttcctcataagtcacctccttcacctatggccaatagggttcttttcactgatgcagaggacagattattagctctaggaattctggaatataataatgactgggcagcaatacaaaagcgctttcttccttgtaaatcaaagcatcagatatttgtgagacaaaaaaatcgtagctcctccaaagctcctgataatccagttaagggttcaaaatttaatattatggtcaaggtgtccattgagttgcatagtactgtaacag

SEQ ID NO: 216014 - DNA, 1978 bp, Zea Mays
gtcgtttcttcatctccaatcccatcttcatcttcctcctagcgccgggccctctccatcttccgctcccccctactcgcgctcggcacgcaggcggcagcggcggcgctcaggttgtaggaatcctactgttttgattaaatcactaccgcatcatcaaatatggaagttgatgatgacgtggaggaggatgacatagattttaaccctttccttagggaaggatctccgtctgagacctcatcaagccttacctcagaagcagaatgcgaggaacatagttctgaaaatcaaccaagtaaccatacatatcagcagaatactgtagttaatgaaaatacaagtgacagtgcacttcctcaaaatagattgtcgtctcaagatgctgttaacgaaatgtttccagaagaaacgtctacccaggttaatattgagaatgatggtcacttgaatggattggaaaaagacgttttagcaagcgaagctgcttgctctccaacagtgcaagaccctcatcatctatctctcgaaattagtgaggaagatgcaatttgcaaacggacaagggcaagatactcactagcaaactattcactcgaggaattggagacctttctccaggaatctgatgatgatagtggtctgcaaaatgttgatgaagaagaggaataccgcaagtttcttgctgctgtcctgtctggtgtaggcaatgacacacaaacattccagggggatgaaaatcaagatgaagatgataatgatgcagactttgagctcgagattgaggaggctctagaaagtgatggtgatgaaaatgttgagaactatcacaacacaaatcctagaaaagagaaagatgtccgtaggcctcagactaggcagaggcggccattaactgggatgtctggggctggtagtgatcaccaggaatccaataaaactcatttaagaccaattgtgccatatattccgtctgcattggtgactcctgcgcatgcttttggatggcaatatgctaaccagaatgcctttttcccttcatccttggtttcactaacacgtccacctttagcatgtggatttacttatcagcaactcgggcaattgcatgtgttgatatatgagcatgttcagctccttatccaaacattttccctatgtgttcttgattcatctaaacaagatgtggctaataatgtcaaaaagatgatagttgagttggttggtgctcgtgatcaagcattggccaggagctctcctcaacggcatatcttctttgaaacccaacatctctcatctagttttgtttcttctgataatttggaacgccaatggattccgttaatcaagagtcctattatatccgtccttgatgttgcaccgcttgagttggtcctcgactatttaagtgacgtcgcaactgctgtcgtgaagtatagaaaaagtcatgtggatggtactgctgacaaaacccgcaggaaagagcccctgtttccttcagcagcgattaacagttgcaaacaagtgaataatgtttctcaagatagatcaaatggtgtgcctacagcatcacctccatctgggcagttgcagcagaagaaatcgttggctgctaccctgcttgagaatattaaaaaggatacaattgctcttgttcctgctgacattgcaagattagcacagagattcttttcacttttcaattttgcactctttcctcataagtcacctccttcacctatggccaatagggttcttttcactgatgcagaggacagattattagctctaggaattctggaatataataatgactgggcagcaatacaaaagcgctttcttccttgtaaatcaaagcatcagatatttgtgagacaaaaaaatcgtagctcctccaaagctcctgataatccagttaagggttcaaaatttaatattatggtcaaggtgtccattgagttgcatagtactgtaacag

SEQ ID NO: 216015 - DNA, 1992 bp, Zea Mays
tcacgggcggtgagagctttctcgctcagtcactaagtcttggttctaagccgcctctccgcatttgtgggaaggcttgcctcggtttatcccttcacgagaccccactcatgtggctggcagcctacctacggcagtgggtctgcctttttatgctttatgtcatcatctttgtcctgaacattgaaatggttgtaggaatcctactgttttgattaaatcactaccgcatcatcaaatatggaagttgatgatgacgtggaggaggatgacatagattttaaccctttccttagggaaggatctccgtctgagacctcatcaagccttacctcagaagcagaatgcgaggaacatagttctgaaaatcaaccaagtaaccatacatatcagcagaatactgtagttaatgaaaatacaagtgacagtgcacttcctcaaaatagattgtcgtctcaagatgctgttaacgaaatgtttccagaagaaacgtctacccaggttaatattgagaatgatggtcacttgaatggattggaaaaagacgttttagcaagcgaagctgcttgctctccaacagtgcaagaccctcatcatctatctctcgaaattagtgaggaagatgcaatttgcaaacggacaagggcaagatactcactagcaaactattcactcgaggaattggagacctttctccaggaatctgatgatgatagtggtctgcaaaatgttgatgaagaagaggaataccgcaagtttcttgctgctgtcctgtctggtgtaggcaatgacacacaaacattccagggggatgaaaatcaagatgaagatgataatgatgcagactttgagctcgagattgaggaggctctagaaagtgatggtgatgaaaatgttgagaactatcacaacacaaatcctagaaaagagaaagatgtccgtaggcctcagactaggcagaggcggccattaactgggatgtctggggctggtagtgatcaccaggaatccaataaaactcatttaagaccaattgtgccatatattccgtctgcattggtgactcctgcgcatgcttttggatggcaatatgctaaccagaatgcctttttcccttcatccttggtttcactaacacgtccacctttagcatgtggatttacttatcagcaactcgggcaattgcatgtgttgatatatgagcatgttcagctccttatccaaacattttccctatgtgttcttgattcatctaaacaagatgtggctaataatgtcaaaaagatgatagttgagttggttggtgctcgtgatcaagcattggccaggagctctcctcaacggcatatcttctttgaaacccaacatctctcatctagttttgtttcttctgataatttggaacgccaatggattccgttaatcaagagtcctattatatccgtccttgatgttgcaccgcttgagttggtcctcgactatttaagtgacgtcctgtcgtgaagtatagaaaaagtcatgtggatggtactgctgacaaaacccgcaggaaagagcccctgtttccttcagcagcgattaacagttgcaaacaagtgaataatgtttctcaagatagatcaaatggtgtgcctacagcatcacctccatctgggcagttgcagcagaagaaatcgttggctgctaccctgcttgagaatattaaaaaggatacaattgctcttgttcctgctgacattgcaagattagcacagagattcttttcacttttcaattttgcactctttcctcataagtcacctccttcacctatggccaatagggttcttttcactgatgcagaggacagattattagctctaggaattctggaatataataatgactgggcagcaatacaaaagcgctttcttccttgtaaatcaaagcatcagatatttgtgagacaaaaaaatcgtagctcctccaaagctcctgataatccagttaagg

SEQ ID NO: 216016 - DNA, 1878 bp, Zea Mays
gccgggccctctccatcttccgctcccccctactcgcgctcggcacgcaggcggcagcggcggcgctcaggttgtaggaatcctactgttttgattaaatcactaccgcatcatcaaatatggaagttgatgatgacgtggaggaggatgacatagattttaaccctttccttagggaaggatctccgtctgagacctcatcaagccttacctcagaagcagaatgcgaggaacatagttctgaaaatcaaccaagtaaccatacatatcagcagaatactgtagttaatgaaaatacaagtgacagtgcacttcctcaaaatagattgtcgtctcaagatgctgttaacgaaatgtttccagaagaaacgtctacccaggttaatattgagaatgatggtcacttgaatggattggaaaaagacgttttagcaagcgaagctgcttgctctccaacagtgcaagaccctcatcatctatctctcgaaattagtgaggaagatgcaatttgcaaacggacaagggcaagatactcactagcaaactattcactcgaggaattggagacctttctccaggaatctgatgatgatagtggtctgcaaaatgttgatgaagaagaggaataccgcaagtttcttgctgctgtcctgtctggtgtaggcaatgacacacaaacattccagggggatgaaaatcaagatgaagatgataatgatgcagactttgagctcgagattgaggaggctctagaaagtgatggtgatgaaaatgttgagaactatcacaacacaaatcctagaaaagagaaagatgtccgtaggcctcagactaggcagaggcggccattaactgggatgtctggggctggtagtgatcaccaggaatccaataaaactcatttaagaccaattgtgccatatattccgtctgcattggtgactcctgcgcatgcttttggatggcaatatgctaaccagaatgcctttttcccttcatccttggtttcactaacacgtccacctttagcatgtggatttacttatcagcaactcgggcaattgcatgtgttgatatatgagcatgttcagctccttatccaaacattttccctatgtgttcttgattcatctaaacaagatgtggctaataatgtcaaaaagatgatagttgagttggttggtgctcgtgatcaagcattggccaggagctctcctcaacggcatatcttctttgaaacccaacatctctcatctagttttgtttcttctgataatttggaacgccaatggattccgttaatcaagagtcctattatatccgtccttgatgttgcaccgcttgagttggtcctcgactatttaagtgacgtctttacagctgtcgtgaagtatagaaaaagtcatgtggatggtactgctgacaaaacccgcaggaaagagcccctgtttccttcagcagcgattaacagttgcaaacaagtgaataatgtttctcaagatagatcaaatggtgtgcctacagcatcacctccatctgggcagttgcagcagaagaaatcgttggctgctaccctgcttgagaatattaaaaaggatacaattgctcttgttcctgctgacattgcaagattagcacagagattcttttcacttttcaattttgcactctttcctcataagtcacctccttcacctatggccaatagggttcttttcactgatgcagaggacagattattagctctaggaattctggaatataataatgactgggcagcaatacaaaagcgctttcttccttgtaaatcaaagcatcagatatttgtgagacaaaaaaatcgtagctcctccaaagctcctgataatccagttaagg

SEQ ID NO: 216017 - DNA, 2196 bp, Zea Mays
atctccaatcccatcttcatcttcctcctagcgccgggccctctccatcttccgctcccccctactcgcgctcggcacgcaggcggcagcggcggcgctcaggttcggtctctcagcgacggcgtcagcggcttcccctcccgcccctcgatagttgcctcgcgccctcgactccggccctccgcacacctgccggtgaccctgcgtgcccccctctctctcctcccgcctccggtggatcgtcaacggcgcccgcccctgcggctgcgccgcgcctggcctgagggcagcgggagccagcagccgctgttccaccaaggcggtcgcgcctctttgggagcgcttatgccagccgtcctctcagcacttcagcgcgctgaagcgtgcggttgtaggaatcctactgttttgattaaatcactaccgcatcatcaaatatggaagttgatgatgacgtggaggaggatgacatagattttaaccctttccttagggaaggatctccgtctgagacctcatcaagccttacctcagaagcagaatgcgaggaacatagttctgaaaatcaaccaagtaaccatacatatcagcagaatactgtagttaatgaaaatacaagtgacagtgcacttcctcaaaatagattgtcgtctcaagatgctgttaacgaaatgtttccagaagaaacgtctacccaggttaatattgagaatgatggtcacttgaatggattggaaaaagacgttttagcaagcgaagctgcttgctctccaacagtgcaagaccctcatcatctatctctcgaaattagtgaggaagatgcaatttgcaaacggacaagggcaagatactcactagcaaactattcactcgaggaattggagacctttctccaggaatctgatgatgatagtggtctgcaaaatgttgatgaagaagaggaataccgcaagtttcttgctgctgtcctgtctggtgtaggcaatgacacacaaacattccagggggatgaaaatcaagatgaagatgataatgatgcagactttgagctcgagattgaggaggctctagaaagtgatggtgatgaaaatgttgagaactatcacaacacaaatcctagaaaagagaaagatgtccgtaggcctcagactaggcagaggcggccattaactgggatgtctggggctggtagtgatcaccaggaatccaataaaactcatttaagaccaattgtgccatatattccgtctgcattggtgactcctgcgcatgcttttggatggcaatatgctaaccagaatgcctttttcccttcatccttggtttcactaacacgtccacctttagcatgtggatttacttatcagcaactcgggcaattgcatgtgttgatatatgagcatgttcagctccttatccaaacattttccctatgtgttcttgattcatctaaacaagatgtggctaataatgtcaaaaagatgatagttgagttggttggtgctcgtgatcaagcattggccaggagctctcctcaacggcatatcttctttgaaacccaacatctctcatctagttttgtttcttctgataatttggaacgccaatggattccgttaatcaagagtcctattatatccgtccttgatgttgcaccgcttgagttggtcctcgactatttaagtgacgtcgcaactgctgtcgtgaagtatagaaaaagtcatgtggatggtactgctgacaaaacccgcaggaaagagcccctgtttccttcagcagcgattaacagttgcaaacaagtgaataatgtttctcaagatagatcaaatggtgtgcctacagcatcacctccatctgggcagttgcagcagaagaaatcgttggctgctaccctgcttgagaatattaaaaaggatacaattgctcttgttcctgctgacattgcaagattagcacagagattcttttcacttttcaattttgcactctttcctcataagtcacctccttcacctatggccaatagggttcttttcactgatgcagaggacagattattagctctaggaattctggaatataataatgactgggcagcaatacaaaagcgctttcttccttgtaaatcaaagcatcagatatttgtgagacaaaaaaatcgtagctcctccaaagctcctgataatccagttaagg

SEQ ID NO: 216018 - DNA, 2409 bp, Zea Mays
gaacaaaaagcgccggcatctcaaacccgacggcgctctcttctctatcctctgtcccctccaccaaaaccgacggcgacgtcgctctcctccaccggtgcttggcgctctccctccaccggggcggtccaccgacgctcggcgagctccaccggtgggcgctggtcagatccgcttggcagtcatccacctggcacatcgggtagctcacgcctccgttggcagtcccaccgccgcccggccctcccccagcgcccccggtgatccggaccgcacccgcttgctcggcctaacgaccggctcctgccccgccgcagccgaagctcccagcgtcctcctgcaggccgagctgaaggttcagcgcgccggtggagttcgacgacgaaactccgtcacgtcatacctctccgcctcccgtcttccagacgtctccaatcggggctcccagcgtctcggagaagaggagcagcacgacacggcggctgtggcgaggaatgctcctgtcccatcccaacccagttagcagccgcccaaggaggaggagatccaatcggcgtgcgggcgtccacggtccatccatcgatccaattccaatctgcaggttgtaggaatcctactgttttgattaaatcactaccgcatcatcaaatatggaagttgatgatgacgtggaggaggatgacatagattttaaccctttccttagggaaggatctccgtctgagacctcatcaagccttacctcagaagcagaatgcgaggaacatagttctgaaaatcaaccaagtaaccatacatatcagcagaatactgtagttaatgaaaatacaagtgacagtgcacttcctcaaaatagattgtcgtctcaagatgctgttaacgaaatgtttccagaagaaacgtctacccaggttaatattgagaatgatggtcacttgaatggattggaaaaagacgttttagcaagcgaagctgcttgctctccaacagtgcaagaccctcatcatctatctctcgaaattagtgaggaagatgcaatttgcaaacggacaagggcaagatactcactagcaaactattcactcgaggaattggagacctttctccaggaatctgatgatgatagtggtctgcaaaatgttgatgaagaagaggaataccgcaagtttcttgctgctgtcctgtctggtgtaggcaatgacacacaaacattccagggggatgaaaatcaagatgaagatgataatgatgcagactttgagctcgagattgaggaggctctagaaagtgatggtgatgaaaatgttgagaactatcacaacacaaatcctagaaaagagaaagatgtccgtaggcctcagactaggcagaggcggccattaactgggatgtctggggctggtagtgatcaccaggaatccaataaaactcatttaagaccaattgtgccatatattccgtctgcattggtgactcctgcgcatgcttttggatggcaatatgctaaccagaatgcctttttcccttcatccttggtttcactaacacgtccacctttagcatgtggatttacttatcagcaactcgggcaattgcatgtgttgatatatgagcatgttcagctccttatccaaacattttccctatgtgttcttgattcatctaaacaagatgtggctaataatgtcaaaaagatgatagttgagttggttggtgctcgtgatcaagcattggccaggagctctcctcaacggcatatcttctttgaaacccaacatctctcatctagttttgtttcttctgataatttggaacgccaatggattccgttaatcaagagtcctattatatccgtccttgatgttgcaccgcttgagttggtcctcgactatttaagtgacgtcgcaactgctgtcgtgaagtatagaaaaagtcatgtggatggtactgctgacaaaacccgcaggaaagagcccctgtttccttcagcagcgattaacagttgcaaacaagtgaataatgtttctcaagatagatcaaatggtgtgcctacagcatcacctccatctgggcagttgcagcagaagaaatcgttggctgctaccctgcttgagaatattaaaaaggatacaattgctcttgttcctgctgacattgcaagattagcacagagattcttttcacttttcaattttgcactctttcctcataagtcacctccttcacctatggccaatagggttcttttcactgatgcagaggacagattattagctctaggaattctggaatataataatgactgggcagcaatacaaaagcgctttcttccttgtaaatcaaagcatcagatatttgtgagacaaaaaaatcgtagctcctccaaagctcctgataatccagttaagg

SEQ ID NO: 216019 - DNA, 1043 bp, Zea Mays
cttattcattcatgctttggccaatcatttgtgtggaagggatttggtttcagtggccgaccacactataaattctgacatgtgtgcttcaaggctgtctctagcagttgtggatagctttatgtattggcacgaacagcagtgcatggttgggcactgctgctcttgttaccaacatgaggaatttccctctcagccgaggcactgttgctggtctcatcaagggttatgttgctgttagtgctgctgtctacactgaaacgtttaatggaatgctaggcaattcacccacaaatcttttgatgttgcttgccttggggatcccaacagcatgtattgtggtgatgtattttgttaggccttgcactccatcactggatgaggacaactcaacagaacacagccatttcatgtacacacaaatctcaagtgtggttctcggaatataccttatggttgctacaatacttggtgatactttaaaactaagtcaggctgtcacctatctattgtttggcataatgatacttttgctccttgctccacttgcaataccaataaagatgacactttatccaaacaaacaaacaaaggaaaaggccagcacccttgctccatcttattcaactgatagtctgtctggtgcggatccagagaactcacaaccacttttgggcagtgcctcaacaacacttgctacaggtaccaatgaatctgatgacagtactgatttggatcttctattggctgagggtgagggagcagtgaatttgaagaagaaaagggggccaagaaggggggatgatttcacattccttgaagccctagtaaaggcggacttctggctactgtttgttgtttacttttgtggagttggcacaggggtcactgttctcaataacctggcgcagattggaatgtctgttggtgctaatgacacaactattttgttgtgcctctttggcttctgcaactttgctggtcgtatccttggtggatctgtctctgaatatttcgtaaggtggaagtataggatctaaagt

SEQ ID NO: 216020 - DNA, 3799 bp, Zea Mays
gtcatgctcacgacatgctgatgttgagaagaaaaaggagagatgattgttggcccgaccaaggtgctattcatggacgagatatcaactgggctggacagctccacgacattccaaatcgtcaaatgtctccagcagattgtccacttgggcgaggccaccatcctcatgtccctcctccagcctgcccccgagaccttcgacctattcgatgacatcatcctactgtcagaaggccagattgtttaccagggaccccgcgaacacgtccttgagttcttcgaatcttgcggattcagctgccccgagcgcaagggtactgcagactttcttcaggaggtaacatcaaggaaggatcaggagcagtactgggctgacaagcagaggccttacagatacatttcggtgccagaatttgcacagcggtttcaacggttccatgtcgggctgcagcttgagaaccacctctcacttccgtttgacaagagccgtagccatcaggctgcccttgtattctcaaagcattctgtgtcaacaacagaactcctcaaggcatcttttgacaaggagtggctcctcatcaagcgcaattcattcgtgtacatcttcaagaccttacagcttatcattgtagccctcgttgcttcaacggtgtttctgagaactcacatgcatacgaggaatctagatgatggctttgtctacattggagcactgctctttactctgattgtgaacatgttcaatggttttgctgagctctccttggccataacaaggttgccggtgttcttcaagcaccgggacctgctcttctatcctgcttgggtcttcacactaccgaacgtcattcttaggatcccattctccattattgaatctatagtctgggttcttgtcacatattataccatagggttttctccagaggctgacaggtttttcaagcacttgctgctcgtgttcttgatccagcagatggcaggtgggcttttcagagcaatcgctggactttgcaggtccatgatcattgctcacactggtggagcactatctcttcttctcttctttgttcttggaggctttctcctgccaaaagctttcatccctaaatggtggatttggggatactggatttcacctttaatgtatggatacaatgctctagcagtcaatgaattctattctcctcggtggatgaataagtttgtactggatcaaaatggtgttccaaaaagactggggatagctatgcttgaaggtgccaacatctttgttgacaaaaattggtactggattggagcagcagggctcttgggtttcaccatctttttcaatgttcttttcacattgtcactcatgtacctgaaccctcttggcaagccacaagctattatatcagaagaaactgcaaaagaagcggaagggaatgggcatgcaaaagggacaataagaaatggaagcacgaaatcgaaggacggtagccatgataaggaaatgaaggagatgagattgaatgcgcgtttgagcagcagttcatctaatggggtttcacgagtcatgtccattggcagcaatgaagccgctctgtcaagaggcatggttcttccattcaaccctcttgccatgtcttttgataatgtgaattactatgtcgacatgcctgcggaaatgaaacagcaaggagtgcaggatgaccgactccaattgttgcgtgaggttacgggatcattcaggcctggagtgctgacagcacttatgggtgtcagtggagctggaaagactactcttatggatgttttagctggaagaaagactgggggttatattgaaggagatatcagaattgcaggctatcccaagaaccaagcaacatttgcaaggatttctggatactgcgagcaaaatgatatccattctcctcaggtcacagttcgggagtctttgatatactctgcctttttgcgccttcctgaaaagattggagataaagaaataactgatgatataaagattcaatttgtggatgaagttatggaactagtggaactcaacaatctgagcgacgctatagttgggctaccaggaatcacagggctttcaacagagcaaagaaaaaggttgacaatagccgtggagcttgttgccaatccatcaatcatatttatggatgaaccaacatcaggacttgatgcaagagctgcggcaattgtcatgagaaccgtgcgaaacacagttgacaccggacggacagttgtttgcacaatccatcagccaagcattgacatctttgaggcttttgatgagttgctattgttaaaaagaggaggccaggtgatctactctgggaaattgggtcgcaactcccagaaaatggttgagtattttgaggcaattcctggagtgcctaaaattaaagataagtacaatcctgcaacgtggatgctggaggtcagttcagttgcagctgaagtgcgactaaagatggattttgctgagtactataaaacatcagatctcaacatgcaaaacaaggtactggtgaaccagctgagtcaaccagaaccaggaacatcagatctttatttccctacagagtactcacaatccacagtaggacagttcaaagcctgcctctggaagcaatggctgacctattggcgcagcccggattacaaccttgttagattttccttcactttgttagttgccttgctgctcggctccattttctggaggataggcaccaacatgggagattcaaccactctcaggatggttattggatcaatgtacactgctgtgatgtttgtcggcatcaacaattgttcaactgtgcagccaattgtttcaattgagaggacggtcttctacagagagagggctgctgggatgtactctgcaatgccatatgccattgctcaggttgtcatagagataccatatgtgtttgtccaaacaacgtattacaccctcatcgtatacgccatgatgagtttccaatggacagctgccaagttcttctggttcttcttcatttcctacttctccttcctctacttcacctactatggcatgatgactgtctcaatctccccaaaccatgaggttgcatccatcttcgccgcagctttctattctctgttcaacctcttctcaggctttttcattccaagaccgagaattcctagatggtggatctggtactactggatttgcccattggcatggacagtgtatgggctcatcgtgacacaatacggagacctgcaagaccccatcacagtccctggcgaaagcaaccagacgattagctactatataacacatcattttggataccatagggattttatgccagtcgttgcgccagttctcgtgctctttgcagtattcttcgctttcatgtacgcagtctgcatcaagaagttgaactttcagcaacgataggaacaagatatggcagaaaagctcttgagagtattttttctttttttggaaaatacttccttttctcctttcatttttgagtccctttaatatattgcaatgtatatagggtgtagcttcggtattccacacatcgtcaaatgtggcgaggtcttatacagatttctagccgtttaactgtggaacattgtaatttgtaagagcacatctatgagaaagttttgttcatgcccaattcatttcacatggaatctttcgtgaaaccaactattcaattggaaacgagtataaggttatgtaaaagcggatattgtttttattgatatgatactctaaagacaagggcaag

SEQ ID NO: 216021 - DNA, 4429 bp, Zea Mays
gagctgccgacggtggaggtgcggttcgagaggctgacggtgcaggccaagtgccacgtgggcagccgcgcgctgccgacgctgctgaacacggcgcgcaacatcgcggagggcgccctgggcctgtgcggcgtgcggctggggcggcaggccaggctcaccatcctcggggacgtgtccggcgccgtccgcccctcgcggatgacgctgctgctgggcccgccgtcgtcggggaagaccacgctgctgctcgccctcgccggcaagctggaccccgcgctcacgcgcgccggcgaggtcacctacaacggcttccgcctcgacgagttcgtgccgcagaagacggcggcgtacatcagccagacggacgtgcacgtcggcgagatgacggtcaaggagacgctcgacttctccgccaggtgccagggcgtcggcaccaaatacgatctcatgaccgagttggcgaggagggagaaggaggccggcatccgcccggagcctgaagtcgacctcttcatgaaggccacttcaatggaaggtgtggggagcagtctccaaacggattatactctcaggatactggggctggacatctgcgcggacaccatcgtcggcgaccagatgcagcgggggatctccggtggccagaagaagcgtgtcaccacaggagagatgattgttggcccgaccaaggtgctattcatggacgagatatcaactgggctggacagctccacgacattccaaatcgtcaaatgtctccagcagattgtccacttgggcgaggccaccatcctcatgtccctcctccagcctgcccccgagaccttcgacctattcgatgacatcatcctactgtcagaaggccagattgtttaccagggaccccgcgaacacgtccttgagttcttcgaatcttgcggattcagctgccccgagcgcaagggtactgcagactttcttcaggaggtaacatcaaggaaggatcaggagcagtactgggctgacaagcagaggccttacagatacatttcggtgccagaatttgcacagcggtttcaacggttccatgtcgggctgcagcttgagaaccacctctcacttccgtttgacaagagccgtagccatcaggctgcccttgtattctcaaagcattctgtgtcaacaacagaactcctcaaggcatcttttgacaaggagtggctcctcatcaagcgcaattcattcgtgtacatcttcaagaccttacagcttatcattgtagccctcgttgcttcaacggtgtttctgagaactcacatgcatacgaggaatctagatgatggctttgtctacattggagcactgctctttactctgattgtgaacatgttcaatggttttgctgagctctccttggccataacaaggttgccggtgttcttcaagcaccgggacctgctcttctatcctgcttgggtcttcacactaccgaacgtcattcttaggatcccattctccattattgaatctatagtctgggttcttgtcacatattataccatagggttttctccagaggctgacaggtttttcaagcacttgctgctcgtgttcttgatccagcagatggcaggtgggcttttcagagcaatcgctggactttgcaggtccatgatcattgctcacactggtggagcactatctcttcttctcttctttgttcttggaggctttctcctgccaaaagctttcatccctaaatggtggatttggggatactggatttcacctttaatgtatggatacaatgctctagcagtcaatgaattctattctcctcggtggatgaataagtttgtactggatcaaaatggtgttccaaaaagactggggatagctatgcttgaaggtgccaacatctttgttgacaaaaattggtactggattggagcagcagggctcttgggtttcaccatctttttcaatgttcttttcacattgtcactcatgtacctgaaccctcttggcaagccacaagctattatatcagaagaaactgcaaaagaagcggaagggaatgggcatgcaaaagggacaataagaaatggaagcacgaaatcgaaggacggtagccatgataaggaaatgaaggagatgagattgaatgcgcgtttgagcagcagttcatctaatggggtttcacgagtcatgtccattggcagcaatgaagccgctctgtcaagaggcatggttcttccattcaaccctcttgccatgtcttttgataatgtgaattactatgtcgacatgcctgcggaaatgaaacagcaaggagtgcaggatgaccgactccaattgttgcgtgaggttacgggatcattcaggcctggagtgctgacagcacttatgggtgtcagtggagctggaaagactactcttatggatgttttagctggaagaaagactgggggttatattgaaggagatatcagaattgcaggctatcccaagaaccaagcaacatttgcaaggatttctggatactgcgagcaaaatgatatccattctcctcaggtcacagttcgggagtctttgatatactctgcctttttgcgccttcctgaaaagattggagataaagaaataactgatgatataaagattcaatttgtggatgaagttatggaactagtggaactcaacaatctgagcgacgctatagttgggctaccaggaatcacagggctttcaacagagcaaagaaaaaggttgacaatagccgtggagcttgttgccaatccatcaatcatatttatggatgaaccaacatcaggacttgatgcaagagctgcggcaattgtcatgagaaccgtgcgaaacacagttgacaccggacggacagttgtttgcacaatccatcagccaagcattgacatctttgaggcttttgatgagttgctattgttaaaaagaggaggccaggtgatctactctgggaaattgggtcgcaactcccagaaaatggttgagtattttgaggcaattcctggagtgcctaaaattaaagataagtacaatcctgcaacgtggatgctggaggtcagttcagttgcagctgaagtgcgactaaagatggattttgctgagtactataaaacatcagatctcaacatgcaaaacaaggtactggtgaaccagctgagtcaaccagaaccaggaacatcagatctttatttccctacagagtactcacaatccacagtaggacagttcaaagcctgcctctggaagcaatggctgacctattggcgcagcccggattacaaccttgttagattttccttcactttgttagttgccttgctgctcggctccattttctggaggataggcaccaacatgggagattcaaccactctcaggatggttattggatcaatgtacactgctgtgatgtttgtcggcatcaacaattgttcaactgtgcagccaattgtttcaattgagaggacggtcttctacagagagagggctgctgggatgtactctgcaatgccatatgccattgctcaggttgtcatagagataccatatgtgtttgtccaaacaacgtattacaccctcatcgtatacgccatgatgagtttccaatggacagctgccaagttcttctggttcttcttcatttcctacttctccttcctctacttcacctactatggcatgatgactgtctcaatctccccaaaccatgaggttgcatccatcttcgccgcagctttctattctctgttcaacctcttctcaggctttttcattccaagaccgagaattcctagatggtggatctggtactactggatttgcccattggcatggacagtgtatgggctcatcgtgacacaatacggagacctgcaagaccccatcacagtccctggcgaaagcaaccagacgattagctactatataacacatcattttggataccatagggattttatgccagtcgttgcgccagttctcgtgctctttgcagtattcttcgctttcatgtacgcagtctgcatcaagaagttgaactttcagcaacgataggaacaagatatggcagaaaagctcttgagagtattttttctttttttggaaaatacttccttttctcctttcatttttgagtccctttaatatattgcaatgtatatagggtgtagcttcggtattccacacatcgtcaaatgtggcgaggtcttatacagatttctagccgtttaactgtggaacattgtaatttgtaagagcacatctatgagaaagttttgttcatgcccaattcatttcacatggaatctttcgtgaaaccaactattcaattggaaacgagtataaggttatgtaaaagcggatattgtttttattgatatgatactctaaagacaagggcaag

SEQ ID NO: 216022 - DNA, 2367 bp, Zea Mays
ctttcttctccgcctctccctccttccctgtcgctctctccccgttctggttttcgtctaatctagattggatgggatgatgattcgaggcgttagcttattttagctgtaatcccagactaaaccctggctcgttggttcggcggcctcccggtgagaatcgcatctccaatcaggatggagacgaagaaagtggagtctgtccctggtcataatcacgcggggagtggatgataagatcataaaaatcagacaatcatcggtcacaactcatactgttgtgtctttttaacccctgagccaccgaggccaggagtgattgattggtttaagctcagcgcacccagagtctgtgacattcatgggtagtgcctgttcgaggaagaggggccagctggtccaagaggatgatctctacagtgcgaggttctccaagagcggcagcttcaagtggctgctgcatacgctgccccgcagcaactttgctgatgtgcagcggagagcacagggcccagctccaaaccggtgcccgtcgcttgtggagctgtgcgtggccaaagtctgcaaggacataaatatgtattctgatttatccctgctgcccagagatcttagtcagcagatattcaatgagctggtggaatgtggatgcctcacggaggcatcgcttggggctttccgtgattgcgatttgcaggatatttgtctgggagactaccctggagttactgatgcttggatggaagtagtggcttctcaagggcagtccttgctatctgttgacctctcttgctcggatgtcactgatagtggattcaatcttcttaaagattgctcaagcatgcaaagtttggcatgtgattattgtgatcaaatctcagaacatggacttaagacattatcaggcttttcaaacttgacatcactgagcattaagaaatgtgctgctgttactgctgaaggagcaaaagcctttgcaaacttagttaatttggtaaacttagacctcgagcgttgtccaaagattaatggtgggcttatacatttaaaaggcttgaaaaaactggaaaaactgaatctgagatactgtaatggcatcacagattcagacatgaaatatttgtcagatctcacgaatttgagagagctacagctctcttcctgcaaaatatctgcttttggtgtttcttatctgagaggtttgcacaagctaggtcatctaaacctggagggctgtgcagttactgcagtttgtttggaggttatatctgagcttgcttcgttggtcttgttgaatctgagtcggtgtggcatatgcgatgaaggctgtgagaacttgaaaggtcttacaaaattgaaggctctaagtttagggttcaaccaaattacagatgcatgtttaattcatttaaaagatttggtcaacttggagtgcttgaacttggactcatgtaagattggtgatgagggtctatttcacctaaaaggcctcatacagctaaaaaacctggagctttcagacactgaagttggaagcaatggacttcgtcatctttctggtctgcgtaatttgcagagcatcaatctctctttcacattggttactgacattggtttgaagaagatctctggcttgagttcactgaagtctcttaatcttgacaatcgccaaatcacagatactggtttagcgtctcttacaggtctcactggattgacacacctcgacctatttggagctcgcataactgattctggcatgagctgcttcagatttttcaagaatattcagtccctggaggtctgcggtgggttgattacggatgctggcgtgaagaacatcaaggacctgaaagctctgacgttgctcaacctatctcaaaacggcaagctcacggacaaaaccctggagctgatctccggcctgactgcgctagtgtcgttgaacgtgtccaactcccgggtctccaactcgggcctccaccacctgaaaccgctgcagaacctgcgctccctatccctggagtcctgcagggtgacggcaagcgagatggataagctccggctggtcgccctccccaaccttatcagtgtgcggccggagtgatacgaccgccagcgctcccacagcgacctgtaactgtggagcaagtggcgcctggctagagcaggccgccttgtacatacttttgcaaaaacgaggtgtctgtacatattgttcgtcgtgtcgtgtcgtgtcagtgtgcctgatggcaacgggctaatacgtccgtgccaacgtgtgcatggtatcccacggaccctgtggtagtaaggagcagttgtaaatatgccgtgcttcctctccattttccatgtaaattcgtg

SEQ ID NO: 216023 - DNA, 1067 bp, Zea Mays
tattaggtataaaaaatattattcctaattatttatttggcgtgtccatggcgacgacacaacacatcacgacaacatgtgaagttgggcgtctgggcctgcagtcgtatcaggtggctatctggctctagaacaagcgagcgcggtgagatcgggcacgactacgccacacacgcgttctaggctaagtactacaagttgcacacttgccaccctcgtcaagtcgcttaggtaggagaaggtcacgctcgccgtgcaggtctgcgtaatttgcagagcatcaatctctctttcacattggttactgacattggtttgaagaagatctctggcttgagttcactgaagtctcttaatcttgacaatcgccaaatcacagatactggtttagcgtctcttacaggtctcactggattgacacacctcgacctatttggagctcgcataactgattctggcatgagctgcttcagatttttcaagaatattcagtccctggaggtctgcggtgggttgattacggatgctggcgtgaagaacatcaaggacctgaaagctctgacgttgctcaacctatctcaaaacggcaagctcacggacaaaaccctggagctgatctccggcctgactgcgctagtgtcgttgaacgtgtccaactcccgggtctccaactcgggcctccaccacctgaaaccgctgcagaacctgcgctccctatccctggagtcctgcagggtgacggcaagcgagatggataagctccggctggtcgccctccccaaccttatcagtgtgcggccggagtgatacgaccgccagcgctcccacagcgacctgtaactgtggagcaagtggcgcctggctagagcaggccgccttgtacatacttttgcaaaaacgaggtgtctgtacatattgttcgtcgtgtcgtgtcgtgtcagtgtgcctgatggcaacgggctaatacgtccgtgccaacgtgtgcatggtatcccacggaccctgtggtagtaaggagcagttgtaaatatgccgtgcttcctctccattttccatgtaaattcgtg

SEQ ID NO: 216024 - DNA, 3158 bp, Zea Mays
ggttaggctgtctctagcaatgtcctttaaatttcattctctaaagaaatattctgtgtcctttacagcatcctctaaaagatttcgtcctctatatttttttctactccaacagcgtcctctaaatttcatcctctatataaatagtgttaccagactttattttctacattcttttttccgcattggacacacacagaaaaatatcatttgtatatctagtattaaaatacgatgtatattaattttcttcacctaaaatagtacacctttttattacaaagtttccttggcagatcttaaaaaaattactatacatatttgagcagacacctaataatattgcttgctgctacttattcttcattaattcagctacaatacttattatactgcatgttgttgtacatttctagcggagctgaagtagagagacacgaatagaggagccgctgcatttggaggtggttgaggacgtcctctattttaccggaccctttagcgcacgttgttggaggaaaaaagttgatcaccatgcgctaaatatagagtagaggagcatatagcgcaccttgctggagagagtctaggccctgcctctctggggtaaagtaaagtatccaaacatcttgtcacttcaagggaagcgttagaaaccgttgtgtcagcgttcactttgtcgtctcaacgggatcaattggaagtcttgagaaacataacagcaaacctaaccccatagacctaatacgttccaaatgctgcaatgccaactaccagaatgcttgaatcaattaggactgttccccatcaaaattggcaaaactgagctgcgtttctcggacagtagcctcagccttatggtaacaacagggaacctccgcaccagatgtgtctcccctcgagctatatagggttaggagaaaacaaaacatcagtcaagcactaacaaggatggaccagtaactactacaagggcatcatccatcacacacctcggaacaagtttcattggcaccatgacgagggcggtctcatggacacatgcacctcatgttcttcagggccaacacggtactttgggacaataatctccaggcctgtccccgtttcatcgcggtatgcttccagagtggcatcttcagggatccgggtaggcagtgggatttcccggacaaactctcctggtgggcaatgctcaggagaaggatccgccaacttgaaagtccgatcatgccttttcaataatggcatcctaccaacgctaatgcaagataccttaacaatcccattcgtaagagtattcttccatgaaaccttcaccttctgaaaatcagagaaaggcaggctaacaatgatcaagtagcccttgctgtcctcatatattgtttttgcggcagttactggtccagaagcatggcgcatcacacctgtgaagtcattcatccatgatggctcaaaggtgtggctcacatccatgtcttgggccttgtctgaattcgaattgctgcagtcctcttccgttgcagacggtgaggaatccttcctgcgcttgttacagatggttgcgatctccatggcatccccagaactgtgattggatggttgtgtcgataggttaaggccagaaccgttcagcaacctcttgtggtgcccatgtgagctactctttgtaggaaccacggctgctagcctctcgagctcaaattccgtgctcggcagattcctccaagactcgaaatcacttgcctcggctgggatcgagaaattggcatccctcccggtgagctccatccacctctttaaatcagactcaggtacacctgccaagtttggcgccctcacgatttcgatcccgtgaatacactgcgggttagagagcccacgataatgcttgcgctgcatccggtgtgagcgcacaaaccctttgtctgcgctgaaagggaactgtggatccccaaggcgcgagtgcccattcatgaagctcctcagctgcatcttccccagggcattctccgatcgctccttaaagatccacatgtacatgttctccatgtcgtgctgcaccaggaaagcgtccagagtggcactggcactattaccattcccgccggtggtggctgccttcgccttgccacccttgtcggtggacatgactggcttgaagtagtgggtgaagaagaaccacgctccccaaatgctatcattcctcttgacgcacttgcgcgccacgctggaaccggagcccttggtgtgggacacggcgatcacggtggccgcggctgctgctggggccaagacaggcccggcagcagcgggcgaatccgagtcgtagtgctgcgggccgccgaggccggcatctagcacgtcaacgttggcgtcgtgcgacgccggaggtggcggagacgggtcggcggtgagggggaggttgatgtcagggggggcgaccgccgcggcatgtaggcagcggcggaagggcccctgtggcgggaggaagaggtcgaagtggtcgtgggaggcggtgtccatggagaggaaggtgaaagggccctggtgtggatggtgggccgtggtggtgtccatggagagcgcggtgagcagcgactcgcccatggcggcggcggcggccgtcgtcctcctggcggctcgctcctcgtccgcctgctgctccccttccgtcgcttctctgcccaaatcttcggcgcttcctcctccaccgcctccgcacggcgcgctcctctcctccgaatcgctccacgagcatcagttagcgaccaggcttcacacctccctcgcgtccatccgccagccgagaggaaatggggggggtgcacgtacctacgcaggtccaagaaacccggagctctcaaatcgacgaaccgcctccaccatccagccgaacaacggtccaagaatccctccctcctcctgctgcggtacgttacaatcaaatcaaatgaaaaaaaatcaaacgtcgtcgaatcggcgggcgggggctcgcgcggtcgatggatgaacacagcgggtgggggaggtgggaagggggaagacggtaacggaggcggggagagtttaaggcgaggcgacggtgggggcgcagccaacacggtgagccgcggcctcccccagaaggagcctggaggccctggacgcggggctgg

SEQ ID NO: 216025 - DNA, 3818 bp, Zea Mays
gttagaggcggcggtgagtaggcaagcgatactagctaggagaggagactgcaggcaccggcggcgcgggtgatctctcacggcatcgccggagcagatggacgcttcagatagccccccatccgggcgaccgtcatcctccgccgtcgcgctctacggggactctcctatcttcgatttcgttgatagtctatctcccatagcaccaccgaagcctttaggttcaacacaaagtgtccagctattcaagtcatcaaacttagcacctgtttcttcaattttcacctcgccccaagttaatccacgaaaggaatctaaatccacaatcagctgcattgaactgtctggatccgcagcacttgctccagaaacttgtactccttttgaggatgcaacaaattcaccaagcaaatggcttcagtccaccttatttggtagtgaaactttaggagatgccaataaacaagatattgatggcaaaccaaatcatactgcagatgtggaacatgtaaagccatcaagcacatgctctgatcagaatggctttgaccaaatggactcatcgacttctggaagaaatgttcaggagaatgagctggccaaacaggatagcaatgatctagcaccatgcagtttaaatcacttgatcacacattgtggtactggtaatagtgtcatatcaatatcagatctggccttagaagcacagcaacagagttggaaggtaaaaggtgatagtatcatatctagcacatccttggcagtggatcaagaaaatttggaggattcacgaagagaagattttgttgagcaatttggttcttatatccagagtgctgctgatggcactcatgtttactatgctgatgctgcagcaggtgttacaataaatcatgaccaagaaatgctccctgctattattcgaaaccagttggattcaaatgactatattttggacacatccaaagtttccattgatggcacggccttatcacagcatcaatatggtacgcataggtgcagcctttttaatgacaagtcagggacatctaataagagtatgcaaaatatctcagatattaatcctgcgagtatatgtggcaacaactatctgaatcctgtagatcctgctctgtgtgcattgcctggtattggtttgcatctgaataccgttgccttgaatttatcagacatgccactcacaattaatcatccactgttatctgaacaaactagtccagcaacagtaattcctggcagtgagaccgttctttatggcagtgaggtgttcactcatgttgacaattactcttctcagaaaaccatgcctaatgctgacaagtctggccaacaaattcacaagaagaaaaggcgcaaattacaaaaagatgatggtgaatcttgcagacattgtaactgtagaaggtcaaaatgcttaaaactttattgtccatgtttcgctgcaaaagtctattgttcaagcttgtgctcatgtcaaggctgttccaataatcatgcacatgaggaactagtttcttgtactcgcaagcggactgaatctcataatcctctagcatttgctccaacagtcactcatacatatgggactgttttagaatttggggatgattctaacaaaactcctgcttctgctcgacataaaagaggatgcaattgcaggaagtcttcttgtcttaaaaaatactgcgagtgctttcagagtggtgtagggtgctgcataagttgccgatgcatgagttgtaagaactcttttggaaaaagagagggtgtgctgttgttaactactgaaaaactggagaaagggggcaaagcaaaaggcactcatggggaggaagacaaacttgcgtttggcaaacaccatgtggttagccaatctggtgatattccagcgtatgagaatccactcgtgacacctctgcttgagacttacagatctcccttcctgcttccatctacatgctccaaactgccaccgccaactgctgggtgctcttatggactgcacaaccctcggcctcccatgaaatcggatgttttgttctcacctctcgaagatgttttgcacaaccctgctgagatggttctcgggaatggtttttcagatacccaggaagtgggttcatcttgcaccaccagcgtcaaggttgtttcaccgaacaagaagagggttgcctccctgcagattggtacggcattgtccccaatcggcagcagcagcagaaaactggttttgaagtccttcccttccctaactggtgatgctgatagtgagccccactaaacagagttcatcagcatatgacaactgagtcgacagctgatcccttctggtacccctggaccctggttttgacaaagagttgaaagaacttgtttcagcacctctaccatttagaaatatagttgcgctatcttgacaggccgataacaattctgctaaatgtgtttgacctgtcgccgcctaaggcacatggtttcagaaacatgcttgaatcacattccacatggtttcagaaactgcactcaagacgaggacattattaattctaggggtaaatacaaggatcaagataaacaaagataaggacaactacatctccataatcacgtagaggagggttctcaatgtgttcattggtagctttgatcttctcttcgttcatcattgatgggaaattatatggacgtgaaacccaccgcttgaagcactcgagtggtcgtctttctctgcactagccattgaaaagtaagtaccttgcatccaacttttcaagaccatccatgctctacaaaaaggcacctctcatggtcctaaataggtcgatgacatcaacttatcagtaatttaataacatatatcaagaaaaaactaaataaaataagtaatttaataacatatataaacaaaaactaaataaaataattacttacattaaaacgacgacatatgtagaaccaacaagcgcctatgtctggatgccttgattgagactgaaaggaatgatgacacctaagaagggggctaatttaggtgacctaatttcttctctaaactaatgcctctatttttctcctagtcaaaacctatacaataaacaaactatcttatgtgtaactatgattttgactaagtgttgttatctctactgcagagagttatagaacgtaggttccaatcctattcattagcctataactaagctaggatggtaaagcatacaattaaggtaacataatataatcgtggaagcttaagtgtgatagagataaaaacttacgttgacgtgcatgtatttttactaaggcattgataagcatggaaactcctccctaatgctcgttggagccccatgtaaggaaaacccatgcaagagccaagctcctggccaagtaactctgtgtatagtcctagtctttctccacgcacaagttgtgctttgtttgtgacctctcttgaataccctcgtcgtctccaccattaaattttggtctaaacgacacgagcctcatcccctcacgtacatagtggtgtccataccacaaacttagttagtgtgatctgataagacttatagtccctctcggtacaaccaatataatagtgcgtgcaagcgccaagggataagatgtgtgtttagcctcatttctaattgttaggcctaaacctagagcaagcgctaatcatagtagtctaactaagctaaacactttacaaagcacctacactaatctctaagtgattccttaagcacctgagtgtctacatctattttgtttgagtctcaactcaatgtcta

SEQ ID NO: 216026 - DNA, 1259 bp, Zea Mays
atgcacaagtggtggcgcagccccgggcccgccctgctcgccgccgcactggcgatcgtggtggccgcgctgcggccggcgacggagcacgcggccgccaaggggcgaccgccgctgcggttcgggccaggaggagcgttcaaggtggccctgttcgcggacctgcattacggcgaggacgcgtggacggactgggggcccgcgcaggacgccgcgtccgaccgcgtcatggccgccgtcctcgacgccgagaacccagacttggtggtgtacctcggcgacctggtgacggccaacaacctcccggtcccgaacgcgagcctgtactgggaccgcgccgtctccgccgcccgaggccggggcgtgccgtgggcgacggtgttcggcaaccacgacgacatggccttcgagtggccgcccgagtggttctcccccgacggcgtcccgccgctgcgctggccgccgggtccaggatcagggtgcggcttccgtgggactccccggacggacctcatggcggcggagaccggcgcgaaccggctgctgtcctactcgtccagcgggcccagggagctgtggcccggcgtctccaactacgtcctgcaggtgctctcgcggggacggcgggcccgcggcgacggtcacgaccacgacccggctctgctcatgtacttcctcgactcgggcggcgggtcgtacaccgaggtggtgtccagcgcgcaggtcaggtggttccacacccagtctcagttcctgaatccagatggaaggatccccgagctcatcttctggcacataccgagcacggcgtacgccaaggtagctccgaaggccaagtctgagataaggaagccctgcgtcggctccatcaacgaggaggaagtggcgccgcaggcacagcgacgttacactaacctcctgaatccatctgcctgcttgattctcttgtacaatgtacagtatagaggatatttctttatatatataaacaacgtatataaatataacaacaccaaaaataagagcaccggaggacatagtatatggcccccggtagtttcttaaagggctagtttgaaagccacgaaatcgaagaaaatttggagcggctaaaattctctctttattcaaaattaaaattaaataaagaaagaattttagccccttcaattctctatggattttagactctcaaactagacctaaaatatttacttgtttttgtagaaattttggctcgtcttcacaatgctatttcg

SEQ ID NO: 216027 - DNA, 447 bp, Zea Mays
gtacgatggagataaaccgggcgatactggaagagaacgaggcgtccgatgacgacggcgccggtgaggaagacgacgacattaacgaagcggatgaggacgcagaggaagagctgccgccggtaccggtggaggagaaggaacccgccaccgttgtcggtccacgcaccaggaacaggccgagaagacgagtgtaattagacgctctcttctccgtgttcatgctcagagacacagagagagagtttaattatagcgtgtatggtttgaggaatgagttctcgctttttttttgtttagtttgtggaatataataagttcatctatcactattttattttttataatctaataattagtaataatactagggatgagtcaatttcaataagggggtgtttgttagagggattaaagattagtctctagtttttagtctcatttagt

SEQ ID NO: 216028 - DNA, 3432 bp, Zea Mays
ccttggagcaccagttacccaccctaccttcaaaaacaatcgcctgaacctgaacaaacgatctcacgaggtgcagagcaatttctcgcctttctgtctcgacatttcttgcaacctcgctcgcgtccccgtgtctatcagcccctctctcccaaccccgggtctgtagtgttctcataggaggaaagcgagagaagcaagcaagcgagaagctggagcagcgaacaccaagaattcggtgccgaagcggaggcgaaggggaggaggacgaagggaagggcagtgaccgaagagcgagcgcgccacgtttgatctgggtatattatgagtgttccaagactaatgcatcatctttgatggtgtaccaaaaaaatggttgttaacatcaaggcctcaacgagctagcctgagacaagaacactggaaccatggtttcaaaatcatattcaaatctgctagacatgaccccaggagatgggtttgactttcgacgaccttttaagtctcttcctcgtgttgtaacttctcctagcattatatctgaccatgattgggattccataagtgatggtgattcagttggttcagcattttctatcgagaggaaaataattgtcgccaacttccttccgctgaattgtacaagagatgaaaccggggaactgtccttctcattggatcatgattcactactcatgcaacttaaagatgggttttcaaatgagactgatgctgtgtatgtaggcagtttgaaggttcatgtagatcccagggagcaggaccaagttgcacagaagcttctcagagaatatcgatgcatacctacttttctcccatctgatctgcagcagcagttctatcatggcttctgtaaacaacagttatggccactttttcattatatgcttccaatttgccttgacaagggtgagttgtttgatcgcaccctgtttcaagcctatgtccgagccaacaaactttttgcagataaagttatggaagcaatcaatacagatgatgattatgtttgggttcatgattatcatctcatgctgctccctacattcttgaggaagaggttacaccgaataaagattggtttcttccttcacagcccttttccctcttcagaaatatacaggactctgcctgtaagggatgaaatcctgaagtcactgcttaatgctgatctgattggtttccaaacatttgactatgcccgccacttcctatcttgctgtagcagattgctaggcctgcattatgagtcaaaacgtggttacattggaatagagtattttggccgaacagtgagtttgaagatcctttctgtgggtgtccatgttggtcggcttgaatctgtcttaaagttgcctgctacagttagtaaggttgaagaaattgaacaaaggtataagggcaagatactcatgttaggtgtagatgacatggacatcttcaaaggaataagtctgaaattgcttgcactggagcttcttctggacagaaacccaaagcttagagagaaggttgtccttgtacagatcatcaatcccgcaagaagcacggggaaggatgtgcaggaagctatcacagaagctgtctctgtggctgaaagggttaacacaaagtatggttcttcaagttacaagcctgtcgtcctaattgataatcgcataccgttttatgaaaaggttgcattctatgccgcgtctgactgttgtattgtaaacgctgtgagggatggcatgaacttagtaccatatgagtatactgtttgccgacagggaaacgaggagatcgacagagtcagaggccttgacaaagacacccatcacacaagcacacttattgtttcggagtttgtgggttgctccccatctctgagtggtgctttcagggtaaatccttggagcgtcgatgatgtggcggatgccttgtgccgcgcaactgatctatctgaatctgagaaacggttgcggcacgaaaagcattatcgctatgtcagtactcatgatgttgcttactgggcgcacagctttgctcaagatctggaaagagcatgcagagaccattacagccgaaggtgttgggctattgggtttggcctgaatttcagagtcattgctctttctcctggcttcagaaagctttcttcggagcactttgtttcttcttataacagggcttctagaagggcaatatttctcgactacgacggcacacttgtgccccagtcgtcaatcaacaaggctccaagtgaagaagtcatctccattcttaacaccttgtgtaatgatccaaagaacgttgtgtttatcgtaagtggacgaggacgtgattccctcgacgagtggttttctccatgcgagaagctccgtctagccgcagaacatggctattttatcaggttgtgatgaactacgcatgcatgcgttttcaggtggagcaaggaagctgcatgggagtcgagctattcgagtccgcggcaagaatggaagcacatcgctgaacctgtcatgcaggtatacaccgagacaacagacggatcttcagtcgagtcgaaggagagcgctctagtgtggcactatttggatgcagaccatgatttcggttccttccaagcgaaggagctaaaggatcatcttgagagggtgctatcaaatgagcccgttgttgtgaagtgtggccattatatcgtagaagtaaagccgcagggagttagcaagggtcgtgctgtcgacaagctgattcaagcactggccaacaacaacgggaaggcacaggatttcctgatgtgcgtcggcaacgacagatctgacgaggacatgttcgaatgcatcaacggtatggcctccaacgatgtctcatcgaccacagtaccggaggtgtttgcctgttcggtcggccagaagcccagcaaagcaaaatactatgtggacgacaccagcgaagtgatcagattgctcagggatgcaacccgcttctcatcgtcgcagcggagggaggacgtcaacgccagccgcgggcgtgtgaccttcagagacgcactcgattacgtggactaggcaccagcagcaattcttagttactcgaaatgattagctgcggagcttgtaaattccgctgtcttctgtctgccaatggttttcgttctagagaattgtagtgtagccgacatcgacatggatcgtcgtcaccgatacacgaacagcggaaatatgagttgaagttcgccgtttcgaggctcagaattggtacatttatagaattgtagtgtaggcaattttttggtagggaatagtaattggtacatttatagaattgtcaattgtttttcttctaccgctgataatactatagcttcgctaaattaatattattgtttcacttagcgatgaaatatatttagcaccactgatattgatcaac

SEQ ID NO: 216029 - DNA, 2249 bp, Zea Mays
ggtcaacggtcaccagcactgcctgtgcctataaagatggactcagatcagacctcaccacatgtgcgccccaccgcgccttcttatacgcaacgcacctggaactcccctccgtccacaccccgtctcgcctatcgtcgttccgtcatggagtcctcctgcctgggaaagcgcaggctgaacggcgccgagagggcgccgcccgcgttcctcccgctggggtacgagtacggcgacgcggacgcggtggaccacatgccccatcgcttggagacgggcgagatggacttcttcaagagagagaagagggagaggaaagctgacgccgccgccccggacgacctcggcatcaaggaagaagacatcaccatcaacatgggtctgcaccacgtcggcagatggaagaacaggagcgaagagtccgtcgacgagggcgtctcctccaacgacggggatacgagggagatgaaaactgagctggcactgacaaaatccgagcttggacgcctgaacgaagagaacaagcagctcaagaacattctcaccaggctgaccagcagcaactccaaccccctccagatgcagatgcaggccctcacaacgatgcaacagctaaggaacaatatcatccatcgaggtcttcgcggagctccaagccatgagctgaacgtcgatccggagaagaagaaggaccaggaggggagccgcggcggcggccacctgctcccgcagcagttcatcgggctcagcacccccgcgttgtcgttcgacgacccgctgcgcttcgtggcctcagacgtgcaaggcggcgagagctcagcgtccaccagcaacgtggagccgccgccgacgacgacgaccatggaaatgatgccgctgcccgcgttcgagcacggccaccaccagcacctcgcccatgagaggggtagcagtagcagcccggacgagccaccgtcacaccacctggcggtgaatcagggttggctctcgaacaaggtggccaagttccttcccgtcaagggccccgagcccgccaccatgcggaaggcccgcgtctccgtccgagcccgctccgaggtactcatgatcagtgatgggtgtcaatggaggaaatacgggcagaagatggccaagggcaatccgtgcccccgctcgtactaccgctgcaccatggccgccggctgcccggtccgcaagcaggtccagagatgcgcggaggacacgacggtggtggtcacgacgtacgaggggaaccacaaccacccgctgccgccggcggcgatgccgatggcttcgacgacgacgacggcgtcgtccatgctgctgtccgggtcgatgccgagcgcggagggcagcagcctgatggcggggtccaacttcctggcgcgcgccgtgctgccgtgctcctccagcgtcgccaccatctcggcgtcggcgccgttccccaccgtggcgctggacctcacgcagccgctgccgccgcaggcgcaggcgcggagcacgacggagccttcccagctccaggccgcgctcgccgacgccgcgggccgaccgacgccgcagctgttcgggcagaagctgtacgacccttcctcctccaaggcccccgccgcctcgcagggagcggacgcggcgggcgacaccgtcagcgcggcggccgtgatcgcgtccgaccccaacttccctgcagtgctcgcggcggcgatcaagtcgtacataagcgggaacggcagcggcggtgggaacagtggcacgaccgtgctgccgccgccgccggcggcgagcagcgccgacgatagcagcagagatgacaaggccggggagcaggggggctgaggtgatcgtccgtttgcttgattgctcggtttcaatttccttccgtctgcgtagttgagttcccacaagactccagtctcctcagtttcgaagtaggagacggaaattttgctcttttcattattttactctaacgattttgttttggctagaatttgtagttacagaatcacgcagttccggtcggtgtgcaaccagttttattgaattcttggtagttgtcgagaaaactgaaattgctggatccaactcttcaccatgctggtccgacttgtacctttcttggttcatgaacgtatgtttgtcattggatattcaaatgtagacataatttaatctagaaaataacaaatgatttgtaacatggtagtgtggttgtatgacctactcgcatctaatagttaaaacacaag

SEQ ID NO: 216030 - DNA, 1663 bp, Zea Mays
acggggacaggggctacgaaaaacgaacagcggcagcacggagcagagacgacgagcccgagcccccggccctgccgctgcccatctataaatatcgcgcacccacacctcgctcctgtcacacaagaacacacgcgagctccagatcgcacttgccagccttgagccactaatcacctggcagcactctacacggcgagagggaatcgaggagagcttacgaggtagttagtagctacaagacacagcaccataggcatgccggaggcgccggtcgtcacaatgcgagacacggcggcggcggcgccgcccgcgactcaccgcgacctgctcgagtacatcgagcgcgtgacggcgggggcggcccaggtgcagcgccgcgtcctgtcggagatcctggcgcagaacgcgccggcggagtacctgcggcggctgggcgtctcgggcgccgcgccgggcgccgtggaggcgttccgccgcgccgcgccgctcgtcacctacgaggacatcctgcccgacgtgctgcgcatcgccaacggggacacgtcgcccatcctctccggcaagcccatccgcgagttcctcaccaggtctgtaccgctaccgcgtgggcgacgtgctgcgcgtggccgggttcaagaaccaggcgcccatgttcaagttcctgcggcggaagaacgtggtgctgagcatcgactccgacaagaccgacgaggcggagcttcacgcggcggtgagcggcgcggtgcagcacctggcgccgttcggcgcgtcgctggtggagtacacgagctacgcggacgcggggaccatcccgggccactacgtgctgttctgggagctgcggctccgcgcgggggacgtgccggtgccggtgccggcgtcggtgttcgaggactgctgcctggccgtggaggaggccctgaacagcgtgtaccggcagggccgcgccgccgaccgctccatcgggccgctggagatccgggtggtgtcggacggcacgttcgacaggctcatggactacgcgctcgcccgcggcgcctccatcaaccagtacaaggtgccgcggtgcgtgcacccgggccccgtggtggagctgctggacgggcgggtgcaggccagctacgtgagccccaagtgccccaagtggagccccggcggcggtaagcagtggagcagcgacgccgccgccaagaagcccgccgccgccgccggcagcaataatggaggaggggcggtcgtcgcctgatcgtcgtccgtcgagatatactagtgaactttaattaattagctggctaattccggaaccgtcgttgttgttcgtgggagagagagactcgatcttgtggtcgatcgattgtgatagctgatctatccgtgtgcatgtatgcatgcatggctacgatcgaatgattatctagctgggtaatcatcgggtgtgtggtagcttattaagtattgtacgcgtcgtgatatcatgtgagctagcttttgtttctttttattttcttttatgtggttttgtaataaagttggagtacgtagtagtgagtggcccttttgtttttttgacagattttggcatgttgtgtttagacgttgattgctgctctgagcttatctcctccagacatggctaagagaccgtacatggagtagtttg

SEQ ID NO: 216031 - DNA, 2232 bp, Zea Mays
gccctcgtccccaactgcgcgaactcccgcgacaaccgcgcatgtccccgtcagccccgacagcgcgtgcggctcgcgctcccgcctcggcgtcacgcgacggcgggggggcgcgctgctctatacacgttccgccaccgccaggcgcggccgcggcaacttggctatttagttcgagaattctccaggggagatggagcacggagtccctgagatcgatcttgctctcagcgtcggagagttagctgcacaccccccgatccccggccacgctccgatcgtacgaggctagctgctccatcatcgccctcttctgggaccctgcccctgccgtgagtggatcaatccatggacgccgcgcaggtgcccgcggcagtggtggtcgacgtcggggcgctcaccggaccgatagggagcgaggcccccgctgcgccgaagttccgtggccagcattcagcaaaactgggacgtgcgctccgcatgtttgtggaaatgcctacggccattgcacatagtagcagaattccgattgcagggtacatgaacatgtatgatgctaagggcccagcatggaaaaggttcttgtaccacgttggaccagggtttatggtgtgtttggcctaccttgatcccggaaacttggggacagatttgcaagctggcgcagatcatagatatgagctcctctgggtgaccttgattggcctcatcttcgcgctaattattcagtcactatctgctaatcttggagtagtgacagggcggcatcttgccgagctatgcaagacggaatatccagcatgggtgagaatctgcctatggctgctagcagagttagctgtgattgctgcagatatcccagaagttatagggacagcttttgctttcaacatcttgttccacgtgcctttgtgggtgggggttcttatcactggctcaagcacacttcttctccttggactgcaaaaatatggggttaggaagctggaacttttggtcggcctattggtgttcgttatggcagcatgcttcttcatagagatgagcatagtgaagcctcctgcagaagaggtcatccacgggctattcatccccagtctgagtgggccgggcgccactggagacactatagcccttcttggggctcttgtgatgccgcacaatctattcttgcactctgccctggtactgtcaaggaacactccgtcatcagtaagaggaatcaatgatgcttgcaggttcttccttcttgaaagtggtgtagcgatgttcgtggcactaatcatcaacatatgcatcatctctgtctctggaactgtctgtaactccagcaacgtctcaccagatgactctgcaaaatgcagtgacatcaccttggactcctcgtccttcctcctgaggaatgtgctaggcaacagcagtgcggttgtgtatggtgtggctctcttggcttgtggaataagctcttccatcactggtacttacgctgggcaatacatcatgcagggtttcttggacatcaagatgagacagtggctgaggaacctgatgactcgcagcattgccattataccaagcttaatcgtcgccatcatcggcggatccagcggtgcgggccgcctcgtcatcattgcatcgatgatactgtcttttgagctgccatttgctctcatccctctcctcaagtttagcagtagtagcagcacgatgggccaacataaaaactctatatttattattgggttctcatggattctcggttttgttattattgggataaacatctacttcctcagctcaaaatttgttggctggatcctccacaattcactgcaaatctatgctaacattctcattggcattgtcgtgttccctcttatgctgatctacgtttgtgctgtgatctacctcacgttaaggaaggagaccatcaagttcgtggcttgcggtgagctgcagaccattgagaccgacaaatcaaagcttgccaatggcagcaacatggaggaaaagaaggatcagcttgtttagtcacatgacatgctttcaagaatgcttagggtgtagttggtttgatggcaagggtggatgatcataagtagatcttaggatatagatatctatgcaggctgtttggttcgatagatgaaataaacattttttctatttggttagatagattagcatatattttactacaaaagttcgacataagaccggatagagttttat

SEQ ID NO: 216032 - DNA, 2915 bp, Zea Mays
tgagcccaaatccccaaagccaagttgagcccagatggccctcacagaatcgcccgatcccagcccctccaccggcgacccattctgctcacttccatgcgggccccagcccgccacgaatccccgttcccagtcccgcctgctccgacctcgcctttctccatctagggtttctctctccatttccaccccatcggaccggagcttcgcatggagtcatcgcagtctcggaagcggacgcgccaagcgtatgactgcgccgccgcgctgccaccagagcgagaagtggtagcgaggggtggcgcgtcgcctccatggagggaggatgaccgcgacggacactacgtcttcgatctcggcgagaacttgacccgccgatataaaatcttgagcaaaatgggagaaggttcgggttttctgcaatctgtcgtctcctcttctggtgggtatcctcgttattattctaatgaagagggctacgagttgggttttcgtaggtacatttgggcgtgttttggaatgctgggaccgtgaaacacgtgaatatgttgccataaaagttgttcgcagtatccgcaagtaccgtgatgctgcaatgattgagatagatgtgctcaatcgccttgcagaaaatgagaaatacagatctctctgtgttcaaatacagagatggtttgactatcgtaatcatatatgcattgtaagtactagcttttggtcaattatactagtttctagaagtcagttaccaattctgagaatgcatttcatttttgtggatttgcggatgtgttgttgtttatattatttatcttactggccctcccaatacgccttgtatggaatgagagactcatctataaaaactatcacaactctcctgtagttagattggcttgacagtaaaatcattttgttcttcactcatgaaggttccctcatatggtcccaaatttaaaatatactttattcaatggatatcgatgattttgtcaggtttttgagaagcttgggccaagcttgtatgattttctaaagagaaatagataccgacctttccctgtggaacttgtgcgggagtttggacggcaactgttggaatctgtagcatatatgcatgacttgaggcttatccacactgatctgaagccagaaaacatactacttgtgtcttctgagtatataaaagttccaagtacaaaggtttaggctggagttttccatgtgatatttggagtgttggctgtattcttgttgaactatgctctggggaagcattgtttcagacacatgagaatctggaacacctagcaatgatggagagagttttgggacctctaccagagcatatgatacggaaatcaaggtgtgttatttgcaaccttaacttagtagatcattttatcttttgaacgaaatgtatttgtgttcaaatcagcttgtgataagcatatctttatttgcttgatgtttgttcttttttttggtggggctgggattttgggttttactatgcatttatttgttaaacatttttagaaaatgatgcattcgattctgcctgcagtagagtatcagagttacatttttgtaatcattttgagaaactgacattttctttatttattgaatgtttctaatctggtacaccttcattatatttcatgattagcagagtatcagtgtacttaactctcatatgttttattctattttgtttattgccacttgaattttcaaagctaatggctgcttttctactttgattttcaaggttaataaccgcctttttatggccactatcaatactagcttgctccccctttttttgtttcttgtaccttgattttgatagttttgcgtgtgtatctcttctatgtgtattgcctgcttgttatatttaaccagcgacattgaaatttcttgggaactcttgtaatatatttttgtttcttccatttattttctaatattcttttattgtgcttacatgtgtcacctggaatatgtagttcttctgctcagaaatatttcaggagggcaacacgtttaaattggcctgaaggtgctgtttcaagagaaagcatcagagctgtgaagaaactggatcgactaaaggacttggtatcgaggaacgctggccattcgaaggcagagctggcagacttgctatacagtatcctccggttcgagccatcagaacgtctgacagcgcaagaagctctggagcatccattcttcaggaacccgacatgacttgttggacaggcttgactcgtgtaactctctgcttcaagaaggtatcgaggaagcaggcagagccgtccattgcaaagctgatgggtatcttgctcctcttttaccagagagtttgtgtaagcctgtcagtaaggcttcttgcggtggtgataaagctgatggctttggtcacccaatgtaatgtacactagcattttttttttacctagggagtttagtgcctgtatgttgttaaccgggacgcgctatgagctgcgtcccaatgccctggttccataatccaattgcagatgttgaaaatcaagcatgaagggatccctgcgcagctgtgctcccgtagctgcaatagtctgttggatgcaagtatcgtgatgtcacgagtttgggatttgttgcattccgactgcatgggtggtgtgaagaatgggcatgaaatgccgtgtcctgttgttgagacttgtgtgtagctggtgaagtgttgttgttgatggagtacaacttgtggaaagagagtgcgcataggctagaaagtacagtatcttcatactaggtaagggatgtttctgaagctcatgtgcaccgcgattgcatgttggcaccgaatcttatcgtacctcatggatccctcactcgtgctgtttcgtcctgacatggac

SEQ ID NO: 216033 - DNA, 2074 bp, Zea Mays
atggccctcacagaatcgcccgatcccagcccctccaccggcgacccattctgctcacttccatgcgggccccagcccgccacgaatccccgttcccagtcccgcctgctccgacctcgcctttctccatctagggtttctctctccatttccaccccatcggaccggagcttcgcatggagtcatcgcagtctcggaagcggacgcgccaagcgtatgactgcgccgccgcgctgccaccagagcgagaagtggtagcgaggggtggcgcgtcgcctccatggagggaggatgaccgcgacggacactacgtcttcgatctcggcgagaacttgacccgccgatataaaatcttgagcaaaatgggagaaggttcgggttttctgcaatctgtcgtctcctcttctggtgggtatcctcgttattattctaatgaagagggctacgagttgggttttcgtaggtacatttgggcgtgttttggaatgctgggaccgtgaaacacgtgaatatgttgccataaaagttgttcgcagtatccgcaagtaccgtgatgctgcaatgattgagatagatgtgctcaatcgccttgcagaaaatgagaaatacagatctctctgtgttcaaatacagagatggtttgactatcgtaatcatatatgcattgtttttgagaagcttgggccaagcttgtatgattttctaaagagaaatagataccgacctttccctgtggaacttgtgcgggagtttggacggcaactgttggaatctgtagcatatatgcatgacttgaggcttatccacactgatctgaagccagaaaacatactacttgtgtcttctgagtatataaaagttccaagtacaaagaagaattcacaagatgagatgcatttcaagtgcttgccacagtccagtgccataaagctgatagattttggtagtaccgcctttgataatcaggaccataactcgattgtttctacgaggcattacagggcacctgaaataatcttaggtttaggctggagttttccatgtgatatttggagtgttggctgtattcttgttgaactatgctctggggaagcattgtttcagacacatgagaatctggaacacctagcaatgatggagagagttttgggacctctaccagagcatatgatacggaaatcaagaaatatttcaggagggcaacacgtttaaattggcctgaaggtgctgtttcaagagaaagcatcagagctgtgaagaaactggatcgactaaaggacttggtatcgaggaacgctggccattcgaaggcagagctggcagacttgctatacagtatcctccggttcgagccatcagaacgtctgacagcgcaagaagctctggagcatccattcttcaggaacccgacatgacttgttggacaggcttgactcgtgtaactctctgcttcaagaaggtatcgaggaagcaggcagagccgtccattgcaaagctgatgggtatcttgctcctcttttaccagagagtttgtgtaagcctgtcagtaaggcttcttgcggtggtgataaagctgatggctttggtcacccaatgtaatgtacactagcattttttttttacctagggagtttagtgcctgtatgttgttaaccgggacgcgctatgagctgcgtcccaatgccctggttccataatccaattgcagatgttgaaaatcaagcatgaagggatccctgcgcagctgtgctcccgtagctgcaatagtctgttggatgcaagtatcgtgatgtcacgagtttgggatttgttgcattccgactgcatgggtggtgtgaagaatgggcatgaaatgccgtgtcctgttgttgagacttgtgtgtagctggtgaagtgttgttgttgatggagtacaacttgtggaaagagagtgcgcataggctagaaagtacagtatcttcatactaggtaagggatgtttctgaagctcatgtgcaccgcgattgcatgttggcaccgaatcttatcgtacctcatggatccctcactcgtgctgtttcgtcctgacatggac

SEQ ID NO: 216034 - DNA, 1796 bp, Zea Mays
atggccctcacagaatcgcccgatcccagcccctccaccggcgacccattctgctcacttccatgcgggccccagcccgccacgaatccccgttcccagtcccgcctgctccgacctcgcctttctccatctagggtttctctctccatttccaccccatcggaccggagcttcgcatggagtcatcgcagtctcggaagcggacgcgccaagcgtatgactgcgccgccgcgctgccaccagagcgagaagtggtagcgaggggtggcgcgtcgcctccatggagggaggatgaccgcgacggacactacgtcttcgatctcggcgagaacttgacccgccgatataaaatcttgagcaaaatgggagaaggttcgggttttctgcaatctgtcgtctcctcttctgatatgcatgacttgaggcttatccacactgatctgaagccagaaaacatactacttgtgtcttctgagtatataaaagttccaagtacaaagaagaattcacaagatgagatgcatttcaagtgcttgccacagtccagtgccataaagctgatagattttggtagtaccgcctttgataatcaggaccataactcgattgtttctacgaggcattacagggcacctgaaataatcttaggtttaggctggagttttccatgtgatatttggagtgttggctgtattcttgttgaactatgctctgttagatctctgctcagttttctcacttttttttcctagtaccagtctggtaattatttttctaacatcacactttttttagggggaagcattgtttcagacacatgagaatctggaacacctagcaatgatggagagagttttgggacctctaccagagcatatgatacggaaatcaagttcttctgctcagaaatatttcaggagggcaacacgtttaaattggcctgaaggtgctgtttcaagagaaagcatcagagctgtgaagaaactggatcgactaaaggacttggtatcgaggaacgctggccattcgaaggcagagctggcagacttgctatacagtatcctccggttcgagccatcagaacgtctgacagcgcaagaagctctggagcatccattcttcaggaacccgacatgacttgttggacaggcttgactcgtgtaactctctgcttcaagaaggtatcgaggaagcaggcagagccgtccattgcaaagctgatgggtatcttgctcctcttttaccagagagtttgtgtaagcctgtcagtaaggcttcttgcggtggtgataaagctgatggctttggtcacccaatgtaatgtacactagcattttttttttacctagggagtttagtgcctgtatgttgttaaccgggacgcgctatgagctgcgtcccaatgccctggttccataatccaattgcagatgttgaaaatcaagcatgaagggatccctgcgcagctgtgctcccgtagctgcaatagtctgttggatgcaagtatcgtgatgtcacgagtttgggatttgttgcattccgactgcatgggtggtgtgaagaatgggcatgaaatgccgtgtcctgttgttgagacttgtgtgtagctggtgaagtgttgttgttgatggagtacaacttgtggaaagagagtgcgcataggctagaaagtacagtatcttcatactaggtaagggatgtttctgaagctcatgtgcaccgcgattgcatgttggcaccgaatcttatcgtacctcatggatccctcactcgtgctgtttcgtcctgacatggac

SEQ ID NO: 216035 - DNA, 2642 bp, Zea Mays
atggccctcacagaatcgcccgatcccagcccctccaccggcgacccattctgctcacttccatgcgggccccagcccgccacgaatccccgttcccagtcccgcctgctccgacctcgcctttctccatctagggtttctctctccatttccaccccatcggaccggagcttcgcatggagtcatcgcagtctcggaagcggacgcgccaagcgtatgactgcgccgccgcgctgccaccagagcgagaagtggtagcgaggggtggcgcgtcgcctccatggagggaggatgaccgcgacggacactacgtcttcgatctcggcgagaacttgacccgccgatataaaatcttgagcaaaatgggagaaggtacatttgggcgtgttttggaatgctgggaccgtgaaacacgtgaatatgttgccataaaagttgttcgcagtatccgcaagtaccgtgatgctgcaatgattgagatagatgtgctcaatcgccttgcagaaaatgagaaatacagatctctctgtgttcaaatacagagatggtttgactatcgtaatcatatatgcattgtttttgagaagcttgggccaagcttgtatgattttctaaagagaaatagataccgacctttccctgtggaacttgtgcgggagtttggacggcaactgttggaatctgtagcatatatgcatgacttgaggcttatccacactgatctgaagccagaaaacatactacttgtgtcttctgagtatataaaagttccaagtacaaagaagaattcacaagatgagatgcatttcaagtgcttgccacagtccagtgccataaagctgatagattttggtagtaccgcctttgataatcaggaccataactcgattgtttctacgaggcattacagggcacctgaaataatcttaggtttaggctggagttttccatgtgatatttggagtgttggctgtattcttgttgaactatgctctggggaagcattgtttcagacacatgagaatctggaacacctagcaatgatggagagagttttgggacctctaccagagcatatgatacggaaatcaaggtgtgttatttgcaaccttaacttagtagatcattttatcttttgaacgaaatgtatttgtgttcaaatcagcttgtgataagcatatctttatttgcttgatgtttgttcttttttttggtggggctgggattttgggttttactatgcatttatttgttaaacatttttagaaaatgatgcattcgattctgcctgcagtagagtatcagagttacatttttgtaatcattttgagaaactgacattttctttatttattgaatgtttctaatctggtacaccttcattatatttcatgattagcagagtatcagtgtacttaactctcatatgttttattctattttgtttattgccacttgaattttcaaagctaatggctgcttttctactttgattttcaaggttaataaccgcctttttatggccactatcaatactagcttgctccccctttttttgtttcttgtaccttgattttgatagttttgcgtgtgtatctcttctatgtgtattgcctgcttgttatatttaaccagcgacattgaaatttcttgggaactcttgtaatatatttttgtttcttccatttattttctaatattcttttattgtgcttacatgtgtcacctggaatatgtagttcttctgctcagaaatatttcaggagggcaacacgtttaaattggcctgaaggtgctgtttcaagagaaagcatcagagctgtgaagaaactggatcgactaaaggacttggtatcgaggaacgctggccattcgaaggcagagctggcagacttgctatacagtatcctccggttcgagccatcagaacgtctgacagcgcaagaagctctggagcatccattcttcaggaacccgacatgacttgttggacaggcttgactcgtgtaactctctgcttcaagaaggtatcgaggaagcaggcagagccgtccattgcaaagctgatgggtatcttgctcctcttttaccagagagtttgtgtaagcctgtcagtaaggcttcttgcggtggtgataaagctgatggctttggtcacccaatgtaatgtacactagcattttttttttacctagggagtttagtgcctgtatgttgttaaccgggacgcgctatgagctgcgtcccaatgccctggttccataatccaattgcagatgttgaaaatcaagcatgaagggatccctgcgcagctgtgctcccgtagctgcaatagtctgttggatgcaagtatcgtgatgtcacgagtttgggatttgttgcattccgactgcatgggtggtgtgaagaatgggcatgaaatgccgtgtcctgttgttgagacttgtgtgtagctggtgaagtgttgttgttgatggagtacaacttgtggaaagagagtgcgcataggctagaaagtacagtatcttcatactaggtaagggatgtttctgaagctcatgtgcaccgcgattgcatgttggcaccgaatcttatcgtacctcatggatccctcactcgtgctgtttcgtcctgacatggac

SEQ ID NO: 216036 - DNA, 2549 bp, Zea Mays
atggccctcacagaatcgcccgatcccagcccctccaccggcgacccattctgctcacttccatgcgggccccagcccgccacgaatccccgttcccagtcccgcctgctccgacctcgcctttctccatctagggtttctctctccatttccaccccatcggaccggagcttcgcatggagtcatcgcagtctcggaagcggacgcgccaagcgtatgactgcgccgccgcgctgccaccagagcgagaagtggtagcgaggggtggcgcgtcgcctccatggagggaggatgaccgcgacggacactacgtcttcgatctcggcgagaacttgacccgccgatataaaatcttgagcaaaatgggagaaggttcgggttttctgcaatctgtcgtctcctcttctggtgggtatcctcgttattattctaatgaagagggctacgagttgggttttcgtaggtacatttgggcgtgttttggaatgctgggaccgtgaaacacgtgaatatgttgccataaaagttgttcgcagtatccgcaagtaccgtgatgctgcaatgattgagatagatgtgctcaatcgccttgcagaaaatgagaaatacagatctctctgtgttcaaatacagagatggtttgactatcgtaatcatatatgcattgtaagtactagcttttggtcaattatactagtttctagaagtcagttaccaattctgagaatgcatttcatttttgtggatttgcggatgtgttgttgtttatattatttatcttactggccctcccaatacgccttgtatggaatgagagactcatctataaaaactatcacaactctcctgtagttagattggcttgacagtaaaatcattttgttcttcactcatgaaggttccctcatatggtcccaaatttaaaatatactttattcaatggatatcgatgattttgtcaggtttttgagaagcttgggccaagcttgtatgattttctaaagagaaatagataccgacctttccctgtggaacttgtgcgggagtttggacggcaactgttggaatctgtagcatatatgcatgacttgaggcttatccacactgatctgaagccagaaaacatactacttgtgtcttctgagtatataaaagttccaagtacaaaggtacctattcttacccatttttagtgattatctgctaaatctttactaggcatagagtatttgcagttttcttgaatgattgcttggggttgtacagaagaattcacaagatgagatgcatttcaagtgcttgccacagtccagtgccataaagctgatagattttggtagtaccgcctttgataatcaggaccataactcgattgtttctacgaggcattacagggcacctgaaataatcttaggtttaggctggagttttccatgtgatatttggagtgttggctgtattcttgttgaactatgctctgttagatctctgctcagttttctcacttttttttcctagtaccagtctggtaattatttttctaacatcacactttttttagggggaagcattgtttcagacacatgagaatctggaacacctagcaatgatggagagagttttgggacctctaccagagcatatgatacggaaatcaagaaatatttcaggagggcaacacgtttaaattggcctgaaggtgctgtttcaagagaaagcatcagagctgtgaagaaactggatcgactaaaggacttggtatcgaggaacgctggccattcgaaggcagagctggcagacttgctatacagtatcctccggttcgagccatcagaacgtctgacagcgcaagaagctctggagcatccattcttcaggaacccgacatgacttgttggacaggcttgactcgtgtaactctctgcttcaagaaggtatcgaggaagcaggcagagccgtccattgcaaagctgatgggtatcttgctcctcttttaccagagagtttgtgtaagcctgtcagtaaggcttcttgcggtggtgataaagctgatggctttggtcacccaatgtaatgtacactagcattttttttttacctagggagtttagtgcctgtatgttgttaaccgggacgcgctatgagctgcgtcccaatgccctggttccataatccaattgcagatgttgaaaatcaagcatgaagggatccctgcgcagctgtgctcccgtagctgcaatagtctgttggatgcaagtatcgtgatgtcacgagtttgggatttgttgcattccgactgcatgggtggtgtgaagaatgggcatgaaatgccgtgtcctgttgttgagacttgtgtgtagctggtgaagtgttgttgttgatggagtacaacttgtggaaagagagtgcgcataggctagaaagtacagtatcttcatactaggtaagggatgtttctgaagctcatgtgcaccgcgattgcatgttggcaccgaatcttatcgtacctcatggatccctcactcgtgctgtttcgtcctgacatggac

SEQ ID NO: 216037 - DNA, 380 bp, Zea Mays
gtttgggcagactggaaccggaaaggcaaataccatagagggagagatgagatagaaggttagtgaactactacaggatactgtcggtgtcatccctagagcagtgcaccatatctttgaaatacttgcagcacggaaggctgattatagcattgaaggtcaccttcttagagctatataatgataatgaatatatagcggtacctaagtctttagaggaccaaagaagattccgtgaaggtagacaaaagaggcctattactcttgtggtagatggcaaaggtggtgcaatcataagagtacttcaagagttgttgtctatagtcctaatgacatatacaaccttttggaacatgggtcagctaggagacgcactgttg

SEQ ID NO: 216038 - DNA, 1546 bp, Zea Mays
gaaaaggagccaaccaaaccgatcggtcgaccgatcaatctcaatcgaagcaccaggaaaactcgcgcaacacaaatctcaacaattatccggctggtgcgccggcgagcaccgtcctccggcgaccggctgggcagcagcagcaaagggggatcttgtcacgcttcgagatcggtcgccgcgctgggggcgactcactcgcgccactcttccccttccctgcgctggtggcggaaccctaatgccggcccgagtctagccgccatggactttgccagccgccacgccgcagcggaggcggccacatcggcatccgccgctgcccccgcgggcgtcgccgaggagcccgagtacctcgcccggtacctcgtcgtcaagcactcttggaggggaaggtaccgccgggtcctttgcatcgcctcttccggcgtcgtcacgctcgaccccaccacgctcaacctcaccaactcctacgatgcccgctccgagttcgaccacgctgaggctctcaccgccaccgacgagttcacgctcgcagtccgcaccgatgcccgcagcaagttcaagcccatgcgcttctcgtcgccgctccgcccggggatcctcaccgaactccaccgcctccgcccggtccaggcctccttcgacttccccgttctccacctccgccgacgcacccacgaatggtcctccttcaaatttaaggtcactcctgtgggtgttgagctccttgaggcttctggtgatatacgctggtgcttggacttcagagatatgaattctccggcaattgtactcttgggggatagctatgggaggaagacttctgaaggtggagggtttgtgctatgccctctttatggtaggaagtcaaaagcttttatggctgcttcaggaactacaaacactgcaattatatcgcatatgacgaaaactgccaaattaaagattggattatcactatctgtggataactcacaatcaatgaaagcggatgacttcatagcaaaaagagctatggaggcagttggagctgctgaaacacggcatggagagtggtcggtaacaagattacgttctgctgcgcgtggcactgctaatattgagagcttaagtttgggtgttggaccaaggggtgggcttggagaacagggtgattctgtctctcgtctgcttgttcttacaagtacttcacttgttgaaagacgtccagagaactatgaggctgccattgtacgaccactctcagcagtaagtgcttttgttcgatttgctgaagagccacagatgtttgcatttgaattcaatgatggctgcccaattcatgtatatgcaagcacttcccgtgataatctacttgcaacagttcttgacattttacaaacccagagacagtgtgcaattccagtgctaccaaggttaacaatgcctggtcatcggatagatccgccttgcggggtatcacatcttcagatgccccatcatagttctgttgatatggagtctgctaccatgcacattaaaacatctggctgcagctgcttaa

SEQ ID NO: 216039 - DNA, 1276 bp, Zea Mays
atggactttgccagccgccacgccgcagcggaggcggccacatcggcatccgccgctgcccccgcgggcgtcgccgaggagcccgagtacctcgcccggtacctcgtcgtcaagcactcttggaggggaaggtaccgccgggtcctttgcatcgcctcttccggcgtcgtcacgctcgaccccaccacgctcaacctcaccaactcctacgatgcccgctccgagttcgaccacgctgaggctctcaccgccaccgacgagttcacgctcgcagtccgcaccgatgcccgcagcaagttcaagcccatgcgcttctcgtcgccgctccgcccggggatcctcaccgaactccaccgcctccgcccggtccaggcctccttcgacttccccgttctccacctccgccgacgcacccacgaatggtcctccttcaaatttaaggtcactcctgtgggtgttgagctccttgaggcttctggtgatatacgctggtgcttggacttcagagatatgaattctccggcaattgtactcttgggggatagctatgggaggaagacttctgaaggtggagggtttgtgctatgccctctttatggtaggaagtcaaaagcttttatggctgcttcaggaactacaaacactgcaattatatcgcatatgacgaaaactgccaaattaaagattggattatcactatctgtggataactcacaatcaatgaaagcggatgacttcatagcaaaaagagctatggaggcagttggagctgctgaaacacggcatggagagtggtcggtaacaagattacgttctgctgcgcgtggcactgctaatattgagagcttaagtttgggtgttggaccaaggggtgggcttggagaacagggtgattctgtctctcgtctgcttgttcttacaagtacttcacttgttgaaagacgtccagagaactatgaggctgccattgtacgaccactctcagcagtaagtgcttttgttcgatttgctgaagagccacagatgtttgcatttgaattcaatgatggctgcccaattcatgtatatgcaagcacttcccgtgataatctacttgcaacagttcttgacattttacaaacccagtgtgcaattccagtgctaccaaggttaacaatgcctggtcatcggatagatccgccttgcggggtatcacatcttcagatgccccatcatagttctgttgatatggagtctgctaccatgcacattaaaacatctggctgcagctgcttaa

SEQ ID NO: 216040 - DNA, 2603 bp, Zea Mays
atgacttgggttgagataccgagagctgaaaagaaaccactgcccactgatgactgtatacagatcggctggttcccgaaggactgtatgcagatcggacagcggctggggtaccggcgtgcacgaaggactgtatgcagatcggacagcggctggggtaccggcgtgcagatcggctggttcaagaaggtgctcgagaaacagagtcgagaaagcagggctcccagctgccgcgccggaactgatggccgcccggggaggaagaagcgagggcgaagagcagggagaggagtggatgacggatgggtagactccgtgacgctatccaaacgattttgtaggctcggatacaggttcggatcactctggatccatgccgtgctgcaaaccaaacacgctattgctgagaagcacaactttttgatcttcgaagaccgcaagtttgctgacattgggaatacagtaaccatgcaatatgaaggtggaatattccgcatattggactgggctgatattgttaatgcgcatatagttcctggacctggaatcgtagatggcttgaagttgaagggttcgcctaaaggaagagggctacttctgctcgctgagatgagctctgccggcaatcttgctcatggagattacactgctgctgctgtaaagatcgctgagcaacattctgactttgtgatgggatttatatcagttaatcccgcatcttggtcagtaacaccatcaagcccggcgtttatccatgccacacctggagttcagatggccgctggaggagatgatcttgggcaacaatacaacaatcctgagtctgtgataaattacaggggcagtgacataatcatagttgggcgcgggattataaaggcgagcgatcctttgaagacggcatgtgagtaccggagaaaaatgtcgagtcaagaacttttctcccccgttcgcgcagcacagtcggccactacacacacgccgcccaccaacaccatggacgccgccgcgaaggaggcgctgatcctggacctgcacgcggtggaggccgtgaagctgggcaccttcgtgctcaagtccgggatcacctccccgatctacctggacctgcgcgtgctcgtctcccacccgcgcctgctcgcctccgtcgcgtccctcctcggcgcgctcccggccacgcgcccctacgaccttctctgcggcgtgccctacacagcgctgcccttcgcggccgcgctctccgtcgccgcctccgtgcccatgctgctcagccgctacgacaccaagcgcgtcgagggcgccttccgcgccgcccagaccgtgctcatcgtcgaggacctcgttaccagcggcgcctccgtgctcgagaccgtcgccccgctccgcgccgaggggctcgtggtcgccgacgccgtcgtcgtcatcgaccgcgagcaaggtgggcgcgagaacctcgccgctagcggggtcgcgctgcactcgctcatgaccctcacggagatgctcgccgtgctggcgaggcacgggaaggtcggcgaggagaagatcgcggaggtcaggcggttcctccaagccaacaggaaggtggcggtgcccggggtgcctgctgggccacccaagccgtcggctactgctcggaggaagtcgtttgcggagagggcggggttggccacgaaccccatggggaggaggttgttcgaggtgatggaggcgaagcagagcaacttgtgtgtcgcggctgatgttgggacagccaaggagctacttgagcttgctgacaaggttggtccagagatttgtatgctgaaaacacatgttgatatcttgtctgattttacaccagattttggggccaaccttcgcacaattgctgggaagcacaactttctgatctttgaagaccgcaagtttgctgacattgggaacacagtaactatgcaatctgaaggaggtatattccgcatcttagactgggcggatattattaatgcgcatatagttcctggacctgggattgtagatggcttgaagctcaagggtttgcctaaaggaaggggcctacttttgcttgctgaaatgagctcagctggcaaccttgcttatggagactacactgctgcggctgtaaagattgccgagcaacatcctgactttgtaataggatttatatcagtgaatcctgcatcttggtcaccagcaccgtcaagcccagcatttatccatgccactcctggggttcagatagctgctggaggagatgcccttgggcaacaatataacactcccttttctgtgagtgtgcttttgccatttgattctcgcgtgactgctcactgctgtggtgtttatttttaatccttcaaagttgctatgtatcttggaagttggtaggttaggttacttataccttatacactggtgccagttctcgaaaacttggtattagtttgatagcatgaaagtacatttagataattgttggctataagcattataatatcaagttttcaagactaagttgtgtttagtggttggttttgaagactaagttgtgtggtgtcgtttactgtgacatgatagatgttgttatgtcttttctttta

SEQ ID NO: 216041 - DNA, 2134 bp, Zea Mays
ctgaaaagaaaccactgcccactgatgacttgggttgagataccgagagctgaaaagaaaccactgcccactgatgactgtatacagatcggctggttcccgaaggactgtatgcagatcggacagcggctggggtaccggcgtgcacgaaggactgtatgcagatcggacagcggctggggtaccggcgtgcagatcggctggttcaagaaggtgctcgagaaacagagtcgagaaagcagggctcccagctgccgcgccggaactgatggccgcccggggaggaagaagcgagggcgaagagcagggagaggagtggatgacggatgggtagactccgtgacgctatccaaacgattttgtaggctcggatacaggttcggatcactctggatccatgccgtgctgcaaaccaaacacgctattgctgagaagcacaactttttgatcttcgaagaccgcaagtttgctgacattgggaatacagtaaccatgcaatatgaaggtggaatattccgcatattggactgggctgatattgttaatgcgcatatagttcctggacctggaatcgtagatggcttgaagttgaagctaatgaatcatggtactcacaccaactgtcgtgttctggccttgaagggttcgcctaaaggaagagggctacttctgctcgctgagatgagctctgccggcaatcttgctcatggagattacactgctgctgctgtaaagatcgctgagcaacattctgactttgtgatgggatttatatcagttaatcccgcatcttggtcagtaacaccatcaagcccggcgtttatccatgccacacctggagttcagatggccgctggaggagatgatcttgggcaacaatacaacaatcctgagtctgtgataaattacaggggcagtgacataatcatagttgggcgcgggattataaaggcgagcgatcctttgaagacggcatgtgagtaccggagaaaaatgtcgagtcaagaacttttctcccccgttcgcgcagcacagtcggccactacacacacgccgcccaccaacaccatggacgccgccgcgaaggaggcgctgatcctggacctgcacgcggtggaggccgtgaagctgggcaccttcgtgctcaagtccgggatcacctccccgatctacctggacctgcgcgtgctcgtctcccacccgcgcctgctcgcctccgtcgcgtccctcctcggcgcgctcccggccacgcgcccctacgaccttctctgcggcgtgccctacacagcgctgcccttcgcggccgcgctctccgtcgccgcctccgtgcccatgctgctcagccgctacgacaccaagcgcgtcgagggcgccttccgcgccgcccagaccgtgctcatcgtcgaggacctcgttaccagcggcgcctccgtgctcgagaccgtcgccccgctccgcgccgaggggctcgtggtcgccgacgccgtcgtcgtcatcgaccgcgagcaaggtgggcgcgagaacctcgccgctagcggggtcgcgctgcactcgctcatgaccctcacggagatgctcgccgtgctggcgaggcacgggaaggtcggcgaggagaagatcgcggaggtcaggcggttcctccaagccaacaggaaggtggcggtgcccggggtgcctgctgggccacccaagccgtcggctactgctcggaggaagtcgtttgcggagagggcggggttggccacgaaccccatggggaggaggttgttcgaggtgatggaggcgaagcagagcaacttgtgtgtcgcggctgatgttgggacagccaaggagctacttgagcttgctgacaaggttggtccagagatttgtatgctgaaaacacatgttgatatcttgtctgattttacaccagattttggggccaaccttcgcacaattgctgggaagcacaactttctgatctttgaagaccgcaagtttgctgacattgggaacacagtaactatgcaatctgaaggaggtatattccgcatcttagactgggcggatattattaatgcgcatatagttcctggacctgggattgtagatggcttgaagctcaagtcactgttgtcttctggcattgaag

SEQ ID NO: 216042 - DNA, 1985 bp, Zea Mays
gtcccaacagaacgacggtggaaccctggtctcctccctcttcacccgcacctgcactgcagcacacgcgccgccgaagcgctctgcccacctcgctcccctccagtggccgccggcgcggctcagcggtccatcctcctgacgccacctgcaacggcgccaggcggtgatccattccaactcgcgctccgtcctggtatccaaacatgtggtctttgggaaggtggtcagtggaatagctttgcttaaaaagcttgaagcagttggtagtgaaactggaaatccttcttatcaagtgaaaattgtagactgtggtgaagtttccaacacaaattctccggatctgctaaagggagagaaagatagtggctctgattcagaatcagattcatcaatggatactagctcatccagtgatcataggcgtaagagaagaaaaggatctaagaaggataagcgcaagcccacaaagagaaagggtaaacatacaaggagtaagagaaagagtagaggatccaaaaggcgatctagacggagccatgggagttcaagtgatgattcagtaagctcaaagacagataacagcagttctgacagtgaaaagggtggccatcataccaagcgttccttgccgaaagataaagagagtaccaaaatgacaatttcagaacaaggaagaacttttcaagaagcggacaaagacgaacaaacagttactaccatcaatcgatcacaatcacatgatggaagtaaaccctcaaacaaagatggcaacagggctgatgaaagatctggaaattacaattcagaagataggaatggtccaggtggaagctccaggaacaatcccattcaggttgatgtaaatttaacgaaaccagtaaatgtagatggcaacactggtggtgataatgcagaggctggcatgtctagaactggtgaaggaaggcaccttccaagcaatgattctgtgtccaccaatggtaaagatttaggtgtgggttctgcagacaatgggcaacctcaacgaatcaggaaaggacgtggttttactcagaagtatgggtatgcacgccgatacaggacgccatctcccgagcgtccccctgttcgaccccgctacgatggagggagagatgatagatggaacaatttcaataggtatgaaagaaatggtccttacagtagacgctcgccagtaaggagataccatggctcgccaagagccaatagcccatccaggtacccaagaagagaacgaatgaggagtaggtcacgcagcccagtgaggcgccatgaccgtggagggtatcaccgccccagcccaagacgtagccgcagccctgcagaaccgagacagaatgtgaatgataggcctcgatcaggtcatggcggaggcgatcctgaccacagccctcctgccaacaggtccagatcgaagagccgggaccccttgggacccagatctcctgatgctgccccagccaagagggagagctccagatacaaccgcaggcgcagcagcagctcaaggtccagcagccctgatggaaacaaaggcctggtttcgtactgagaagtaacggcacaacagtttgcaggctccatggaccatgtttcttgctagtttagcatcatgtactcttttgtaatggattctgaacttgaactgctttcgatgcaggtgtagatttatatgttctgttagatttgaatgtttcttatgccagatatttatagaactactgagtagagcaggggaaaggctcgagcctcgtgaactggcttgagcttgctaaggcttggagaggctcgcgagtttgtaagcctgaatcgagactacttttatgactcgctcaaacgccgagccctgagcgaacttgagtcgactcgggagtctgcctaataatattgtgctacgttgttatattattatgtttttaatttattttcttattttttatggattcaatgctaaatttagt

SEQ ID NO: 216043 - DNA, 2163 bp, Zea Mays
ctacggcccactgggcatgatcgtcccaacagaacgacggtggaaccctggtctcctccctcttcacccgcacctgcactgcagcacacgcgccgccgaagcgctctgcccacctcgctcccctccagtggccgccggcgcggctcagcggtccatcctcctgacgccacctgcaacggcgccaggcggtgatccattccaactcgcgctccgtcctggtatccaaacatgtggtctttgggaaggtggtcagtggaatagctttgcttaaaaagcttgaagcagttggtagtgaaactggaaatccttcttatcaagtgaaaattgtagactgtggtgaagtttccaacacaaattctccggatctgctaaagggagagaaagaaaaaaaactaagaacggcagatggtaactccactgctgaagggagagccaaattaaaaaaaacatccggtgatcataagcaaaggaagaagagaaaacactattcgtctgattcatatagctcagatacttcagactcattgtcctattcttcagatagtggctctgattcagaatcagattcatcaatggatactagctcatccagtgatcataggcgtaagagaagaaaaggatctaagaaggataagcgcaagcccacaaagagaaagggtaaacatacaaggagtaagagaaagagtagaggatccaaaaggcgatctagacggagccatgggagttcaagtgatgattcagtaagctcaaagacagataacagcagttctgacagtgaaaagggtggccatcataccaagcgttccttgccgaaagataaagagagtaccaaaatgacaatttcagaacaaggaagaacttttcaagaagcggacaaagacgaacaaacagttactaccatcaatcgatcacaatcacatgatggaagtaaaccctcaaacaaagatggcaacagggctgatgaaagatctggaaattacaattcagaagataggaatggtccaggtggaagctccaggaacaatcccattcaggttgatgtaaatttaacgaaaccagtaaatgtagatggcaacactggtggtgataatgcagaggctggcatgtctagaactggtgaaggaaggcaccttccaagcaatgattctgtgtccaccaatggtaaagatttaggtgtgggttctgcagacaatgggcaacctcaacgaatcaggaaaggacgtggttttactcagaagtatgggtatgcacgccgatacaggacgccatctcccgagcgtccccctgttcgaccccgctacgatggagggagagatgatagatggaacaatttcaataggtatgaaagaaatggtccttacagtagacgctcgccagtaaggagataccatggctcgccaagagccaatagcccatccaggtacccaagaagagaacgaatgaggagtaggtcacgcagcccagtgaggcgccatgaccgtggagggtatcaccgccccagcccaagacgtagccgcagccctgcagaaccgagacagaatgtgaatgataggcctcgatcaggtcatggcggaggcgatcctgaccacagccctcctgccaacaggtccagatcgaagagccgggaccccttgggacccagatctcctgatgctgccccagccaagagggagagctccagatacaaccgcaggcgcagcagcagctcaaggtccagcagccctgatggaaacaaaggcctggtttcgtactgagaagtaacggcacaacagtttgcaggctccatggaccatgtttcttgctagtttagcatcatgtactcttttgtaatggattctgaacttgaactgctttcgatgcaggtgtagatttatatgttctgttagatttgaatgtttcttatgccagatatttatagaactactgagtagagcaggggaaaggctcgagcctcgtgaactggcttgagcttgctaaggcttggagaggctcgcgagtttgtaagcctgaatcgagactacttttatgactcgctcaaacgccgagccctgagcgaacttgagtcgactcgggagtctgcctaataatattgtgctacgttgttatattattatgtttttaatttattttcttattttttatggattcaatgctaaatttagt

SEQ ID NO: 216044 - DNA, 3367 bp, Zea Mays
atggcgacgattcttggcgcagatggcgggcgagagagacagcagagaggagagcagggtcggacctttcctggatgtgttgattctccttccatgatggcgagcgagagatcagaggctgagataggacagcgggggcgagtctgttggcgagacagcgtgagagaggagagcgggcgacggcacaagccagaaccacagttcggaaaaccacccatgcttccttcccgccatctccgcgccgccgcgcggcagcgaagccacaggcggccgcccgcccctgccgacgcttgcattacgggcaagcctgatatggaggtcatccggcgcaacagagccatcacggcgcacatgcgtgcgggccgcgttccagacgccgagcgcctattcgccgcgatgccccgccgttccacctccacctacaacaccatgctcgccgggtacgccgccaacggacgcctcccgcaggcgctctccttcttccgttccattccgcgccccgattccttctcctacaacacgctcctgcatgcgctgggggtgtcgtcatcgctcgccgacgtgcgtgctctgttcgacgaaatgcccgtgaaggattccgtgtcctacaacgtcatgatctcatctcacgctaaccatggtctggtctcgctcgcacggcactactttgatctcgccccagagaaggatgctgtctcgtggaatggcatgcttgctgcctatgtccggaacggacggatccaagaggcaagggagctgttcgattcaaggacagagtgggatgcaatttcttggaatgctttgatggctgggtatgtgcagcgcagtcagatagaagaagcgcagaaaatgtttaataaaatgccacagagagatgttgtttcctggaatactatggtgtccggttatgcgaggagaggagatatggctgaggcaagaaggttgtttgatgtggccccaattagagatgtgttcacctggacagctattgtctctggatacgcacaaaatgggatgctcgaagaggccaagagggtgtttgatgccatgccagataagaatgctgtgtcgtggaatgcaatgatggcagcatatgtccagcggaggatgatggaggaggcaaaggagttgtttgatgctatgccctgtaggaatgtggcttcgtggaacacaatgttgacagggtatgctcaggctgggatgctggacgaggcgagagcaatttttggcatgatgccccagaaggatgcagtctcatgggctgcaatgctggctgcgtattcacaaattggtttcagtgaggaaacactgcagttgttcaaagagatgggacgttgtggtgagtgggtgaataggtcagcatttgcttgtgttttgagcacatgtgctgacattgctgcacttgagtgtggaatgcagctgcatagtaggttgattaaggctggttatggggtgggctgctttgttggaaatgcacttctagctatgtacttcaaatgcggaagcatggaggaagctcacagtgcatttgaagagatggaggagagggatgttgtttcgtggaatactatgattgcaggctatgcacgtcatggttttggcaaggaagcacttgaggtttttgataccatgaggaagacatctaccaagccagacgatattactttggttggagtacttgcagcatgtagtcattctggcttggttgagaaagggatttcatacttctattcaatgcaccgggattttggtgtggcaacaaaacctgaacactacacttgtatgatagatcttcttggccgtgctgggcgattggatgaagcagttaatcttatgaaggacatgccttttgagcctgactctaccatgtggggtgcattacttggtgccagtaggatccaccgcaactctgaacttggcaggaatgcagctgagaaaatatttgagttggaacctgaaaatgcaggcatgtatgtcttgctttcaaatatatatgcatcatctggcaaatggcgtgatgtggacaagatgagacatataatgcatgagcgtggtgtgaagaaggttccaggattcagttggattgaggtgcagaacaaagtccacactttctcagtgggtgattctgtgcatcctgaaagagaggacatatatgctttcctggaagatcttgacatcaggatgaaaaaggctggatatgtatcagctacagatatggttttgcatgatgttgaggaggaagagaaagagcacatgctaaagtatcatagcgagaagcttgctgttgcttatggtattctaaaaattcctcctgggaggcccatccgggtgataaagaacctgagagtatgcagagactgtcacactgctttcaagtgtatctctgcgattgagggaagactgatcatactgcgggattccaaccggtttcaccattttagagatggttcttgttcatgtggtgattactggtgattatgactagatatttcatgcaaagaaattctgaatgaactgcactggacttcgaaatcatgataatgcaatgcatactaaggaccaaaaaagtaggcattctgatgtatggatctagccctgttagccactacccactagaccacctactttgctactggttcaaaaagaaattagcctggtgatctgccacattaaatggctttcagttcattgcttatgtacaagttaacaaatttcaattaaaatgaccatgccaggtagagggcgcactccatttagagatatatccaacaacaggatcatcacaaattcaacaattttgcaagcatcaatcacgagacaaggaaaatgttgatagggctgacccggaccccacattatataggctacaggacgggccttagtagttcccttttggagtgtatactgtgtccagtgatgcagaatgtacaagatctgaaatctctccaagtgaaaggaactgcaaccccatagagcaatgaatgaactaatgagatagttaactcaatcactattaaagactaccctgataaacttctttgtgtcgatctgtttctgagcacacgtgtgactatctgacattcgtcaagctaatggacacaggcattcacaaagagtgcgtccactggtattgaagagaaggtgctgaagttggttgagatagactttccagaggatatgatgagcagtgccctgaagtgcgtgtctataatgtataaatttacaatgttgtgaaaattctgaatacagtgaagcagtcagaaacgttcagagttctgttttaacttttaagtgcagagctctgaatgttctgaaactccggatgttctgttttaacattcagagaattccaaacctttctagctta

SEQ ID NO: 216045 - DNA, 1641 bp, Zea Mays
atgggagacgtgttgatcccggagctccagcgtgggaacacttctgtgaccatatgcgctcgtgtttctcgtttatgggatttctatgatcctcaggatgaagcaaagttgctccattgtgatatggtgctgcttgacaaagaggtacaacatctgcacggttatctatttggtaaagggaagctggtactgggaaacgatgccattggaattgtcacttccatctcggctgtggcgccgcaccgatccagagggcaacatacaaccagctctaagaggactatttccctgtgcaatgtcagtgcgagaaaagcgcatagtcccattaagtggaacgaggttctatcttccaatcagcctatgcctcatgtttctgaggaacagaaaatcgcttatatcagagatctgcacccatttgagaataaggatagagaattcttggtgacagtcactgtaaaaaagattggagataggtggtggtacagtgcatgcaaaaaatgcacccgcgcagctgtggctcatggggattcctacaaatgcagcgatcaagtttgtgctaccattggcacgcccaaccaaagcggcattgtggttccatgtgctactcccgctataacaaaggaactgacaaccacgtctaggaagaggacaaggtcttcgcctgcaaagacagttacaaagaggttgttcaccgacgtagatggaggaaccactgcctccaaggatgccgcggatagcgctgctgcccctagattggcccagagcagacctaacaaggttcatggagcatggttaccaccttggttagtgacacactatgctcgttacatggaggttgtctcaggtcactggaattatcatggaaaacctgttgtgcagaatgttttgcataaggcatcagaaaaatcagcacatgcaaagaaatgggttgaaccacatattaagactgctaagatgaaatggattcctgttaaggagaaattggttgttctcaagaaaaatgcagaaccttatgtacaaaaggtatcgacaagatcagtgaagttttatgagtcatcaagggatgctgtgacacctcacgttgtcaaagttaaagagtttgctcatccctactaccaggaagccaagaagttttctaagccttacattgatcaaattgctgagatcactaagccacatgttgagaaagttagaactactctgaagccatacactaagagagcagttcatgcgtatgggtcatttattgcgtctgcaaccacataccatcgacaggctcaggcgaccatcatggactacctccatcagcatggggtacccaagtcatttgcaacaaaggagttagtttggttcctggcttctgccttgctagctctgcctgtcttcgtcatatgcaggcttgtagtaaagaccttctgaaggcctcgtggcggtaatggtaacggtaaccatggccagaagagacacaagcggcgatacgccgacaagtagaccaatctacccaacactttagggttcagcatgcggtgtttgcattgtcgagtgttggggcgaaggcgaagacgccacccttcgctcgaggccgtcgtcgtagtcgttggtccaacggagacaagacaacgggcagggacacccttcgcc

SEQ ID NO: 216046 - DNA, 1321 bp, Zea Mays
gcaacgtcagcataccatctatctgtcttctctcgctcatgtgcaccagacagaggcaacgaactgcctcacgaacgccacgccgccatttcccgcaagcaaagccatccaaaccgttcgctactgcctactactagtagctcgatcgtcgtcgtcatcttcgtcgtttcgctctcagttggcggttagctagcttgcatactagcatcaggtgccccttgccgagccgtacgtgtcgtcgtcgacgacgatggtggcggcgcccagcaagtgccggccgtcggcggcagcgctggtggtggcaccgccgggggcccctcggcgccagctgcggtgccggtgctgcgaggacacgctgggcgtcccgcgccgccggctgcagccgcagctgcacctgaagcagcaggcacctgcggcgacgaccgcccccgccgcggcgccgccgccgaggccccggcggatcgtgctggtgcggcacggcgagagcgagggcaacgtggacgaggctgcatacacgcgcgtcccggaccccaggatcgggctcaccgccaagggctggcgcgaggccgacgactgcggccgccgcctgcgcgacctcttctcctctggatcccgcgaccaggacgactggaaggtctacttctacgcgtcgccgtaccgccgcagcctggagaccctgcgcggcatcggccacgccttcgagccccaccgcatcgccggcgtccgcgaggagccccgcctccgcgagcaggacttcggcaacttccaggaccgggagcagatgcgggtggagaaggagatccggcaacgctacggccgcttcttctaccgcttccccaacggcgagtcggcggcggacgtgtacgaccgcatcaccggcttccgggagaccctgctctccgacatcgtcctcggccgcttccagcccccgggccaccgcagcaccagcggagacatgaacatcgtgctcgtctcccacggcctcaccctccgcgtcttcctcatgcgctggtacaagtggaccgtccgccagttcgagggcctcgagaacctcgccaacggcggcgagctcgtcatgcagactggagaaggcggcaggaccagatgtggcagaagacggccaggcccggcgagctcaaccaccgcttcatgacaaacggacagtccttctttgatccatttactgtaatctactagttcttgacgaccgaccacatgttatgtatgtgataagtgattaaatgtttttttttatggctgtacacattttttcccgtttccattcaaatgctgcagttaagaatatccgaaatgacatcag

SEQ ID NO: 216047 - DNA, 705 bp, Zea Mays
gtaccatctttcttgtcttgttttcttatccacatgatccccacccgtcagcgcatccgagaaatcctcatggcaacttccaggaccgggagcagatgcgggtggagaaggagatccggcaacgctacggccgcttcttctaccgcttccccaacggcgagtcggcggcggacgtgtacgaccgcatcaccggcttccgggagaccctgctctccgacatcgtcctcggccgcttccagcccccgggccaccgcagcaccagcggagacatgaacatcgtgctcgtctcccacggcctcaccctccgcgtcttcctcatgcgctggtacaagtggaccgtccgccagttcgagggcctcgagaacctcgccaacggcggcgagctcgtcatgcagactggagaaggcggcaggtacagcctcctagtgcaccacacgcccgacgagctcagggcgttcggcctcaccgacgagatgctgcaggaccagatgtggcagaagacggccaggcccggcgagctcaaccaccgcttcatgacaaacggacagtccttctttgatccatttactgtaatctactagttcttgacgaccgaccacatgttatgtatgtgataagtgattaaatgtttttttttatggctgtacacattttttcccgtttccattcaaatgctgcagttaagaatatccgaaatgacatcag

SEQ ID NO: 216048 - DNA, 2573 bp, Zea Mays
aaactgccttttcttccggcttccaacttccaagtggcgactgctgccgactgccgggtgcgagaagagggagagatcagagtatcagacaagctgttgtccgaatccactccggcgaggacgagtgctgaggtcgaaatggggagaggagcggatgaggtggtgaaggtcgtggattcggaggacggcgagggggaggaggaagaggcagaggccgcggcggcggaggggtcgagcaaggagacgccgatgctgccaaggatgccggtgcgcgtgctactcgccgagggcgacgactccacgcgccacgtcatctccgcgctgctacgcaagtgcggctaccgagcctctgatggtgtgaaggcgtgggacatattaaaggaaaaatctttcaacatagaccttgttttaactgaagttgaactgcctttgatgtctgggttcctcttgttatccacgatcatggagcatgatgcatccaagaacatccctgttataatgatgtcttcacacgactctgtaagcatggttttcaaatgcatgctaaagggtgcatcagatttccttgttaagccgctaagaaagaacgaattaaggaacttgtggcagcacgtttggagaaaacaactggcaaacggtgggcccgatgtgcagcacatacaagaagagaatcttgcagaaagaatggaacagaagactggcgtgacaaaagatgataatttgaacagcgatggtccctgtaaaaatagagaatgcagtgaacaagaaagtgatgctcaaagttcttgcacaaggtcagagttggaggctgaaagtaagcaaactaacaacattttggagtatatgcaatcaactgaaaggcatttgtctattcgtagccacaaggatttagagctaaatggagagaccaaaacacgaactaagggtaataacttgattccaacaagagaagacgatttattgccaaagaaaagaacatgtttgaatgacaataattctgagagaacttccagagatatggagctagtccacattatggacaatcagcagaagcatgacacacagagggatgtggatactatgagaacaacatccaggagaaatgatgagaagaactccatcccagcacaccagttggaactttctcttagaagaactgactatggaaaattagagaaccacgagaaaaatgatagaagaacactgaaccattcaacttcatctgcattttacttgtataattgcaggacagcgtccagcttaggaaatgctggtgatggtcaattatgcagcacctcagaaacactagtggatgttgaaaatagaaatggagatttggcagctctgtctgaagacacgactgaaacaaatcgtcctcctatcagagttgtaccatttcctgtccctgttcaatgcttcacatttgatgggcagccgttctggaatggtacaccggtggcatctccattctacccacagtcagctccccccatttggaatagcaaaacaccaacgtggcaagaatcaactccacaagcaacttcactgccacaaaaatcgcaacagaaagaaccagttgaaatggatgctaaaccagttgaaaatgcagaggaacaatttgtcgtaggtcctcccagtgccagtgggaagcagctgcatgttgaaattcctaaagatgatctacggcatatttctcctgtgaccggtgaaagtggaatcagtacggtgctagacagcaccagaaatactctgagcagcagtggctgtgatagcacttccaaccagatcaccgcccctactgaaccatcatccaatgtatacaggggcgttcctgaaaccgcaagagccgaaggtttacgacacctgagccagcgtgaggctgcactgaacaagttccggctaaagaggaaggacagatgctttgagaagaaggttcggtaccagagccggaaattactcgcagagcagcgtccacgggtcaagggccagtttgtccgtcaagatcatagcatccaaggaagctagggtccagttactgagctggaactctttcccattatctacaaaaaaaagtcactgtaagtgactccactgcggggtaccctgatgtcaggttttttcgaagagttggaagcaaccacactgagttacggtttgctgtgtatgtttgctaaagcttgtaatatatgtatgtataggctgactcttttctttccttaggttaggcacaggacctggcacgttctagacggtttgtcggtagacgttaaaaaatacaggcatacttgtgtcctccagtagcacgtgtgctttaagccttgtattatgtaactagccaagttgtttttgatgtttcggattagatgtacactgtggatgtatggcgtgaaggatgtccaccaaagtatgctcgtttctgtgtagcttgttgcaatgaacattgttggcctggttttagtaatgctctcttgccttgagtattagtactgtgaaattttctacagacggtatgaagtgctaaatttgggtgacggtttttataagaagatcatgtctccagtttgcctggttgt

SEQ ID NO: 216049 - DNA, 3956 bp, Zea Mays
cgcacacaagctgaaccaaacaggggcgcgtctctcctccggtaccggccggcatgagctccacctcatcgggccgccgcgccccctcatcttcggcggcggtcgcctcgtcgccgggacagaagcgggcgagggatgaggccagcagcgggtccccatccgaccccgacgccgccaaaaaccctcgccgcgcttttgcctcctccccgttcgccgacttcggcacctacatggctgcgaagaacagcaagctcgctgcgcagttcgatgccgacgccaacacctcaggcacggacgccggcggtctattcgatggcgtctccatcttcgtggacggcttcacagtcccttctagccaggagctgaaagagattatgctgaacaatggaggccggtttgtcaactacttttccaggcacacggtaacacacattgtttgcagcaacctgcctgatagcaaaatgaagaatctgagagcattcagcagaggacttcctgttgttaagccagcatgggtggtggattccctggcagagaaccggctcctcaactgtgctccttatcaaataaatcagaatagttcttcaagccgaaagcagatgaagctttcttctttcttttctgagaaacaaaatgaaatatgccacaagggggaacaaaacaaccaaaataaggatattgagttccaaccttcatctgctcaggagggatcacagtatcaaagtggggattgtgaaagtgaagcttcaatggatactttggagctatcaaaggactcgttgtcctcagatgaacagaaggcatcagcatttgaagaaagagagagcggagatttcacggttgatgagggtgaatacgattatgaaactgcctgttcggagagccgtaatgacacagatggtaaccttggtgtgcctcaatcccctaatgcaaagtcaaggtgttcaaacttattcagtacaagatctacaggcagtcatttgtccttgtcattggagaaaagtgcagctaaaccttctggccgaccacattcaaccctaacagatccaaattttgttgagaactatttcaagtactctcgactgcacttcattgggacatggagaaaccggtatcggaagcgcttctcaaatttgctagaagctaaaggcattaagttgagtgctgatcattcagggaagaagaaaacaatcattcatattgatatggattgctttttcgtgtctgtggtcatcagaaatatgccagagctgcatgataaaccagtagcagtttgccattcggacaatcctaaaggaacagcagaaatatcgtctgcaaactatcctgctcgaaactatgggataaaggctggcatgtttgttagagatgctaaagctcggtgccctcacctaatgatcgttccttataactttgatgcatatgaggaggttgctgatcagttctatggtactttgcacaaacattgcagtaaggttcaggctttgagttgtgatgaagcttttttggatatgactgaatgcttacatgacaatcctgaggaagtaacacagagaataagaagtgagatttttcatgcaacaaagtgtactgctagtgcaggaattgctgaaaacatgctcctagctcgattggctactagatctgcaaagccgaatggacaatgctttattccatccgaaaaggctgatgattatctgagtagtctctctatcaaagcacttccaggcattggtcatacagtttcatctaaactgaaaagcaaagaaattgaatattgtagtcaacttcgcaatgtttcaaaggatgccctccacaaggatttcggaaaaaagactggtgatcttttatggaattattgtagaggaattgatcattcaattgttggatctgttcaggaaacaaaatctgtgggtgccgaaattaactggggagtcagatttaatgacaacaaagatgccgaacattttcttaacaacctttgcaaggaggtttctctacgcttgcagggttgtggagttcagggacgtactattacccttaaggtgaaaacaagaagggaaggtgctggggaaccaataaaatatatgggatgtggtgactgtgaaaccacgagtcgttctatgacggtgcaactgacagttttgtcactctccagagaattgcaaaacaattattttcagctcttcatcttgatgtgaaggaagttcgtggaattggactgtcactatcaaagcttgagcatgcagatttgggccggggagcatcgcaaggacatatgcttgaatcgtggcttgcttcaccagccgccaagctcaagaaacagcagagtgagatactggggaatgttaatgttgcagggaccagcggactgaaggatttgagatctggaccatcacatacagcagaagcgaaccttagaaatgataggtctactgtatttcacaatgtcgagctgcctccgttgtcccaacttgatttggaggtcctgaagaaccttcccccagagataatgtctgaaatgaatgaaatgtacaagggagaattacaaagtcttgtggacaccctcaatagtgacaagggcaaggaaaatagttcaaaatctcttgctttgcctgcagttattcgtaagtctgtacctgccgatgcaaagcttcaaggatacagagaccacagagactccatgcatttggaggaggaacatactaagggaaaatctgacaaacaactatcagaagctaaaccagccaataatgcttcatgctcaagagttagtgcatcaattgagaaaacaacaaaaagtgttacacaacttgatttgatgcctgattcgctaagccaggcagatctaacagttctgcaggaattacctgaggatgtgaaggctgatttgtttagtgcacttccactgcatagatcaggagatcctgcatgcagcacttccaatgtatctgaaagtaaatcacctaatgtggttagagctgaaaatagatcttctaatgatggtggaactgatgatctgaaaaccccaaggtcttttctcccaccaggaagttctcaaaaatggatcgaacagtttagagttagcagttgcctgattttgaacgtaattgcagagcaacacacagattccagctgtcaacgaccattgtcttctgttctagagcctgtagcttcgttcctacctttgtgtcctaacccaggtagtgaagaatggaatgaaactcattcatgtctctccgagcttcttagacactacatacaactgaaagttgaatatgatattgaagagctctacaaatgtttttgccttttgaaaagattctcgtcagcatcagagttttttctggatctacatgatagcatccttcctttcctacaggattctatcagccagcattacggtgggacactgcaattctagctccttgctcaagttgtagccattctattttgctagaaaggaagaagcaatgccgtgaatgtgcggagagacgtgttatgacaatctgcgcctccaagcagctactcaaatcccgtgctggcagattccttggacgcgtttataactttattataactaattgatgccaatgctggaagttttattgatatattcattgcatctatggatcaatagatgccatgtggttcgatatatcattcgtggagcaatggtttgaagggacctttgctgtgctttgatgttcccaggcgaatttcatgtttgcttcataacccatatgaatttcatgttatctttgtgttgctaccaaaaaggttcctggtttgaagttctttgcgtcaaattttcacctatgatctgaagtaccatccgtgcatcctagttattggaagctttacatgagctaatatatgcattatctagtgccatggacctctggtagaaatgcaaccagtctttgaaagcaaatcacaatcagcataaaataaag

SEQ ID NO: 216050 - DNA, 4598 bp, Zea Mays
ctgaaccaaacaggggcgcgtctctcctccggtaccggccggcatgagctccacctcatcgggccgccgcgccccctcatcttcggcggcggtcgcctcgtcgccgggacagaagcgggcgagggatgaggccagcagcgggtccccatccgaccccgacgccgccaaaaaccctcgccgcgcttttgcctcctccccgttcgccgacttcggcacctacatggctgcgaagaacagcaagctcgctgcgcagttcgatgccgacgccaacacctcaggcacggacgccggcggtctattcgatggcgtctccatcttcgtggacggcttcacagtcccttctagccaggagctgaaagagattatgctgaacaatggaggccggtttgtcaactacttttccaggcacacggtaacacacattgtttgcagcaacctgcctgatagcaaaatgaagaatctgagagcattcagcagaggacttcctgttgttaagccagcatgggtggtggattccctggcagagaaccggctcctcaactgtgctccttatcaaataaatcagaatagttcttcaagccgaaagcagatgaagctttcttctttcttttctgagaaacaaaatgaaatatgccacaagggggaacaaaacaaccaaaataaggatattgagttccaaccttcatctgctcaggagggatcacagtatcaaagtggggattgtgaaagtgaagcttcaatggatactttggagctatcaaaggactcgttgtcctcagatgaacagaaggcatcagcatttgaagaaagagagagcggagatttcacggttgatgagggtgaatacgattatgaaactgcctgttcggagagccgtaatgacacagatggtaaccttggtgtgcctcaatcccctaatgcaaagtcaaggtgttcaaacttattcagtacaagatctacaggcagtcatttgtccttgtcattggagaaaagtgcagctaaaccttctggccgaccacattcaaccctaacagatccaaattttgttgagaactatttcaagtactctcgactgcacttcattgggacatggagaaaccggtatcggaagcgcttctcaaatttgctagaagctaaaggcattaagttgagtgctgatcattcagggaagaagaaaacaatcattcatattgatatggattgctttttcgtgtctgtggtcatcagaaatatgccagagctgcatgataaaccagtagcagtttgccattcggacaatcctaaaggaacagcagaaatatcgtctgcaaactatcctgctcgaaactatgggataaaggctggcatgtttgttagagatgctaaagctcggtgccctcacctaatgatcgttccttataactttgatgcatatgaggaggttgctgatcagttctatggtactttgcacaaacattgcagtaaggttcaggctttgagttgtgatgaagcttttttggatatgactgaatgcttacatgacaatcctgaggaagtaacacagagaataagaagtgagatttttcatgcaacaaagtgtactgctagtgcaggaattgctgaaaacatgctcctagctcgattggctactagatctgcaaagccgaatggacaatgctttattccatccgaaaagaagatggcccaatgtttcttagagcgatcaacactgagggaatatccaagaccaaggagtatattgcagagaagatgttagcagtaattgatgaggttggggcacaaaatgttgtgcaagtgatcactgacaatgctgccaattgcagagccgctgccgtcataattgagcagaagcaccctcatattttttggaccccttgtgttgtgcatactttgaaatcttgctttgaagaacatatgtgctgctagggaaattgaagatgtgctttatacttaattccagtggattagcgaagtcattggagatgccagcatgattaaaaattccatcatgaatcactccatgaggaattgtgaagagaatacactgcctgcaacattcgtctgttcccaacagacctaaaaagaagcttggaggttcggatatcacatctatgttgttcaatatctctatgaaaatattggctgttgaatcagttattttttctgggagttgatttaatagttctactcattcccacaagcttgttgggtattgaattgagttactaatttgtttgtctttccttgaattcctacctgattaaagaaaatcactagtggtgccactccctctaaaaggatgtactttgtactacatgctgctgatgattatctgagtagtctctctatcaaagcacttccaggcattggtcatacagtttcatctaaactgaaaagcaaagaaattgaatattgtagtcaacttcgcaatgtttcaaaggatgccctccacaaggatttcggaaaaaagactggtgatcttttatggaattattgtagaggaattgatcattcaattgttggatctgttcaggaaacaaaatctgtgggtgccgaaattaactggggagtcagatttaatgacaacaaagatgccgaacattttcttaacaacctttgcaaggaggtttctctacgcttgcagggttgtggagttcagggacgtactattacccttaaggtgaaaacaagaagggaaggtgctggggaaccaataaaatatatgggatgtggtgactgtgaaaccacgagtcgttctatgacgattgcaggtgcaactgacagttttgtcactctccagagaattgcaaaacaattattttcagctcttcatcttgatgtgaaggaagttcgtggaattggactgtcactatcaaagcttgagcatgcagatttgggccggggagcatcgcaaggacatatgcttgaatcgtggcttgcttcaccagccgccaagctcaagaaacagcagagtgagatactggggaatgttaatgttgcagggaccagcggactgaaggatttgagatctggaccatcacatacagcagaagcgaaccttagaaatgataggtctactgtatttcacaatgtcgagctgcctccgttgtcccaacttgatttggaggtcctgaagaaccttcccccagagataatgtctgaaatgaatgaaatgtacaagggagaattacaaagtcttgtggacaccctcaatagtgacaagggcaaggaaaatagttcaaaatctcttgctttgcctgcagttattcgtaagtctgtacctgccgatgcaaagcttcaaggatacagagaccacagagactccatgcatttggaggaggaacatactaagggaaaatctgacaaacaactatcagaagctaaaccagccaataatgcttcatgctcaagagttagtgcatcaattgagaaaacaacaaaaagtgttacacaacttgatttgatgcctgattcgctaagccaggcagatctaacagttctgcaggaattacctgaggatgtgaaggctgatttgtttagtgcacttccactgcatagatcaggagatcctgcatgcagcacttccaatgtatctgaaagtaaatcacctaatgtggttagagctgaaaatagatcttctaatgatggtggaactgatgatctgaaaaccccaaggtcttttctcccaccaggaagttctcaaaaatggatcgaacagtttagagttagcagttgcctgattttgaacgtaattgcagagcaacacacagattccagctgtcaacgaccattgtcttctgttctagagcctgtagcttcgttcctacctttgtgtcctaacccaggtagtgaagaatggaatgaaactcattcatgtctctccgagcttcttagacactacatacaactgaaagttgaatatgatattgaagagctctacaaatgtttttgccttttgaaaagattctcgtcagcatcagagttttttctggatctacatgatagcatccttcctttcctacaggattctatcagccagcattacggtgggacactgcaattctagctccttgctcaagttgtagccattctattttgctagaaaggaagaagcaatgccgtgaatgtgcggagagacgtgttatgacaatctgcgcctccaagcagctactcaaatcccgtgctggcagattccttggacgcgtttataactttattataactaattgatgccaatgctggaagttttattgatatattcattgcatctatggatcaatagatgccatgtggttcgatatatcattcgtggagcaatggtttgaagggacctttgctgtgctttgatgttcccaggcgaatttcatgtttgcttcataacccatatgaatttcatgttatctttgtgttgctaccaaaaaggttcctggtttgaagttctttgcgtcaaattttcacctatgatctgaagtaccatccgtgcatcctagttattggaagctttacatgagctaatatatgcattatctagtgccatggacctctggtagaaatgcaaccagtctttgaaagcaaatcacaatcagcataaaataaag

SEQ ID NO: 216051 - DNA, 4379 bp, Zea Mays
ccggtaccggccggcatgagctccacctcatcgggccgccgcgccccctcatcttcggcggcggtcgcctcgtcgccgggacagaagcgggcgagggatgaggccagcagcgggtccccatccgaccccgacgccgccaaaaaccctcgccgcgcttttgcctcctccccgttcgccgacttcggcacctacatggctgcgaagaacagcaagctcgctgcgcagttcgatgccgacgccaacacctcaggcacggacgccggcggtctattcgatggcgtctccatcttcgtggacggcttcacagtcccttctagccaggagctgaaagagattatgctgaacaatggaggccggtttgtcaactacttttccaggcacacggtaacacacattgtttgcagcaacctgcctgatagcaaaatgaagaatctgagagcattcagcagaggacttcctgttgttaagccagcatgggtggtggattccctggcagagaaccggctcctcaactgtgctccttatcaaataaatcagaatagttcttcaagccgaaagcagatgaagctttcttctttcttttctgagaaacaaaatgaaatatgccacaagggggaacaaaacaaccaaaataaggatattgagttccaaccttcatctgctcaggagggatcacagtatcaaagtggggattgtgaaagtgaagcttcaatggatactttggagctatcaaaggactcgttgtcctcagatgaacagaaggcatcagcatttgaagaaagagagagcggagatttcacggttgatgagggtgaatacgattatgaaactgcctgttcggagagccgtaatgacacagatggtaaccttggtgtgcctcaatcccctaatgcaaagtcaaggtgttcaaacttattcagtacaagatctacaggcagtcatttgtccttgtcattggagaaaagtgcagctaaaccttctggccgaccacattcaaccctaacagatccaaattttgttgagaactatttcaagtactctcgactgcacttcattgggacatggagaaaccggtatcggaagcgcttctcaaatttgctagaagctaaaggcattaagttgagtgctgatcattcagggaagaagaaaacaatcattcatattgatatggattgctttttcgtgtctgtggtcatcagaaatatgccagagctgcatgataaaccagtagcagtttgccattcggacaatcctaaaggaacagcagaaatatcgtctgcaaactatcctgctcgaaactatggtgctgctattttattttccattaattgagacttataatttagttatgtgaacacatttgaagagataaaggctggcatcctcattggtgcattccagggataaaggctggcatgtttgttagagatgctaaagctcggtgccctcacctaatgatcgttccttataactttgatgcatatgaggaggttgctgatcagttctatggtactttgcacaaacattgcagtaaggttcaggctttgagttgtgatgaagcttttttggatatgactgaatgcttacatgacaatcctgaggaagtaacacagagaataagaagtgagatttttcatgcaacaaagtgtactgctagtgcaggaattgctgaaaacatgctcctagctcgattggctactagatctgcaaagccgaatggacaatgctttattccatccgaaaaggctgatgattatctgagtagtctctctatcaaagcacttccaggcattggtcatacagtttcatctaaactgaaaagcaaagaaattgaatattgtagtcaacttcgcaatgtttcaaaggatgccctccacaaggatttcggaaaaaagactggtgatcttttatggaattattgtagaggaattgatcattcaattgttggatctgttcaggaaacaaaatctgtgggtgccgaaattaactggggagtcagatttaatgacaacaaagatgccgaacattttcttaacaacctttgcaaggaggtttctctacgcttgcagggttgtggagttcagggacgtactattacccttaaggtgaaaacaagaagggaaggtgctggggaaccaataaaatatatgggatgtggtgactgtgaaaccacgagtcgttctatgacgattgcaggtgcaactgacagttttgtcactctccagagaattgcaaaacaattattttcagctcttcatcttgatgtgaaggaagttcgtggaattggactgtcactatcaaagcttgagcatgcagatttgggccggggagcatcgcaaggacatatgcttgaatcgtggcttgcttcaccagccgccaagctcaagaaacagcagagtgagatactggggaatgttaatgttgcaggtattgggcaactgctgctatcatgtgaagctatatttcgcagtggtgggaacgtatctcgtgctcataggggtaccgtgctcacatgcacattttaaatctgatgcgttcatcttgaatctaatagtagcatcacttttatgaagggaggtggaaggggttctttataaaattgctgctgctgttagatacgagatggacgtaccggatttaaaatgtgcatgtgagcacggtaacccctatgttcattgtgttttgttcgatgggaattgattgtttggagcttcattagggaccagcggactgaaggatttgagatctggaccatcacatacagcagaagcgaaccttagaaatgataggtctactgtatttcacaatgtcgagctgcctccgttgtcccaacttgatttggaggtcctgaagaaccttcccccagagataatgtctgaaatgaatgaaatgtacaagggagaattacaaagtcttgtggacaccctcaatagtgacaagggcaaggaaaatagttcaaaatctcttgctttgcctgcagttattcgtaagtctgtacctgccgatgcaaagcttcaaggatacagagaccacagagactccatgcatttggaggaggaacatactaaggtgagctgtgtcactggaaataaagtggcgctggaactttttaaacaaagtgcaagcacgtgatttagttgctgtcacctcctcatcttgatatttggaagttggaacctgtttcacactattctaattttacctttacacccgtagggaaaatctgacaaacaactatcagaagctaaaccagccaataatgcttcatgctcaagagttagtgcatcaattgagaaaacaacaaaaagtgttacacaacttgatttgatgcctgattcgctaagccaggcagatctaacagttctgcaggaattacctgaggatgtgaaggctgatttgtttagtgcacttccactgcatagatcaggagatcctgcatgcagcacttccaatgtatctgaaagtaaatcacctaatgtggttagagctgaaaatagatcttctaatgatggtggaactgatgatctgaaaaccccaagagcaacacacagattccagctgtcaacgaccattgtcttctgttctagagcctgtagcttcgttcctacctttgtgtcctaacccaggtagtgaagaatggaatgaaactcattcatgtctctccgagcttcttagacactacatacaactgaaagttgaatatgatattgaagagctctacaaatgtttttgccttttgaaaagattctcgtcagcatcagagttttttctggatctacatgatagcatccttcctttcctacaggattctatcagccagcattacggtgggacactgcaattctagctccttgctcaagttgtagccattctattttgctagaaaggaagaagcaatgccgtgaatgtgcggagagacgtgttatgacaatctgcgcctccaagcagctactcaaatcccgtgctggcagattccttggacgcgtttataactttattataactaattgatgccaatgctggaagttttattgatatattcattgcatctatggatcaatagatgccatgtggttcgatatatcattcgtggagcaatggtttgaagggacctttgctgtgctttgatgttcccaggcgaatttcatgtttgcttcataacccatatgaatttcatgttatctttgtgttgctaccaaaaaggttcctggtttgaagttctttgcgtcaaattttcacctatgatctgaagtaccatccgtgcatcctagttattggaagctttacatgagctaatatatgcattatctagtgccatggacctctggtagaaatgcaaccagtctttgaaagcaaatcacaatcagcataaaataaag

SEQ ID NO: 216052 - DNA, 3930 bp, Zea Mays
ctccgtagtttataaagcttgatgctaacgttagtttattggtttgcttcttcacaaaaaagaattattagtttgcttgctgtttaaatacatgaacattattgaggagtaacttcaaatttcatctgtattaaaatgatccttggttagaaatattggatcatggctctatactatctttgtttacattctccttcaatgtgttgctgctaagattaataagcaattaataagcatgaggtgtttctcctgagatgcatagattatatgagcagatgcaagtgacaacccattggaaggtaacgagtttgtgctatatagaatcatttagtataggtctataaatttctatgtgcaatttttccttttatatattattacctttatagaatttattctcaccacgtttcatggatatagatttcagtatgttgctgccaagattaataaacgtgaggatttctgatgcatagggttatatacgagagcagatacaggtgatacccatttttaaaggtaacatgtctatggagaaaaaatatatagactcattttctatatgtgattttccatttttatattgttatattcaatggaatttgttctcaccacatttcctttatatagatcaaaatattctatggcaatgcctacaacaaaagtgttagctcatcaatgtaaaattattcaagcacttggcattctaaacagtgtcctcattttttagtttagttggatgatatgtacatttatgctgcattattgaagctgcctacgattttagatctaccatttgccactgccgtgctgttcatgcttcataccatgcttcaattgtgatgtactttaaatagattgttgcatgctagatgccaagaaatgcagcaagaaagttattctgaaaaattgctacatttttttgccagtttcatgtcccgtgagtgcataaacataatgcagaacatgcaacattaatagaggtagtgttgctacctcgccaatctaatgctcaccatcccctgtagtgctaatttgggataccttgcccaaacgagcatatgagttcatggtattctaatgtctcccaactaagtacttgaggtcatgggtattctaacgcttcactcagaaatgcatgacaaacccatttcctgctctatcattggataaagacatctttgttttcttcttagaaatcatatattccactatctttttttactttgctcgctcgatgaaggataggtctggcacagtggtgacaagccttctcattgagcgaagaccgtcctgggttcgatgtagcctttctgcaaaatgcaggggttttcatcacaggatgggtctaatcagtcatatggcacagcaaacccaggtttggctagaatcgctatacattctgaacttatctttaggcatttaggcaatggtagctagtggaggctaagtgtggttttgaatgtttgaaaccagatgtttgatcaatattattatgacaacaactttgacgaactgcaagttaattttgcttctagcaattgaattgttgtctacctgccaaaattatagctcgacctctatttcttaggtacatttaatgtgtggcctttatttttgtcttttttaattaccaatgactactttatgacaaaagactgaaattctggtgttgttgtttgtgttctgtagcaacccagcttattttttttctttcaatattttccacaggacaacttggataatggacaaccaaagattttccactaaaataaagtatggttctgggtcttcatatccaagtaaacaaaaatggatcggcaacccaagtaaagagtgcccaaagtgcaatcatgccattgataattatatttccacttttcattatatgccatttccgtttctctgtaatcaagcatggttaggaataaataaaaaaaacgatatatgagcaattgccaaagattaacagtttgcatatcttaaggagttcgtcaacatttttataaaattggaataaatgtctaaggttataattatatttgtcactttacctgccttacttttgagccagctcatggccaacttatatgttagtacacctattgtatttctaaaatgctttgatttttgcagatacagtatgggcctttagctatgaatattccttttaaaggttctattaaagtgtggtcagctgcaaagtctgtgaggttctattgaagtgtgatcagctcatgactgttttcttgttgcaggttgttcaccagtggcccgatttgcttaaaggtgtaaaatttgatccttctaaccaagaattaatctggcacttattggcaaaacatggaaaatctggcaaaaaaccccccatccgttcattgacgagttcattccaacagttgaagaagatgaaggcatctggtacactcatcgacagaaacttccaggtacttctatcttctttctgaaagattgtgggattttcaggattaaggttcgtagctataaacttttgtttcagattagatcaaatttgaaaatctacagtttacaactatgtcaagtgcttatctttgttagtaatttgttgtcctgtgggattcttttgttgatcacaccctatgatggcctgcgtttagcctaggaaaacttcaggtagggaaaattacttattttagttttcgtttagtttttcaccatgtcgctatgcaacaattgacggcctgtacaactcttgaattgtagctgccatctttgaaatagacatttaacattctggttggaacactctttctttggtactccacttgtttttcaacattcaggagtcatctctattcattttaggtgttaagcaaaatggaagtgtatcacatttcttccacagaacatttaaggcctacaacactgggactaggaagtgtccattggcacaacacaggcaagactattttcttctagaagataataagaagatttggtgggcttagcttgatggcagcaatgttggttttgtgtttgtacatgatggcagcactagtgtttcccccttatgttgctcctcttcaggtctctatggatgacattgccccgatgataagatgaatgaccgctatgaaaacatggggtgcacaacatcgaatgatttcatttgtagtttgccatgtgttttgacagattagtccatgcggcggaggctagacaacatgcacaagaggttgaggctgttggagcaacaaatggagacgctggaggcccaaattggcaaaaccaccgacaatgtgctgatttttatctattacttttctttaaaacatgtatacaaaatgtcccatccctgtttactgcgcaaacatgttcaacggaatgcaacataatcaatgcttttataattaagtttttaatctaaattctaaaatatttggttctgtattggtggttggcaaagaatatgtattgttcgtttttatgtaatcattgtgcactaacatttcattgaatatttgtgtgtcgtcgcaatgcacatgcattgtactatatacattatatgtgagttttcttacacttgagattctgaaattattagttatgacaaatccaatattgttgttccatgaaatttgttgggagagagatggaaattatggtcatcaacagctctagcacacagagtgtgcattgaactaaggattagttcctatataatggcacattggcactaacatttttatgcattttaatgcacccgtagcaacgcacgggcatagacctagtagatcaatagaagagtaaagaaaggatcaaaggaaatgcttctaaccaagctcaggataaaacagtaatcatgcaatgcaaccgagaaaatgtctgcaaactataaacagtaggcaagtggtagcagaacaggacaacttaagagtaattgcaaaaaag

SEQ ID NO: 216053 - DNA, 3469 bp, Zea Mays
ctccgtagtttataaagcttgatgctaacgttagtttattggtttgcttcttcacaaaaaagaattattagtttgcttgctgtttaaatacatgaacattattgaggagtaacttcaaatttcatctgtattaaaatgatccttggttagaaatattggatcatggctctatactatctttgtttacattctccttcaatgtgttgctgctaagattaataagcaattaataagcatgaggtgtttctcctgagatgcatagattatatgagcagatgcaagtgacaacccattggaaggtaacgagtttgtgctatatagaatcatttagtataggtctataaatttctatgtgcaatttttccttttatatattattacctttatagaatttattctcaccacgtttcatggatatagatttcagtatgttgctgccaagattaataaacgtgaggatttctgatgcatagggttatatacgagagcagatacaggtgatacccatttttaaaggtaacatgtctatggagaaaaaatatatagactcattttctatatgtgattttccatttttatattgttatattcaatggaatttgttctcaccacatttcctttatatagatcaaaatattctatggcaatgcctacaacaaaagtgttagctcatcaatgtaaaattattcaagcacttggcattctaaacagtgtcctcattttttagtttagttggatgatatgtacatttatgctgcattattgaagctgcctacgattttagatctaccatttgccactgccgtgctgttcatgcttcataccatgcttcaattgtgatgtactttaaatagattgttgcatgctagatgccaagaaatgcagcaagaaagttattctgaaaaattgctacatttttttgccagtttcatgtcccgtgagtgcataaacataatgcagaacatgcaacattaatagaggtagtgttgctacctcgccaatctaatgctcaccatcccctgtagtgctaatttgggataccttgcccaaacgagcatatgagttcatggtattctaatgtctcccaactaagtacttgaggtcatgggtattctaacgcttcactcagaaatgcatgacaaacccatttcctgctctatcattggataaagacatctttgttttcttcttagaaatcatatattccactatctttttttactttgctcgctcgatgaaggataggtctggcacagtggtgacaagccttctcattgagcgaagaccgtcctgggttcgatgtagcctttctgcaaaatgcaggggtaaggctttcctttgaaggataggtctggcacagtggtgacaagccttctcattgagcgaagaccgtcttgggttcgatgtagcctttctgcaaactgcaggggtaaggctttccttggttattctttctctagactcatgcaggagccgcaatcatttggtttatccttttgctcaccctatgattcacataatgctattgccataagaaaatgtgcttcatgccatagtagtatgtcatatatataatttatttattttcttaaaagataatatatctctactcctttaaagcacaactttcatgcaggtgtgggtgagaaactggttttctccgtcacgcacgtacgcttaggggtggtaatgagctctagattttacactacaaactttaaggatcaaatcggtttaggatcgggccctattcctattcatttctaaactaaaattatttaagggtcctaaatttttgttaagggacatttggatcgtggtccattaccacccctacgtacgctttcataataagccgtctgtgtcgcatgtccacaacaacccagacgtgtcctcctgtctctcgtgtctcgcgtcaccgacaccgcagtgagagtagaagcaacaaccccgcagtgagaggaaaacattcttatttggctggtaaatatttatttgttttcaatgtagtttgctagataattgaaaaatattttgtttttttcatccgactgttttggagatggtagctgttattacacatgacaagaagaatgattcacggcatacttgtgtgttccttgaatcaaagaacaaataaataaaatgtagtaaagggcattgccttctccattttcttgtagattttcatctcaggatgggtaatacctcttctaggtttccttttgcattttcttctggattttcatcacagaatgtccctaatccccctctggattccttttttcttctaggttttcatcacaggatgggtctaatcagtcatatggcacagcaaacccagatacagtatgggcctttagctatgaatattccttttaaaggttctattaaagtgtggtcagctgcaaagtctgttgttcaccagtggcccgatttgcttaaaggtgtaaaatttgatccttctaaccaagaattaatctggcacttattggcaaaacatggaaaatctggcaaaaaaccccccatccgttcattgacgagttcattccaacagttgaagaagatgaaggcatctggtacactcatcgacagaaacttccaggtctctatggatgacattgccccgatgataagatgaatgaccgctatgaaaacatggggtgcacaacatcgaatgatttcatttgtagtttgccatgtgttttgacagattagtccatgcggcggaggctagacaacatgcacaagaggttgaggctgttggagcaacaaatggagacgctggaggcccaaattggcaaaaccaccgacaatgtgctgatttttatctattacttttctttaaaacatgtatacaaaatgtcccatccctgtttactgcgcaaacatgttcaacggaatgcaacataatcaatgcttttataattaagtttttaatctaaattctaaaatatttggttctgtattggtggttggcaaagaatatgtattgttcgtttttatgtaatcattgtgcactaacatttcattgaatatttgtgtgtcgtcgcaatgcacatgcattgtactatatacattatatgtgagttttcttacacttgagattctgaaattattagttatgacaaatccaatattgttgttccatgaaatttgttgggagagagatggaaattatggtcatcaacagctctagcacacagagtgtgcattgaactaaggattagttcctatataatggcacattggcactaacatttttatgcattttaatgcacccgtagcaacgcacgggcatagacctagtagatcaatagaagagtaaagaaaggatcaaaggaaatgcttctaaccaagctcaggataaaacagtaatcatgcaatgcaaccgagaaaatgtctgcaaactataaacagtaggcaagtggtagcagaacaggacaacttaagagtaattgcaaaaaag

SEQ ID NO: 216054 - DNA, 2601 bp, Zea Mays
gccaccttcttcggcgcagcggcggttgctttgcccgatctcaacccgcgtcctcgtcagtcctcagttcctcacttctcccctcctcggcacgggccacctcgccactcccgagtccgggcccgccgcgccacctgaccgactcgaccgcggctcgcatcgggacgcgtccgactcccatgtaacagcagctggtcagcaacaacgagcagctcctcaccctcactggcaggacccgaccgactcgccctttgccgctccgctccgatcgccgccgccgcggggttgcattccaatgtggcggcgcggggcgcacgccgacgccgcgcaccatctccccaccgcgggcccgggagcgtcctcctcctccaccgccgccgcctccgcgggcgcggccgcagcgcggagacggcggcgcccagggctgccctgccgcccgagccacctcttcttcgcgctcctcgtggcactcttcaccgcctccctgctagtggtctggcagctgctccccatcggcgacggcgacgcagcggagggggacggggaggcgccgccgcgccttcaaggaggcgaagccggaccgatgcggttctcgtcctccagcctggcgctgcgcgcgttcgacggcgagagccggctcgaggccgcgagatccgggcggcggctgtgggccagcctcgcgcccgtcagagtagcgctcgctgttggaaatatgaacatagatgcacaatctctgatgcttgcaactgttgcgaaaagtcttgtgagtctgggctacgaggttgaggttttagcatttacagatgggaaagctcgtgatatttgggaaaatatttgtcttgtaaatgttgtgaacactggggctttgaaatctgttgactggtcacagtacaatgctgtgctagtaagctctctcgaagggaaaggggttgtttcaattcttatgcaggaaccttttcggcttctaccagtgatttggcttatacatgaagacactcttggacaatatcttagaagttatgcaaagttacatgattctattcaaaatgtcattgaagattggaggactcattttaatgcatgcgcttatgttgtttttccagatagctaccatcctttgttgtactcgcctcttgattctggtaactttttagtgatttctggttctccagttgatatctggtctgctaaaagatttggctcatcacattctgacgaaactacaagaaagcagcatgggattgaaaaagatgatgttgttattttggttgttggaagctacttattttttgatgatttaccatgggattatgtcacagtcatgcgtgcatcagctacacaaattttggatatagcaaaaactaaaaatctgagggtgcagtttgtttttttctgtggaaatggctctgatgcctacaactctgctttccaggaacttacctcacacatggggttacctgatgtctccataaagcgattttctgtgactcatgatattagaaacctgttaatgtttgtggatgttgttctctatggatctttaagacaagaacctgtcttccctcctttgttattgctgtccatgtcctccgaaattccagttgttgcaccaaatcttactgttataacaaaatatgtcagtgatggtgtccatggattccttttcgattctgctgacccaagcacgatttcttcagctttcatacaaattttaggagaaaaaaagcttttggatactgcctattctgttgctctggaagggaagctactttccaagaacatgttagcacatgattgtatcaaagctcatgttaagcttcttgaaagtgttattcattttccttcttatgcaaaattgccatcttctgtttctaaagttcaagaacgaacatggttgtgggatcctttcgagttgaaagctgcactagaaaatagtttgttggaagatgaaagccatgccagcacaaaggctgttgatattcttagagaattctctcaaagtaaccaaacaacttatgctgatacaaatgatacttcttcatatgattaccctcgtttgtccgattggtatgatttaggtgaaattgaaatctttgaagacattgagaggagagaaatggaggagattgatgaaagggtggaaagacctttgttatcatgggatgaagtgtacaaaaacgctcgtaaatcagaaaggctaaagtcagaaggaaatgaacgtgacgaaggtgaactagaaaggactgggcaacctgtgtgtatatatgagatctatagtggagagggggcatggccatttttacaccatggatctttgtatcgtggtgttacactttcgaaaggaggaaggcgaccaagatcagatgatgttgatgctgttaccaggctttcagttctagacaacccatactatcgagatcttctttgtgaatttggtgctatatttgccattgcaaacagagtcgatactgtacataagttaccatggataggtttccagtcatggcgggctgctggaagaaagatgtgctgcctcccaatctggtcaacctagaattcatcgcgcatcccaactttgacattgtcctctgcagtttcctg

SEQ ID NO: 216055 - DNA, 5811 bp, Zea Mays
agtcccagtcccaccaccagggcagcacgctctcctccctccggcctccgcccactggatccgagacccacgcgcaaaactcgggccgggaaaaactcgccaggaaagagaacgctcggaagggaaacacaggctcgggctcgagacgaaaccctaaccctacctccgcttgcctcgacgtccctcctcgccggaggcctcccccggagacgcagcctccgctgagggctccggcggcgatgcgcccctcccagttggaggcgttatgagcggggaaatggcgcgcgccgaggccttgccagagggggaggcccccgggttcggtgtcgacctgtatgcgcaagccaccaaggctgtgtccctgcggacgccgttcgagggcgatgaggcggcgcccagggttcccacgctgcccgcgcggctcgtcagctgggcagggccaggggacgcccggaagaagcacaagaagattctgcctccccctcctgatgatgctgctccggagcctccaccacagtcacctgtagtcacccctgcgaaggttggcttgtgggaccagtttgaggcgtatttccgtcccgtaacactggctgacgtcgaaatgttaagaccaaagctcccatttggctacagcaaggttgactcatgtatgctagtaccatttctgggcagtggcaatgagtcaacaacccaagctgagacatatgacgtggctgtggctgaaacaaccttgtatttgggtgttggtggtgaagaagtggtcactaatcgggagcgcggcgtgcaaagtgtgcatctggctagtcagaaagagaggaatgatcaaagcattgaacatgacatacatgatgtggttgtgcaacagatggtcagcgacaaagagcttaataggcacagaggggtacagggcatacacgaagtttctattcagttgggagggagatcatctggagtggatcaagctgggagcagtagtggcattgttttaggacaatttgtcaatgaggaaggaacttcacttaattggctgctaggagcaacaggccggtttgttctcacttcagagcgacccaacaagaagagaaagcttctgggtgtcgatgctgggttagagcagcttgttctgcttccacgcgtaggggctgaggcatctgcaagctgtgatgtttgttgtcttggagaaagttccatggagtccaataggatagttaactgcagcaactgcaaggtgtcagtgcaccagaagtgttatggtttgcatgctgtgcctgatgggcaatggttgtgtgcttggtgtacatatctagagtctacagggtggtcattgaaggaagatgctggtaacacccagtcgatgccttgtgctttatgcccaaaggagaaaggagctcttaaacctgttaaagtggagtctactcgaaatgagggtattggccaccaaaaatttgtgcacttgtactgtagtctctgggcaccagaggtttttgttgaggacatggagtcaatggaacctgtacttagccttgaaaatgtccaagagaatcggatgaagttgacgtgcagtatctgcaagattaagcatggtgcatgtgtccgatgtagtcatgggacgtgtcggacgccctttcaccctatatgtgcaagagagtcaaagcatcaaatggagatatgggggaaatccaggcaccctaatgttgagttgagagcattttgctcaaagcattctgcagttgaatacgccagttctgtagataccagtaaccttgcatctgaacagaatcctagaaaatctggcccatacaataccaccctcaattctgggaaaattccagtaattaggttcacacgcaaaaacaaggacaaattcatcagttgtggaaccagtgcctctagttctggtaacctgatcagagtcaagacaatagagcaagatgctttagctaacacagttagaaatgcaaattctcaacctattcgaatatgggaaacaggtactggtcatccctctgttagtggtgatcatatcagaagttctggtgatattgctgtagtgcttagaaagctaattgacagtggaaaagttagtgttagtgatgtagcatctgaagtcggtatttcttcggaatccttggaagctgctcttgtgggtgaaactaccacgttttcccatggtttgacgctgaaaattatcaagtggctccaaaattctgtgcatatgcatgatgatgacaagggtgtacttgttgatgtgccggatttcgctgtaactgaacctgcacgaacaagatctaaaagcaacagcaagatactgaaagaaaataatgcaacatgcgcaacaggtgtgactattgtgcaaaatggagaaaagaacatggttaaagaagattctaatcccgagtgtgctgctaaagaatttgcaaacgaatctactcaggggttttctccaagcagcagcaaggatgttttaaaggacgaacatggaatattgatactgaacgacacctctggaaacaaagaatctggtacctccacacagataccaaatgaaaagcaaggtgcattacttggaagaaaaaataatgacttaactgaggtcgaactgggtccatgcttagagaaaggagtaccttcacatggccattgttttgttcagggtgataatggtgtagatggggtaggttcagttgaaaatagcttcaacacttcaaattgctctcatggacaaccttttttcaactttgatgattcacattcttatattcacccattcattaagaaaaaggtatctcatcattgggacattactttcaatcagaataaggaaactctgaatcactatatacaagagtcatcatatccttcacatgagaaaataccaactgattccttggtagaagtagagagtacagcagatacaaccgtgacagatcaagttttgaaagcaaggtcttcaaaaattcttgagcattcacctgatgatgaagttgaaggagagatggtgtacttacaatctaggctgcttgacaatgctgttgttctgaagcacagatatgaaaaattgatagcaaaggttgtccaaaatctttgtcgcgagctggatgctttcagtaaaagaaaatgggatcttatctttgtgaatcagtttcttcgtgatgttagagaagctaaaaaacgtgggagaaaagaaaagagacataaggaagcccaagctgtactagctgcagctgcagctgctattgcatcctcctcacggaactcaactgtgagaaaagatgcaaaggagaatgcaccagagagttctccaaaacttgttgctggatcttcaagggttggtcaacggactttttcattgccacggattaatgattcatcaaagtcatccaacaacaaagtatcatcagataacaaatttggaagttttcatatgccaatttcttcaaaagaaaatgggctatactgtgatgtatgcatgcgaactgaaactctgttgaaccgaatatttgtctgctccagatgcaaggctgctgtgcacatagattgctacagaaatctggaaaattctattgggccctggaactgcgaactttgtgaagatgaagacatttcatcagaagctacaagtacaaccgttagtgataaatcacattgtaatggcaagttaccctttgcacagtgtggcatgtgccatggcacatcaggtgcttttagaaagactgtagatgggaagtgggttcatgctttctgtgctgagtggttgttggataccaagtatgtaaggggacaagatagccctgtagaaggaatggaaaaccttgtagagggaaaagacacttgttgtctctgcctctgcaatgttggcatgtgcttaaggtgtagtagtggggattgcaacattactttccatcctacttgcgctagaagttctggtttatacatgaacacgaaagggtttggtactacatcacagcacaaagcatactgtgacaaacacagcgtagaacagaaagaggctgatgcacagcaatatggacctgaggagctcaggagcatgaaacgaatgaggtacatgtttatttggatgttattgaataccgagtgaagctgcacatagtatccttttagactatcctcctgactccgtcccatggttttgagaagctcaacttacgttgaattggagaaactacgcctgttgtgtgagagaataattaagagagagaaggtgaagagagagacggttatgtgtgatcatgatatacttgccaaaacaaaggacactgttattttctcctaccttgcgtgtggagcaagctcagaatctgcaactacttcagttaataacaggtcgtacatgcaaagatctgatgatgtcacagtagatagtactatttctgggaagaagaccataagattttctctgaaaaacagagatgttgatagaaacacagctgacagctcaagaacattgatatcattcaaacgcaagttgagtgagaggggaccacgagctggtaagcaacttccacagaggccaactattgcagcagagaaactggaagatgaagacaagaagacaactgataagaagagagaaatgtttcaaaaagagctcgttatgacattagatcaagcttctacacagaatcaacgtcttcctaagggatatgcttatgttcctcgggattccttatcaaaagagaagctatggaatcgaaatacacagccacttaatccgcaggagcctggtggataggatcagttgaaatcaagtcggttcatttctctcgaggaaggtcatgagaaacttgtgcaggcatgttctttgcaactgaaaacgacaagcggcaagcaggggctggccagtgctattgccgcaagggttacagccaatccgtgatcttttttggacccaagttgcataatggtgcagactgaggtattcgtgtgaatgtatggtgtggcaccataacaagaaggctgcccccacccaggtaacgcgaatgatcagcaatatgggtgaattgacctacttgtgctataccaaagacagcgtgccaactgtatatatgagttttattagtgtgcagatttcataaaattgccctgtacattctttcctttgcaaatgctagtttagttgtgcaggagaaaaagaattataaatccgttttggttggataagaaaagaaattagtttggttctttatcatggttcagaagaaaatgcagtggtgcttgcgggcaacgttgggcagctgtttgcctgatacatgtactctgtaaggatggtgaaggtgccaaaaataaggtcatgtcactgcttttcgccaactatttgttggtgctaactgggaagtggtatcatacaggctgagaaactgtgttttagctcttgtcgccggtggtttccgagagccccctttttttaaggggaacagtggtctctttaccggtttttagatatcaagatagcaacaatgttgaagttgggctgtaagttcttaggttgagaaggtatgatagctgagctttttttttttcaatttacatgtggggtatattgtatctgagacaggtttttttcctgcttgccgtccagattataaccttggttgggcctgtttagtaatttgttcggaagcggttcatgttttcaattctattgctcgatgtctgcagagatcgcctattacatgcaaaatttatttccaaattttaggttacattagctttgttaagtcaaccatttgtaattttggcaagtcataatgcatgtggtatcacaacatttcatggaagatttaaagaagc

SEQ ID NO: 216056 - DNA, 6090 bp, Zea Mays
cccagtcccagtcccaccaccagggcagcacgctctcctccctccggcctccgcccactggatccgagacccacgcgcaaaactcgggccgggaaaaactcgccaggaaagagaacgctcggaagggaaacacaggctcgggctcgagacgaaaccctaaccctacctccgcttgcctcgacgtccctcctcgccggaggcctcccccggagacgcagcctccgctgagggctccggcggcgatgcgcccctcccagttggaggcgttatgagcggggaaatggcgcgcgccgaggccttgccagagggggaggcccccgggttcggtgtcgacctgtatgcgcaagccaccaaggctgtgtccctgcggacgccgttcgagggcgatgaggcggcgcccagggttcccacgctgcccgcgcggctcgtcagctgggcagggccaggggacgcccggaagaagcacaagaagattctgcctccccctcctgatgatgctgctccggagcctccaccacagtcacctgtagtcacccctgcgaaggttggcttgtgggaccagtttgaggcgtatttccgtcccgtaacactggctgacgtcgaaatgttaagaccaaagctcccatttggctacagcaaggttgactcatgtatgctagtaccatttctgggcagtggcaatgagtcaacaacccaagctgagacatatgacgtggctgtggctgaaacaaccttgtatttgggtgttggtggtgaagaagtggtcactaatcgggagcgcggcgtgcaaagtgtgcatctggctagtcagaaagagaggaatgatcaaagcattgaacatgacatacatgatgtggttgtgcaacagatggtcagcgacaaagagcttaataggcacagaggggtacagggcatacacgaagtttctattcagttgggagggagatcatctggagtggatcaagctgggagcagtagtggcattgttttaggacaatttgtcaatgaggaaggaacttcacttaattggctgctaggagcaacaggccggtttgttctcacttcagagcgacccaacaagaagagaaagcttctgggtgtcgatgctgggttagagcagcttgttctgcttccacgcgtaggggctgaggcatctgcaagctgtgatgtttgttgtcttggagaaagttccatggagtccaataggatagttaactgcagcaactgcaaggtgtcagtgcaccagaagtgttatggtttgcatgctgtgcctgatgggcaatggttgtgtgcttggtgtacatatctagagtctacagggtggtcattgaaggaagatgctggtaacacccagtcgatgccttgtgctttatgcccaaaggagaaaggagctcttaaacctgttaaagtggagtctactcgaaatgagggtattggccaccaaaaatttgtgcacttgtactgtagtctctgggcaccagaggtttttgttgaggacatggagtcaatggaacctgtacttagccttgaaaatgtccaagagaatcggatgaagttgacgtgcagtatctgcaagattaagcatggtgcatgtgtccgatgtagtcatgggacgtgtcggacgccctttcaccctatatgtgcaagagagtcaaagcatcaaatggagatatgggggaaatccaggcaccctaatgttgagttgagagcattttgctcaaagcattctgcagttgaatacgccagttctgtagataccagtaaccttgcatctgaacagaatcctagaaaatctggcccatacaataccaccctcaattctgggaaaattccagtaattaggttcacacgcaaaaacaaggacaaattcatcagttgtggaaccagtgcctctagttctggtaacctgatcagagtcaagacaatagagcaagatgctttagctaacacagttagaaatgcaaattctcaacctattcgaatatgggaaacaggtactggtcatccctctgttagtggtgatcatatcagaagttctggtgatattgctgtagtgcttagaaagctaattgacagtggaaaagttagtgttagtgatgtagcatctgaagtcggtatttcttcggaatccttggaagctgctcttgtgggtgaaactaccacgttttcccatggtttgacgctgaaaattatcaagtggctccaaaattctgtgcatatgcatgatgatgacaagggtgtacttgttgatgtgccggatttcgctgtaactgaacctgcacgaacaagatctaaaagcaacagcaagatactgaaagaaaataatgcaacatgcgcaacaggtgtgactattgtgcaaaatggagaaaagaacatggttaaagaagattctaatcccgagtgtgctgctaaagaatttgcaaacgaatctactcaggggttttctccaagcagcagcaaggatgttttaaaggacgaacatggaatattgatactgaacgacacctctggaaacaaagaatctggtacctccacacagataccaaatgaaaagcaaggtgcattacttggaagaaaaaataatgacttaactgaggtcgaactgggtccatgcttagagaaaggagtaccttcacatggccattgttttgttcagggtgataatggtgtagatggggtaggttcagttgaaaatagcttcaacacttcaaattgctctcatggacaaccttttttcaactttgatgattcacattcttatattcacccattcattaagaaaaaggtatctcatcattgggacattactttcaatcagaataaggaaactctgaatcactatatacaagagtcatcatatccttcacatgagaaaataccaactgattccttggtagaagtagagagtacagcagatacaaccgtgacagatcaagttttgaaagcaaggtcttcaaaaattcttgagcattcacctgatgatgaagttgaaggagagatggtgtacttacaatctaggctgcttgacaatgctgttgttctgaagcacagatatgaaaaattgatagcaaaggttgtccaaaatctttgtcgcgagctggatgctttcagtaaaagaaaatgggatcttatctttgtgaatcagtttcttcgtgatgttagagaagctaaaaaacgtgggagaaaagaaaagagacataaggaagcccaagctgtactagctgcagctgcagctgctattgcatcctcctcacggaactcaactgtgagaaaagatgcaaaggagaatgcaccagagagttctccaaaacttgttgctggatcttcaagggttggtcaacggactttttcattgccacggattaatgattcatcaaagtcatccaacaacaaagtatcatcagataacaaatttggaagttttcatatgccaatttcttcaaaagaaaatgggctatactgtgatgtatgcatgcgaactgaaactctgttgaaccgaatatttgtctgctccagatgcaaggctgctgtgcacatagattgctacagaaatctggaaaattctattgggccctggaactgcgaactttgtgaagatgaagacatttcatcagaagctacaagtacaaccgttagtgataaatcacattgtaatggcaagttaccctttgcacagtgtggcatgtgccatggcacatcaggtgcttttagaaagactgtagatgggaagtgggttcatgctttctgtgctgagtggttgttggataccaagtatgtaaggggacaagatagccctgtagaaggaatggaaaaccttgtagagggaaaagacacttgttgtctctgcctctgcaatgttggcatgtgcttaaggtgtagtagtggggattgcaacattactttccatcctacttgcgctagaagttctggtttatacatgaacacgaaagggtttggtactacatcacagcacaaagcatactgtgacaaacacagcgtagaacagaaagaggctgatgcacagcaatatggacctgaggagctcaggagcatgaaacgaatgaggtatcagatgcaagagctcattactcactgccacttatgaagagatcagtctgaaaccaacaaattatctttagctaccttgtgaaaactctgtggtttgcttgtatcattcgagttagctatttacagttttgggaatacattatgctgccacagcacttcatggggcagaactcatcagtcattattcatagaggaaacaatatatttaggaattgtttttcttatgcaaccaaccttgtgcattcctgacttcccgtactcatgttccatgcagtacatgtttatttggatgttattgaataccgagtgaagctgcacatagtatccttttagactatcctcctgactccgtcccatggttttgagaagctcaacttacgttgaattggagaaactacgcctgttgtgtgagagaataattaagagagagaaggtgaagagagagacggttatgtgtgatcatgatatacttgccaaaacaaaggacactgttattttctcctaccttgcgtgtggagcaagctcagaatctgcaactacttcagttaataacaggtcgtacatgcaaagatctgatgatgtcacagtagatagtactatttctgggaagaagaccataagattttctctgaaaaacagagatgttgatagaaacacagctgacagctcaagaacattgatatcattcaaacgcaagttgagtgagaggggaccacgagctggtaagcaacttccacagaggccaactattgcagcagagaaactggaagatgaagacaagaagacaactgataagaagagagaaatgtttcaaaaagagctcgttatgacattagatcaagcttctacacagaatcaacgtcttcctaagggatatgcttatgttcctcgggattccttatcaaaagagaagctatggaatcgaaatacacagccacttaatccgcaggagcctggtggataggatcagttgaaatcaagtcggttcatttctctcgaggaaggtcatgagaaacttgtgcaggcatgttctttgcaactgaaaacgacaagcggcaagcaggggctggccagtgctattgccgcaagggttacagccaatccgtgatcttttttggacccaagttgcataatggtgcagactgaggtattcgtgtgaatgtatggtgtggcaccataacaagaaggctgcccccacccaggtaacgcgaatgatcagcaatatgggtgaattgacctacttgtgctataccaaagacagcgtgccaactgtatatatgagttttattagtgtgcagatttcataaaattgccctgtacattctttcctttgcaaatgctagtttagttgtgcaggagaaaaagaattataaatccgttttggttggataagaaaagaaattagtttggttctttatcatggttcagaagaaaatgcagtggtgcttgcgggcaacgttgggcagctgtttgcctgatacatgtactctgtaaggatggtgaaggtgccaaaaataaggtcatgtcactgcttttcgccaactatttgttggtgctaactgggaagtggtatcatacaggctgagaaactgtgttttagctcttgtcgccggtggtttccgagagccccctttttttaaggggaacagtggtctctttaccggtttttagatatcaagatagcaacaatgttgaagttgggctgtaagttcttaggttgagaaggtatgatagctgagctttttttttttcaatttacatgtggggtatattgtatctgagacaggtttttttcctgcttgccgtccagattataaccttggttgggcctgtttagtaatttgttcggaagcggttcatgttttcaattctattgctcgatgtctgcagagatcgcctattacatgcaaaatttatttccaaattttaggttacattagctttgttaagtcaaccatttgtaattttggcaagtcataatgcatgtggtatcacaacatttcatggaagatttaaagaagc

SEQ ID NO: 216057 - DNA, 5895 bp, Zea Mays
agccagccaggcaaggcaagtgagcacggactgcacggtgcagttaactttacaaaactgaagccgtgacctgtgatgtgacctccctcccggtcccagtcccagtcccaccaccagggcagcacgctctcctccctccggcctccgcccactggatccgagacccacgcgcaaaactcgggccgggaaaaactcgccaggaaagagaacgctcggaagggaaacacaggctcgggctcgagacgaaaccctaaccctacctccgcttgcctcgacgtccctcctcgccggaggcctcccccggagacgcagcctccgctgagggctccggcggcgatgcgcccctcccagttggaggcgttatgagcggggaaatggcgcgcgccgaggccttgccagagggggaggcccccgggttcggtgtcgacctgtatgcgcaagccaccaaggctgtgtccctgcggacgccgttcgagggcgatgaggcggcgcccagggttcccacgctgcccgcgcggctcgtcagctgggcagggccaggggacgcccggaagaagcacaagaagattctgcctccccctcctgatgatgctgctccggagcctccaccacagtcacctgtagtcacccctgcgaaggttggcttgtgggaccagtttgaggcgtatttccgtcccgtaacactggctgacgtcgaaatgttaagaccaaagctcccatttggctacagcaaggttgactcatgtatgctagtaccatttctgggcagtggcaatgagtcaacaacccaagctgagacatatgacgtggctgtggctgaaacaaccttgtatttgggtgttggtggtgaagaagtggtcactaatcgggagcgcggcgtgcaaagtgtgcatctggctagtcagaaagagaggaatgatcaaagcattgaacatgacatacatgatgtggttgtgcaacagatggtcagcgacaaagagcttaataggcacagaggggtacagggcatacacgaagtttctattcagttgggagggagatcatctggagtggatcaagctgggagcagtagtggcattgttttaggacaatttgtcaatgaggaaggaacttcacttaattggctgctaggagcaacaggccggtttgttctcacttcagagcgacccaacaagaagagaaagcttctgggtgtcgatgctgggttagagcagcttgttctgcttccacgcgtaggggctgaggcatctgcaagctgtgatgtttgttgtcttggagaaagttccatggagtccaataggatagttaactgcagcaactgcaaggtgtcagtgcaccagaagtgttatggtttgcatgctgtgcctgatgggcaatggttgtgtgcttggtgtacatatctagagtctacagggtggtcattgaaggaagatgctggtaacacccagtcgatgccttgtgctttatgcccaaaggagaaaggagctcttaaacctgttaaagtggagtctactcgaaatgagggtattggccaccaaaaatttgtgcacttgtactgtagtctctgggcaccagaggtttttgttgaggacatggagtcaatggaacctgtacttagccttgaaaatgtccaagagaatcggatgaagttgacgtgcagtatctgcaagattaagcatggtgcatgtgtccgatgtagtcatgggacgtgtcggacgccctttcaccctatatgtgcaagagagtcaaagcatcaaatggagatatgggggaaatccaggcaccctaatgttgagttgagagcattttgctcaaagcattctgcagttgaatacgccagttctgtagataccagtaaccttgcatctgaacagaatcctagaaaatctggcccatacaataccaccctcaattctgggaaaattccagtaattaggttcacacgcaaaaacaaggacaaattcatcagttgtggaaccagtgcctctagttctggtaacctgatcagagtcaagacaatagagcaagatgctttagctaacacagttagaaatgcaaattctcaacctattcgaatatgggaaacaggtactggtcatccctctgttagtggtgatcatatcagaagttctggtgatattgctgtagtgcttagaaagctaattgacagtggaaaagttagtgttagtgatgtagcatctgaagtcggtatttcttcggaatccttggaagctgctcttgtgggtgaaactaccacgttttcccatggtttgacgctgaaaattatcaagtggctccaaaattctgtgcatatgcatggcgctcaaggaaatgtttgtaaagggagctcaggggtggtgcaagataacaaatcagatggattggacaccacagatactgttgatgtgaaaaatgcattggtcctagatgatgacaagggtgtacttgttgatgtgccggatttcgctgtaactgaacctgcacgaacaagatctaaaagcaacagcaagatactgaaagaaaataatgcaacatgcgcaacaggtgtgactattgtgcaaaatggagaaaagaacatggttaaagaagattctaatcccgagtgtgctgctaaagaatttgcaaacgaatctactcaggggttttctccaagcagcagcaaggatgttttaaaggacgaacatggaatattgatactgaacgacacctctggaaacaaagaatctggtacctccacacagataccaaatgaaaagcaaggtgcattacttggaagaaaaaataatgacttaactgaggtcgaactgggtccatgcttagagaaaggagtaccttcacatggccattgttttgttcagggtgataatggtgtagatggggtaggttcagttgaaaatagcttcaacacttcaaattgctctcatggacaaccttttttcaactttgatgattcacattcttatattcacccattcattaagaaaaaggtatctcatcattgggacattactttcaatcagaataaggaaactctgaatcactatatacaagagtcatcatatccttcacatgagaaaataccaactgattccttggtagaagtagagagtacagcagatacaaccgtgacagatcaagttttgaaagcaaggtcttcaaaaattcttgagcattcacctgatgatgaagttgaaggagagatggtgtacttacaatctaggctgcttgacaatgctgttgttctgaagcacagatatgaaaaattgatagcaaaggttgtccaaaatctttgtcgcgagctggatgctttcagtaaaagaaaatgggatcttatctttgtgaatcagtttcttcgtgatgttagagaagctaaaaaacgtgggagaaaagaaaagagacataaggaagcccaagctgtactagctgcagctgcagctgctattgcatcctcctcacggaactcaactgtgagaaaagatgcaaaggagaatgcaccagagagttctccaaaacttgttgctggatcttcaagggttggtcaacggactttttcattgccacggattaatgattcatcaaagtcatccaacaacaaagtatcatcagataacaaatttggaagttttcatatgccaatttcttcaaaagaaaatgggctatactgtgatgtatgcatgcgaactgaaactctgttgaaccgaatatttgtctgctccagatgcaagattgctacagaaatctggaaaattctattgggccctggaactgcgaactttgtgaagatgaagacatttcatcagaagctacaagtacaaccgttagtgataaatcacattgtaatggcaagttaccctttgcacagtgtggcatgtgccatggcacatcaggtgcttttagaaagactgtagatgggaagtgggttcatgctttctgtgctgagtggttgttggataccaagtatgtaaggggacaagatagccctgtagaaggaatggaaaaccttgtagagggaaaagacacttgttgtctctgcctctgcaatgttggcatgtgcttaaggtgtagtagtggggattgcaacattactttccatcctacttgcgctagaagttctggtttatacatgaacacgaaagggtttggtactacatcacagcacaaagcatactgtgacaaacacagcgtagaacagaaagaggctgatgcacagcaatatggacctgaggagctcaggagcatgaaacgaatgagggttgaattggagaaactacgcctgttgtgtgagagaataattaagagagagaaggtgaagagagagacggttatgtgtgatcatgatatacttgccaaaacaaaggacactgttattttctcctaccttgcgtgtggagcaagctcagaatctgcaactacttcagttaataacaggtcgtacatgcaaagatctgatgatgtcacagtagatagtactatttctgggaagaagaccataagattttctctgaaaaacagagatgttgatagaaacacagctgacagctcaagaacattgatatcattcaaacgcaagttgagtgagaggggaccacgagctggtaagcaacttccacagaggccaactattgcagcagagaaactggaagatgaagacaagaagacaactgataagaagagagaaatgtttcaaaaagagctcgttatgacattagatcaagcttctacacagaatcaacgtcttcctaagggatatgcttatgttcctcgggattccttatcaaaagagaagctatggaatcgaaatacacagccacttaatccgcaggagcctggtggataggatcagttgaaatcaagtcggttcatttctctcgaggaaggtcatgagaaacttgtgcaggcatgttctttgcaactgaaaacgacaagcggcaagcaggggctggccagtgctattgccgcaagggttacagccaatccgtgatcttttttggacccaagttgcataatggtgcagactgaggtattcgtgtgaatgtatggtgtggcaccataacaagaaggctgcccccacccaggtaacgcgaatgatcagcaatatgggtgaattgacctacttgtgctataccaaagacagcgtgccaactgtatatatgagttttattagtgtgcagatttcataaaattgccctgtacattctttcctttgcaaatgctagtttagttgtgcaggagaaaaagaattataaatccgttttggttggataagaaaagaaattagtttggttctttatcatggttcagaagaaaatgcagtggtgcttgcgggcaacgttgggcagctgtttgcctgatacatgtactctgtaaggatggtgaaggtgccaaaaataaggtcatgtcactgcttttcgccaactatttgttggtgctaactgggaagtggtatcatacaggctgagaaactgtgttttagctcttgtcgccggtggtttccgagagccccctttttttaaggggaacagtggtctctttaccggtttttagatatcaagatagcaacaatgttgaagttgggctgtaagttcttaggttgagaaggtatgatagctgagctttttttttttcaatttacatgtggggtatattgtatctgagacaggtttttttcctgcttgccgtccagattataaccttggttgggcctgtttagtaatttgttcggaagcggttcatgttttcaattctattgctcgatgtctgcagagatcgcctattacatgcaaaatttatttccaaattttaggttacattagctttgttaagtcaaccatttgtaattttggcaagtcataatgcatgtggtatcacaacatttcatggaagatttaaagaagc

SEQ ID NO: 216058 - DNA, 4019 bp, Zea Mays
cccaccaccagggcagcacgctctcctccctccggcctccgcccactggatccgagacccacgcgcaaaactcgggccgggaaaaactcgccaggaaagagaacgctcggaagggaaacacaggctcgggctcgagacgaaaccctaaccctacctccgcttgcctcgacgtccctcctcgccggaggcctcccccggagacgcagcctccgctgagggctccggcggcgatgcgcccctcccagttggaggcgttatgagcggggaaatggcgcgcgccgaggccttgccagagggggaggcccccgggttcggtgtcgacctgtatgcgcaagccaccaaggctgtgtccctgcggacgccgttcgagggcgatgaggcggcgcccagggttcccacgctgcccgcgcggctcgtcagctgggcagggccaggggacgcccggaagaagcacaagaagattctgcctccccctcctgatgatgctgctccggagcctccaccacagtcacctgtagtcacccctgcgaaggttggcttgtgggaccagtttgaggcgtatttccgtcccgtaacactggctgacgtcgaaatgttaagaccaaagctcccatttggctacagcaaggttgactcatgtatgctagtaccatttctgggcagtggcaatgagtcaacaacccaagctgagacatatgacgtggctgtggctgaaacaaccttgtatttgggtgttggtggtgaagaagtggtcactaatcgggagcgcggcgtgcaaagtgtgcatctggctagtcagaaagagaggaatgatcaaagcattgaacatgacatacatgatgtggttgtgcaacagatggtcagcgacaaagagcttaataggcacagaggggtacagggcatacacgaagtttctattcagttgggagggagatcatctggagtggatcaagctgggagcagtagtggcattgttttaggacaatttgtcaatgaggaaggaacttcacttaattggctgctaggagcaacaggccggtttgttctcacttcagagcgacccaacaagaagagaaagcttctgggtgtcgatgctgggttagagcagcttgttctgcttccacgcgtaggggctgaggcatctgcaagctgtgatgtttgttgtcttggagaaagttccatggagtccaataggatagttaactgcagcaactgcaaggtgtcagtgcaccagaagtgttatggtttgcatgctgtgcctgatgggcaatggttgtgtgcttggtgtacatatctagagtctacagggtggtcattgaaggaagatgctggtaacacccagtcgatgccttgtgctttatgcccaaaggagaaaggagctcttaaacctgttaaagtggagtctactcgaaatgagggtattggccaccaaaaatttgtgcacttgtactgtagtctctgggcaccagaggtttttgttgaggacatggagtcaatggaacctgtacttagccttgaaaatgtccaagagaatcggatgaagttgacgtgcagtatctgcaagattaagcatggtgcatgtgtccgatgtagtcatgggacgtgtcggacgccctttcaccctatatgtgcaagagagtcaaagcatcaaatggagatatgggggaaatccaggcaccctaatgttgagttgagagcattttgctcaaagcattctgcagttgaatacgccagttctgtagataccagtaaccttgcatctgaacagaatcctagaaaatctggcccatacaataccaccctcaattctgggaaaattccagtaattaggttcacacgcaaaaacaaggacaaattcatcagttgtggaaccagtgcctctagttctggtaacctgatcagagtcaagacaatagagcaagatgctttagctaacacagttagaaatgcaaattctcaacctattcgaatatgggaaacaggtactggtcatccctctgttagtggtgatcatatcagaagttctggtgatattgctgtagtgcttagaaagctaattgacagtggaaaagttagtgttagtgatgtagcatctgaagtcggtatttcttcggaatccttggaagctgctcttgtgggtgaaactaccacgttttcccatggtttgacgctgaaaattatcaagtggctccaaaattctgtgcatatgcatggcgctcaaggaaatgtttgtaaagggagctcaggggtggtgcaagataacaaatcagatggattggacaccacagatactgttgatgtgaaaaatgcattggtcctagatgatgacaagggtgtacttgttgatgtgccggatttcgctgtaactgaacctgcacgaacaagatctaaaagcaacagcaagatactgaaagaaaataatgcaacatgcgcaacaggtgtgactattgtgcaaaatggagaaaagaacatggttaaagaagattctaatcccgagtgtgctgctaaagaatttgcaaacgaatctactcaggggttttctccaagcagcagcaaggatgttttaaaggacgaacatggaatattgatactgaacgacacctctggaaacaaagaatctggtacctccacacagataccaaatgaaaagcaagctttgatgattcacattcttatattcacccattcattaagaaaaaggtatctcatcattgggacattactttcaatcagaataaggaaactctgaatcactatatacaagagtcatcatatccttcacatgagaaaataccaactgattccttggtagaagtagagagtacagcagatacaaccgtgacagatcaagttttgaaagcaaggtcttcaaaaattcttgagcattcacctgatgatgaagttgaaggagagatggtgtacttacaatctaggctgcttgacaatgctgttgttctgaagcacagatatgaaaaattgatagcaaaggttgtccaaaatctttgtcgcgagctggatgctttcagtaaaagaaaatgggatcttatctttgtgaatcagtttcttcgtgatgttagagaagctaaaaaacgtgggagaaaagaaaagagacataaggaagcccaagctgtactagctgcagctgcagctgctattgcatcctcctcacggaactcaactgtgagaaaagatgcaaaggagaatgcaccagagagttctccaaaacttgttgctggatcttcaagggttggtcaacggactttttcattgccacggattaatgattcatcaaagtcatccaacaacaaagtatcatcagataacaaatttggaagttttcatatgccaatttcttcaaaagaaaatgggctatactgtgatgtatgcatgcgaactgaaactctgttgaaccgaatatttgtctgctccagatgcaaggctgctgtgcacatagattgctacagaaatctggaaaattctattgggccctggaactgcgaactttgtgaagatgaagacatttcatcagaagctacaagtacaaccgttagtgataaatcacattgtaatggcaagttaccctttgcacagtgtggcatgtgccatggcacatcaggtgcttttagaaagactgtagatgggaagtgggttcatgctttctgtgctgagtggttgttggataccaagtatgtaaggggacaagatagccctgtagaaggaatggaaaaccttgtagagggaaaagacacttgttgtctctgcctctgcaatgttggcatgtgcttaaggtgtagtagtggggattgcaacattactttccatcctacttgcgctagaagttctggtttatacatgaacacgaaagggtttggtactacatcacagcacaaagcatactgtgacaaacacagcgtagaacagaaagaggctgatgcacagcaatatggacctgaggagctcaggagcatgaaacgaatgaggtacatgtttatttggatgttattgaataccgagtgaag

SEQ ID NO: 216059 - DNA, 4104 bp, Zea Mays
gtcccaccaccagggcagcacgctctcctccctccggcctccgcccactggatccgagacccacgcgcaaaactcgggccgggaaaaactcgccaggaaagagaacgctcggaagggaaacacaggctcgggctcgagacgaaaccctaaccctacctccgcttgcctcgacgtccctcctcgccggaggcctcccccggagacgcagcctccgctgagggctccggcggcgatgcgcccctcccagttggaggcgttatgagcggggaaatggcgcgcgccgaggccttgccagagggggaggcccccgggttcggtgtcgacctgtatgcgcaagccaccaaggctgtgtccctgcggacgccgttcgagggcgatgaggcggcgcccagggttcccacgctgcccgcgcggctcgtcagctgggcagggccaggggacgcccggaagaagcacaagaagattctgcctccccctcctgatgatgctgctccggagcctccaccacagtcacctgtagtcacccctgcgaaggttggcttgtgggaccagtttgaggcgtatttccgtcccgtaacactggctgacgtcgaaatgttaagaccaaagctcccatttggctacagcaaggttgactcatgtatgctagtaccatttctgggcagtggcaatgagtcaacaacccaagctgagacatatgacgtggctgtggctgaaacaaccttgtatttgggtgttggtggtgaagaagtggtcactaatcgggagcgcggcgtgcaaagtgtgcatctggctagtcagaaagagaggaatgatcaaagcattgaacatgacatacatgatgtggttgtgcaacagatggtcagcgacaaagagcttaataggcacagaggggtacagggcatacacgaagtttctattcagttgggagggagatcatctggagtggatcaagctgggagcagtagtggcattgttttaggacaatttgtcaatgaggaaggaacttcacttaattggctgctaggagcaacaggccggtttgttctcacttcagagcgacccaacaagaagagaaagcttctgggtgtcgatgctgggttagagcagcttgttctgcttccacgcgtaggggctgaggcatctgcaagctgtgatgtttgttgtcttggagaaagttccatggagtccaataggatagttaactgcagcaactgcaaggtgtcagtgcaccagaagtgttatggtttgcatgctgtgcctgatgggcaatggttgtgtgcttggtgtacatatctagagtctacagggtggtcattgaaggaagatgctggtaacacccagtcgatgccttgtgctttatgcccaaaggagaaaggagctcttaaacctgttaaagtggagtctactcgaaatgagggtattggccaccaaaaatttgtgcacttgtactgtagtctctgggcaccagaggtttttgttgaggacatggagtcaatggaacctgtacttagccttgaaaatgtccaagagaatcggatgaagttgacgtgcagtatctgcaagattaagcatggtgcatgtgtccgatgtagtcatgggacgtgtcggacgccctttcaccctatatgtgcaagagagtcaaagcatcaaatggagatatgggggaaatccaggcaccctaatgttgagttgagagcattttgctcaaagcattctgcagttgaatacgccagttctgtagataccagtaaccttgcatctgaacagaatcctagaaaatctggcccatacaataccaccctcaattctgggaaaattccagtaattaggttcacacgcaaaaacaaggacaaattcatcagttgtggaaccagtgcctctagttctggtaacctgatcagagtcaagacaatagagcaagatgctttagctaacacagttagaaatgcaaattctcaacctattcgaatatgggaaacaggtactggtcatccctctgttagtggtgatcatatcagaagttctggtgatattgctgtagtgcttagaaagctaattgacagtggaaaagttagtgttagtgatgtagcatctgaagtcggtatttcttcggaatccttggaagctgctcttgtgggtgaaactaccacgttttcccatggtttgacgctgaaaattatcaagtggctccaaaattctgtgcatatgcatggcgctcaaggaaatgtttgtaaagggagctcaggggtggtgcaagataacaaatcagatggattggacaccacagatactgttgatgtgaaaaatgcattggtcctagatgatgacaagggtgtacttgttgatgtgccggatttcgctgtaactgaacctgcacgaacaagatctaaaagcaacagcaagatactgaaagaaaataatgcaacatgcgcaacaggtgtgactattgtgcaaaatggagaaaagaacatggttaaagaagattctaatcccgagtgtgctgctaaagaatttgcaaacgaatctactcaggggttttctccaagcagcagcaaggatgttttaaaggacgaacatggaatattgatactgaacgacacctctggaaacaaagaatctggtacctccacacagataccaaatgaaaagcaagggtgataatggtgtagatggggtaggttcagttgaaaatagcttcaacacttcaaattgctctcatggacaaccttttttcaactttgatgattcacattcttatattcacccattcattaagaaaaaggtatctcatcattgggacattactttcaatcagaataaggaaactctgaatcactatatacaagagtcatcatatccttcacatgagaaaataccaactgattccttggtagaagtagagagtacagcagatacaaccgtgacagatcaagttttgaaagcaaggtcttcaaaaattcttgagcattcacctgatgatgaagttgaaggagagatggtgtacttacaatctaggctgcttgacaatgctgttgttctgaagcacagatatgaaaaattgatagcaaaggttgtccaaaatctttgtcgcgagctggatgctttcagtaaaagaaaatgggatcttatctttgtgaatcagtttcttcgtgatgttagagaagctaaaaaacgtgggagaaaagaaaagagacataaggaagcccaagctgtactagctgcagctgcagctgctattgcatcctcctcacggaactcaactgtgagaaaagatgcaaaggagaatgcaccagagagttctccaaaacttgttgctggatcttcaagggttggtcaacggactttttcattgccacggattaatgattcatcaaagtcatccaacaacaaagtatcatcagataacaaatttggaagttttcatatgccaatttcttcaaaagaaaatgggctatactgtgatgtatgcatgcgaactgaaactctgttgaaccgaatatttgtctgctccagatgcaaggctgctgtgcacatagattgctacagaaatctggaaaattctattgggccctggaactgcgaactttgtgaagatgaagacatttcatcagaagctacaagtacaaccgttagtgataaatcacattgtaatggcaagttaccctttgcacagtgtggcatgtgccatggcacatcaggtgcttttagaaagactgtagatgggaagtgggttcatgctttctgtgctgagtggttgttggataccaagtatgtaaggggacaagatagccctgtagaaggaatggaaaaccttgtagagggaaaagacacttgttgtctctgcctctgcaatgttggcatgtgcttaaggtgtagtagtggggattgcaacattactttccatcctacttgcgctagaagttctggtttatacatgaacacgaaagggtttggtactacatcacagcacaaagcatactgtgacaaacacagcgtagaacagaaagaggctgatgcacagcaatatggacctgaggagctcaggagcatgaaacgaatgaggtacatgtttatttggatgttattgaataccgagtgaag

SEQ ID NO: 216060 - DNA, 4262 bp, Zea Mays
agtcccagtcccaccaccagggcagcacgctctcctccctccggcctccgcccactggatccgagacccacgcgcaaaactcgggccgggaaaaactcgccaggaaagagaacgctcggaagggaaacacaggctcgggctcgagacgaaaccctaaccctacctccgcttgcctcgacgtccctcctcgccggaggcctcccccggagacgcagcctccgctgagggctccggcggcgatgcgcccctcccagttggaggcgttatgagcggggaaatggcgcgcgccgaggccttgccagagggggaggcccccgggttcggtgtcgacctgtatgcgcaagccaccaaggctgtgtccctgcggacgccgttcgagggcgatgaggcggcgcccagggttcccacgctgcccgcgcggctcgtcagctgggcagggccaggggacgcccggaagaagcacaagaagattctgcctccccctcctgatgatgctgctccggagcctccaccacagtcacctgtagtcacccctgcgaaggttggcttgtgggaccagtttgaggcgtatttccgtcccgtaacactggctgacgtcgaaatgttaagaccaaagctcccatttggctacagcaaggttgactcatgtatgctagtaccatttctgggcagtggcaatgagtcaacaacccaagctgagacatatgacgtggctgtggctgaaacaaccttgtatttgggtgttggtggtgaagaagtggtcactaatcgggagcgcggcgtgcaaagtgtgcatctggctagtcagaaagagaggaatgatcaaagcattgaacatgacatacatgatgtggttgtgcaacagatggtcagcgacaaagagcttaataggcacagaggggtacagggcatacacgaagtttctattcagttgggagggagatcatctggagtggatcaagctgggagcagtagtggcattgttttaggacaatttgtcaatgaggaaggaacttcacttaattggctgctaggagcaacaggccggtttgttctcacttcagagcgacccaacaagaagagaaagcttctgggtgtcgatgctgggttagagcagcttgttctgcttccacgcgtaggggctgaggcatctgcaagctgtgatgtttgttgtcttggagaaagttccatggagtccaataggatagttaactgcagcaactgcaaggtgtcagtgcaccagaagtgttatggtttgcatgctgtgcctgatgggcaatggttgtgtgcttggtgtacatatctagagtctacagggtggtcattgaaggaagatgctggtaacacccagtcgatgccttgtgctttatgcccaaaggagaaaggagctcttaaacctgttaaagtggagtctactcgaaatgagggtattggccaccaaaaatttgtgcacttgtactgtagtctctgggcaccagaggtttttgttgaggacatggagtcaatggaacctgtacttagccttgaaaatgtccaagagaatcggatgaagttgacgtgcagtatctgcaagattaagcatggtgcatgtgtccgatgtagtcatgggacgtgtcggacgccctttcaccctatatgtgcaagagagtcaaagcatcaaatggagatatgggggaaatccaggcaccctaatgttgagttgagagcattttgctcaaagcattctgcagttgaatacgccagttctgtagataccagtaaccttgcatctgaacagaatcctagaaaatctggcccatacaataccaccctcaattctgggaaaattccagtaattaggttcacacgcaaaaacaaggacaaattcatcagttgtggaaccagtgcctctagttctggtaacctgatcagagtcaagacaatagagcaagatgctttagctaacacagttagaaatgcaaattctcaacctattcgaatatgggaaacaggtactggtcatccctctgttagtggtgatcatatcagaagttctggtgatattgctgtagtgcttagaaagctaattgacagtggaaaagttagtgttagtgatgtagcatctgaagtcggtatttcttcggaatccttggaagctgctcttgtgggtgaaactaccacgttttcccatggtttgacgctgaaaattatcaagtggctccaaaattctgtgcatatgcatgatgatgacaagggtgtacttgttgatgtgccggatttcgctgtaactgaacctgcacgaacaagatctaaaagcaacagcaagatactgaaagaaaataatgcaacatgcgcaacaggtgtgactattgtgcaaaatggagaaaagaacatggttaaagaagattctaatcccgagtgtgctgctaaagaatttgcaaacgaatctactcaggggttttctccaagcagcagcaaggatgttttaaaggacgaacatggaatattgatactgaacgacacctctggaaacaaagaatctggtacctccacacagataccaaatgaaaagcaaggtgcattacttggaagaaaaaataatgacttaactgaggtcgaactgggtccatgcttagagaaaggagtaccttcacatggccattgttttgttcagggtgataatggtgtagatggggtaggttcagttgaaaatagcttcaacacttcaaattgctctcatggacaaccttttttcaactttgatgattcacattcttatattcacccattcattaagaaaaaggtatctcatcattgggacattactttcaatcagaataaggaaactctgaatcactatatacaagagtcatcatatccttcacatgagaaaataccaactgattccttggtagaagtagagagtacagcagatacaaccgtgacagatcaagttttgaaagcaaggtcttcaaaaattcttgagcattcacctgatgatgaagttgaaggagagatggtgtacttacaatctaggctgcttgacaatgctgttgttctgaagcacagatatgaaaaattgatagcaaaggttgtccaaaatctttgtcgcgagctggatgctttcagtaaaagaaaatgggatcttatctttgtgaatcagtttcttcgtgatgttagagaagctaaaaaacgtgggagaaaagaaaagagacataaggaagcccaagctgtactagctgcagctgcagctgctattgcatcctcctcacggaactcaactgtgagaaaagatgcaaaggagaatgcaccagagagttctccaaaacttgttgctggatcttcaagggttggtcaacggactttttcattgccacggattaatgattcatcaaagtcatccaacaacaaagtatcatcagataacaaatttggaagttttcatatgccaatttcttcaaaagaaaatgggctatactgtgatgtatgcatgcgaactgaaactctgttgaaccgaatatttgtctgctccagatgcaaggctgctgtgcacatagattgctacagaaatctggaaaattctattgggccctggaactgcgaactttgtgaagatgaagacatttcatcagaagctacaagtacaaccgttagtgataaatcacattgtaatggcaagttaccctttgcacagtgtggcatgtgccatggcacatcaggtgcttttagaaagactgtagatgggaagtgggttcatgctttctgtgctgagtggttgttggataccaagtatgtaaggggacaagatagccctgtagaaggaatggaaaaccttgtagagggaaaagacacttgttgtctctgcctctgcaatgttggcatgtgcttaaggtgtagtagtggggattgcaacattactttccatcctacttgcgctagaagttctggtttatacatgaacacgaaagggtttggtactacatcacagcacaaagcatactgtgacaaacacagcgtagaacagaaagaggctgatgcacagcaatatggacctgaggagctcaggagcatgaaacgaatgaggatgcaagagctcattactcactgccacttatgaagagatcagtctgaaaccaacaaattatctttagctaccttgtgaaaactctgtggtttgcttgtatcattcgagttagctatttacagttttgggaatacattatgctgccacagcacttcatggggcagaactcatcagtcattattcatagaggaaacaatat

SEQ ID NO: 216061 - DNA, 3832 bp, Zea Mays
cccagtcccagtcccaccaccagggcagcacgctctcctccctccggcctccgcccactggatccgagacccacgcgcaaaactcgggccgggaaaaactcgccaggaaagagaacgctcggaagggaaacacaggctcgggctcgagacgaaaccctaaccctacctccgcttgcctcgacgtccctcctcgccggaggcctcccccggagacgcagcctccgctgagggctccggcggcgatgcgcccctcccagttggaggcgttatgagcggggaaatggcgcgcgccgaggccttgccagagggggaggcccccgggttcggtgtcgacctgtatgcgcaagccaccaaggctgtgtccctgcggacgccgttcgagggcgatgaggcggcgcccagggttcccacgctgcccgcgcggctcgtcagctgggcagggccaggggacgcccggaagaagcacaagaagattctgcctccccctcctgatgatgctgctccggagcctccaccacagtcacctgtagtcacccctgcgaaggttggcttgtgggaccagtttgaggcgtatttccgtcccgtaacactggctgacgtcgaaatgttaagaccaaagctcccatttggctacagcaaggttgactcatgtatgctagtaccatttctgggcagtggcaatgagtcaacaacccaagctgagacatatgacgtggctgtggctgaaacaaccttgtatttgggtgttggtggtgaagaagtggtcactaatcgggagcgcggcgtgcaaagtgtgcatctggctagtcagaaagagaggaatgatcaaagcattgaacatgacatacatgatgtggttgtgcaacagatggtcagcgacaaagagcttaataggcacagaggggtacagggcatacacgaagtttctattcagttgggagggagatcatctggagtggatcaagctgggagcagtagtggcattgttttaggacaatttgtcaatgaggaaggaacttcacttaattggctgctaggagcaacaggccggtttgttctcacttcagagcgacccaacaagaagagaaagcttctgggtgtcgatgctgggttagagcagcttgttctgcttccacgcgtaggggctgaggcatctgcaagctgtgatgtttgttgtcttggagaaagttccatggagtccaataggatagttaactgcagcaactgcaaggtgtcagtgcaccagaagtgttatggtttgcatgctgtgcctgatgggcaatggttgtgtgcttggtgtacatatctagagtctacagggtggtcattgaaggaagatgctggtaacacccagtcgatgccttgtgctttatgcccaaaggagaaaggagctcttaaacctgttaaagtggagtctactcgaaatgagggtattggccaccaaaaatttgtgcacttgtactgtagtctctgggcaccagaggtttttgttgaggacatggagtcaatggaacctgtacttagccttgaaaatgtccaagagaatcggatgaagttgacgtgcagtatctgcaagattaagcatggtgcatgtgtccgatgtagtcatgggacgtgtcggacgccctttcaccctatatgtgcaagagagtcaaagcatcaaatggagatatgggggaaatccaggcaccctaatgttgagttgagagcattttgctcaaagcattctgcagttgaatacgccagttctgtagataccagtaaccttgcatctgaacagaatcctagaaaatctggcccatacaataccaccctcaattctgggaaaattccagtaattaggttcacacgcaaaaacaaggacaaattcatcagttgtggaaccagtgcctctagttctggtaacctgatcagagtcaagacaatagagcaagatgctttagctaacacagttagaaatgcaaattctcaacctattcgaatatgggaaacaggtactggtcatccctctgttagtggtgatcatatcagaagttctggtgatattgctgtagtgcttagaaagctaattgacagtggaaaagttagtgttagtgatgtagcatctgaagtcggtatttcttcggaatccttggaagctgctcttgtgggtgaaactaccacgttttcccatggtttgacgctgaaaattatcaagtggctccaaaattctgtgcatatgcatggcgctcaaggaaatgtttgtaaagggagctcaggggtggtgcaagataacaaatcagatggattggacaccacagatactgttgatgtgaaaaatgcattggtcctagatgatgacaagggtgtacttgttgatgtgccggatttcgctgtaactgaacctgcacgaacaagatctaaaagcaacagcaagatactgaaagaaaataatgcaacatgcgcaacaggtgtgactattgtgcaaaatggagaaaagaacatggttaaagaagattctaatcccgagtgtgctgctaaagaatttgcaaacgaatctactcaggggttttctccaagcagcagcaaggatgttttaaaggacgaacatggaatattgatactgaacgacacctctggaaacaaagaatctggtacctccacacagataccaaatgaaaagcaaggtgcattacttggaagaaaaaataatgacttaactgaggtcgaactgggtccatgcttagagaaaggagtaccttcacatggccattgttttgttcagggtgataatggtgtagatggggtaggttcagttgaaaatagcttcaacacttcaaattgctctcatggacaaccttttttcaactttgatgattcacattcttatattcacccattcattaagaaaaaggtatctcatcattgggacattactttcaatcagaataaggaaactctgaatcactatatacaagagtcatcatatccttcacatgagaaaataccaactgattccttggtagaagtagagagtacagcagatacaaccgtgacagatcaagttttgaaagcaaggtcttcaaaaattcttgagcattcacctgatgatgaagttgaaggagagatggtgtacttacaatctaggctgcttgacaatgctgttgttctgaagcacagatatgaaaaattgatagcaaaggttgtccaaaatctttgtcgcgagctggatgctttcagtaaaagaaaatgggatcttatctttgtgaatcagtttcttcgtgatgttagagaagctaaaaaacgtgggagaaaagaaaagagacataaggaagcccaagctgtactagctgcagctgcagctgctattgcatcctcctcacggaactcaactgtgagaaaagatgcaaaggagaatgcaccagagagttctccaaaacttgttgctggatcttcaagggttggtcaacggactttttcattgccacggattaatgattcatcaaagtcatccaacaacaaagtatcatcagataacaaatttggaagttttcatatgccaatttcttcaaaagaaaatgggctatactgtgatgtatgcatgcgaactgaaactctgttgaaccgaatatttgtctgctccagatgcaaggctgctgtgcacatagattgctacagaaatctggaaaattctattgggccctggaactgcgaactttgtgaagatgaagacatttcatcagaagctacaagtacaaccgttagtgataaatcacattgtaatggcaagttaccctttgcacagtgtggcatgtgccatggcacatcaggtcctataatgtttaaatatttc

SEQ ID NO: 216062 - DNA, 2891 bp, Zea Mays
ccccacgccgtctccaccccccatcaggcaccccccccgccccgccccgctcgtcgccatagagtttcatcgcctcgctcgcgtcgccaactacatccgctcgaaccgcgtccttacatgccatgcccaccatcctcgctcgctccaaccatgtatctacatgtcgcctccgacatccacgcccatgcttcgtgtagtgcttgacgcgcccgctccaaccgcgtctatgcatgccgtgactgccatcctcgccacccgcatgcctcatctgcatcctccgtttatcgtacttatccgcggtataccttccctcatcgttcagtccgcgctcactctgccccacgatccgcttctcccccgcgcccctcggcaagctcgcagtccaggatccgattctcgcgtcgccctcccgccgcgcccctcggcaagctcgcaatccaggatccgattctcgcgtcgccctcccgccgcgcccctcggcatctcaactacctcgtgatgcctcccccacccccgatctataaaccagccgctcgccactcctcccgtactctcgcccccgacctcatggaaggatccgcctctcgcgcgcccccgccgacgcacgcaactcgcagacggcgcccccccagatccacttctcgctggccgctcagatcctccatatcctgacctctccctcctcttgctgcagatgatatgctagagcgtcagcaaggcggactctccaaacctccagagagggagggaggcagcagccaatgcccagcacgtaccaatctgcgtggcgggaggtgcccggactgcgtacccacgggcgagcaggattttgacgatccacgacccgatgaagtcgccggcgtcggtgacgcacaaggcggcagtggccatcgtgcgctgacgcccagtcccttcctctcgcgagcgaaacggggggcggtggtgccgccgggcgaatggattcgtccgagagcgagcaaataggggtaagcatttatcaagcggaagtgggaagaaatggtacagtgaagtggaggaaatgacacagaacacgagcgaagctggcatctcaaggcggtcgcactcgcacggttagcagtgcactcccctaatttctgccctttttatggtttcacgattatctgaatatggagttcaaggattgatcttttctgagttctttgttgccatatttttctgtccatgtaataaggttgtgggtaaaatattgtgtcaatcgggcttgtgtgttgcagttctattcttgtgtagtgcagctccgaagtcgctgctaccaggtgcccccgtgctggggcataggtgcagtcgccgctgcgcccagcctacacaaaggcagctaccgttgcgacaacgagagggagctcccaaggcaccaatgttgttgctgccagttcttcaaagagttattgatggttcacaaaagaccactgttgctctgccaattcacaaagccttgatgattgttatgatggaaccaatgttgaggcctacaacaatgatgtcattgttcccatgggacctcaatctccaaaaaaccaagaggccgtgggaagaggaatgtgacaatgagaaggttcagttaaagactattggtacattttatcgaatattttatttttatttcagcatatgctcgcttgttgctctcatgttttaaaccatgttataacttcactgcttgccttggaaaattttaatttgcagcaataatttctaggtaatttgtactacatgtaacttctaagttatagtagaattgtcccgaaaaacttgtcgctacaaatatgtctgttttcttttgagtgtgtgctcggattaacaatatacattgcatctctctgtgttcatgcatgccaatgggcattaatggtccatgcaaattaattgggttgggcctaaatcagctaacttcacatatcaatcttcatatatcctgtcagcaaggggtaaatagaatgtccaagtgtgtatgaaaaatacacgaaaggaaagaaaaatagaatgagtatgaaaaatacacaaaaggaaagaaaaatagaatgatcactcagtcaacaaaaaggatgtttttttgtgcacacgcgatatgttattcccttattctccagatatggtaatggtaaactcaatcaagcaggaaaagatgtcgccctaaccgttgggcaaacacctggatgacatcatcttctctgctaaaggcaccatattctcttcaaggatccaaacaattaccccacttgggaagaggaatgtgacggagttagcactacctccacataatgggaaggttgggttaaagcctattggtacctggccgaaggcatggaggtccgtaccatgagccgccgaagcggcggaggcgacgcgtcagcaggcgcctcgggtgggagctgcacgaaggccagctcaggcgacgcggtaactgggaggagccggtggcgcaggcgcacgaaggagagaagctgcgcccaggaggagcggatgatccggagcaggatctggaagagcagaccgaggccgagccaccccgccgccgccggatggctcggttgctgaactggcgcaacctccgtcgccgccgacatctgtctctggaggcggagacttagccgcgattgggagaacggaacggggaggaagcaccgaagcaatcatagagtcgtggtcgctgctctatctttcatttgtgtcggcaggttccctcaattccctcttaagggctggtttgacagtatcccgtgtatagctagagcccagggagataattgcatatttgggactcgaaacattgcgcttcgcacaaatgccattcaaaagattttcttcgtaaaaaagggactataaatatgttctaattgattatactacca

SEQ ID NO: 216063 - DNA, 3306 bp, Zea Mays
ccccacgccgtctccaccccccatcaggcaccccccccgccccgccccgctcgtcgccatagagtttcatcgcctcgctcgcgtcgccaactacatccgctcgaaccgcgtccttacatgccatgcccaccatcctcgctcgctccaaccatgtatctacatgtcgcctccgacatccacgcccatgcttcgtgtagtgcttgacgcgcccgctccaaccgcgtctatgcatgccgtgactgccatcctcgccacccgcatgcctcatctgcatcctccgtttatcgtacttatccgcggtataccttccctcatcgttcagtccgcgctcactctgccccacgatccgcttctcccccgcgcccctcggcaagctcgcagtccaggatccgattctcgcgtcgccctcccgccgcgcccctcgatgatatgctagagcgtcagcaaggcggactctccaaacctccagagagggagggaggcagcagccaatgcccagcacgtaccaatctgcgtggcgggaggtgcccggactgcgtacccacgggcgagcaggattttgacgatccacgacccgatgaagtcgccggcgtcggtgacgcacaaggcggcagtggccatcgtgcgctgacgcccagtcccttcctctcgcgagcgaaacggggggcggtggtgccgccgggcgaatggattcgtccgagagcgagcaaataggggtaagcatttatcaagcggaagtgggaagaaatggtacagtgaagtggaggaaatgacacagaacacgagcgaagctggcatctcaaggcggtcgcactcgcacggttagcagtgcactcccctaatttctgccctttttatggtttcacgattatctgaatatggagttcaaggattgatcttttctgagttctttgttgccatatttttctgtccatgtaataaggttgtgggtaaaatattgtgtcaatcgggcttgtgtgttgcagttctattcttgtgtagtgcagctccgaagtcgctgctaccaggtgcccccgtgctggggcataggtgcagtcgccgctgcgcccagcctacacaaaggcagctaccgttgcgacaacgagagggagctcccaaggcaccaatgttgttgctgccagttcttcaaagagttattgatggttcacaaaagaccactgttgctctgccaattcacaaagccttgatgattgttatgatggaaccaatgttgaggcctacaacaatgatgtcattgttcccatgggacctcaatctccaaaaaaccaagaggccgtgggaagaggaatgtgacaatgagaaggttcagttaaagactattggtacattttatcgaatattttatttttatttcagcatatgctcgcttgttgctctcatgttttaaaccatgttataacttcactgcttgccttggaaaattttaatttgcagcaataatttctaggtaatttgtactacatgtaacttctaagttatagtagaattgtcccgaaaaacttgtcgctacaaatatgtctgttttcttttgagtgtgtgctcggattaacaatatacattgcatctctctgtgttcatgcatgccaatgggcattaatggtccatgcaaattaattgggttgggcctaaatcagctaacttcacatatcaatcttcatatatcctgtcagcaaggggtaaatagaatgtccaagtgtgtatgaaaaatacacgaaaggaaagaaaaatagaatgagtatgaaaaatacacaaaaggaaagaaaaatagaatgatcactcagtcaacaaaaaggatgtttttttgtgcacacgcgatatgttattcccttattctccagatatggtaatggtaaactcaatcaagcaggaaaagatgtcgccctaaccgttgggcaaacacctggatgacatcatcttctctgctaaaggcaccatattctcttcaaggatccaaacaattaccccacttgggaagaggaatgtgacggagttagcactacctccacataatgggaaggttgggttaaagcctattggtacctggtgagtattttgtttttatttcagcacatgctcgcttgctgctctcatattttaagccatgttatatttacactgcttgccttggaaaattttaatttgtagcaataatttttggataatttgtactatatgtaacttttaagttataattacactgcttatcaacgggctatacccttgtatggtggacattcacgaatagcaaggtagggttgttgaaacaaggataggattttcatggcatgattactactgcaagaaagatgaaatactttggttacaaatgtgtagctccggcaccgttgctgttctggtctcggccgtggagatggaactatgattaaaagaaaagagaacactacggaaggaacctactgatgctcagtgtactgcgactttcccacgatgctcatgatgtcgaagtctgcagttgctagactggcccgagtaattgctaagttttgtagaaaatgtttaggcccatttttgaacgcatgaatttcgtataggctgtatttcacacgaaatacacaggaacaaacatttttcctgccttccaaacaggtcgttaggattagttgaagttccagtttgatcataggcacctaggtcgatgctctttagtaagatgtaagtaatatgtcttctggccaggttgagcaaggcttagctgcagtgtatcagtgtggtacagctgatgtatttatactgttacaatctaatgagactatatggattagagctatcagaacctgcacagatatttcacaataaactcttaggttatatattgctcgagacttgtgaatactttgttattgcttcctggttcaaagccatgatgcaaggtacacgcgcgtacttatgacttctcatacaagacgagacgtcaagactccggtcttgacatcataatctattcgtttagctttaatccgttctggtttgtactaattatacaatgctttatcctaatcgtatccgtcaagaccgtgacaatttattttgttcagaaaaccgtagcgaggcacgggcatttgactagtatccctttaatcagcagtcagttattagactattagcagcggtgttctctaaatttttcctcctaaatattactatgcagccacgtcagcaagattctctcccctatattcactcatcacgcaactgtttcccctataaattctcttatatatccctctacacattaaatatatatttctacataactaacataac

SEQ ID NO: 216064 - DNA, 3411 bp, Zea Mays
ccccacgccgtctccaccccccatcaggcaccccccccgccccgccccgctcgtcgccatagagtttcatcgcctcgctcgcgtcgccaactacatccgctcgaaccgcgtccttacatgccatgcccaccatcctcgctcgctccaaccatgtatctacatgtcgcctccgacatccacgcccatgcttcgtgtagtgcttgacgcgcccgctccaaccgcgtctatgcatgccgtgactgccatcctcgccacccgcatgcctcatctgcatcctccgtttatcgtacttatccgcggtataccttccctcatcgttcagtccgcgctcactctgccccacgatccgcttctcccccgcgcccctcggcaagctcgcagtccaggatccgattctcgcgtcgccctcccgccgcgcccctcggcaagctcgcaatccaggatccgattctcgcgtcgccctcccgccgcgcccctcggcatctcaactacctcgtgatgcctcccccacccccgatctataaaccagccgctcgccactcctcccgtactctcgcccccgacctcatggaaggatccgcctctcgcgcgcccccgccgacgcacgcaactcgcagacggcgcccccccagatccacttctcgctggccgctcagatcctccatatcctgacctctccctcctcttgctgcagatgatatgctagagcgtcagcaaggcggactctccaaacctccagagagggagggaggcagcagccaatgcccagcacgtaccaatctgcgtggcgggaggtgcccggactgcgtacccacgggcgagcaggattttgacgatccacgacccgatgaagtcgccggcgtcggtgacgcacaaggcggcagtggccatcgtgcgctgacgcccagtcccttcctctcgcgagcgaaacggggggcggtggtgccgccgggcgaatggattcgtccgagagcgagcaaataggggtaagcatttatcaagcggaagtgggaagaaatggtacagtgaagtggaggaaatgacacagaacacgagcgaagctggcatctcaaggcggtcgcactcgcacgttctattcttgtgtagtgcagctccgaagtcgctgctaccaggtgcccccgtgctggggcataggtgcagtcgccgctgcgcccagcctacacaaaggcagctaccgttgcgacaacgagagggagctcccaaggcaccaatgttgttgctgccagttcttcaaagagttattgatggttcacaaaagaccactgttgctctgccaattcacaaagccttgatgattgttatgatggaaccaatgttgaggcctacaacaatgatgtcattgttcccatgggacctcaatctccaaaaaaccaagaggccgtgggaagaggaatgtgacaatgagaaggttcagttaaagactattggtacattttatcgaatattttatttttatttcagcatatgctcgcttgttgctctcatgttttaaaccatgttataacttcactgcttgccttggaaaattttaatttgcagcaataatttctaggtaatttgtactacatgtaacttctaagttatagtagaattgtcccgaaaaacttgtcgctacaaatatgtctgttttcttttgagtgtgtgctcggattaacaatatacattgcatctctctgtgttcatgcatgccaatgggcattaatggtccatgcaaattaattgggttgggcctaaatcagctaacttcacatatcaatcttcatatatcctgtcagcaaggggtaaatagaatgtccaagtgtgtatgaaaaatacacgaaaggaaagaaaaatagaatgagtatgaaaaatacacaaaaggaaagaaaaatagaatgatcactcagtcaacaaaaaggatgtttttttgtgcacacgcgatatgttattcccttattctccagatatggtaatggtaaactcaatcaagcaggaaaagatgtcgccctaaccgttgggcaaacacctggatgacatcatcttctctgctaaaggcaccatattctcttcaaggatccaaacaattaccccacttgggaagaggaatgtgacggagttagcactacctccacataatgggaaggttgggttaaagcctattggtacctggtgagtattttgtttttatttcagcacatgctcgcttgctgctctcatattttaagccatgttatatttacactgcttgccttggaaaattttaatttgtagcaataatttttggataatttgtactatatgtaacttttaagttataattacactgcttatcaacgggctatacccttgtatggtggacattcacgaatagcaaggtagggttgttgaaacaaggataggattttcatggcatgattactactgcaagaaagatgaaatactttggttacaaatgtgtagctccggcaccgttgctgttctggtctcggccgtggagatggaactatgattaaaagaaaagagaacactacggaaggaacctactgatgctcagtgtactgcgactttcccacgatgctcatgatgtcgaagtctgcagttgctagactggcccgagtaattgctaagttttgtagaaaatgtttaggcccatttttgaacgcatgaatttcgtataggctgtatttcacacgaaatacacaggaacaaacatttttcctgccttccaaacaggtcgttaggattagttgaagttccagtttgatcataggcacctaggtcgatgctctttagtaagatgtaagtaatatgtcttctggccaggttgagcaaggcttagctgcagtgtatcagtgtggtacagctgatgtatttatactgttacaatctaatgagactatatggattagagctatcagaacctgcacagatatttcacaataaactcttaggttatatattgctcgagacttgtgaatactttgttattgcttcctggttcaaagccatgatgcaaggtacacgcgcgtacttatgacttctcatacaagacgagacgtcaagactccggtcttgacatcataatctattcgtttagctttaatccgttctggtttgtactaattatacaatgctttatcctaatcgtatccgtcaagaccgtgacaatttattttgttcagaaaaccgtagcgaggcacgggcatttgactagtatccctttaatcagcagtcagttattagactattagcagcggtgttctctaaatttttcctcctaaatattactatgcagccacgtcagcaagattctctcccctatattcactcatcacgcaactgtttcccctataaattctcttatatatccctctacacattaaatatatatttctacataactaacataac

SEQ ID NO: 216065 - DNA, 1838 bp, Zea Mays
caataatcctattgcttggtgtgttagtcctagttccgcgccctctcgtccgcgaacaacacgcaacgcccccgcagccatagccgcagcacttggcctagctagccgcatgagggagttctcgtacgaggaggtggaggcggcgacgggcgggttcgcggagaagaacctggtgggcaagggcagccacggcaccgtgtacagggccaggctgaggagaggcggcaggacggccgtcgtcgccgtgaagcggccgtcgcacgcgcagggggaggccaagctggccaacgagatcgccgtgctctcggccgcgccgcgccacccggggatcatcggcatcgtcggcgtgtcgccatcgccatcgccacagccgcagccggggcctcggctgcccccgctgctcgtcatggagttcatgcccagcgggtcgctgcacgacatgctgcaccggtcgccgcggccgccgccgtggccgcaccgcgtggagatcgcgctagacgtggcgcgcgccgtgctggcgctgcacggcgcggcgccgcgcgtcatccaccgcgacgtcaagtccgccaacgtcctgctcggccgcgacggccgcgcccgcctcgcggacttcggcctcgccgtgagcgtcgtcaaggccgccgccgccgtccacgcagacgcgccacctggaccagcagccgaggaaggctcggcgtcggcggggccgccaccagccccggcgggcacgatcgggtacctggacccctgctacacggagcccgggaagctgggccccgcgagcgacgtgttcagcttcggcgtggtgctcctggagctggtgagcgggcgcaaggtgatggacgtggactcgtgcccgtcgtccatcgtgtcgtgggccgcgccgctgatcggcgccgggcgcgcgcgggaggtgctcgacgcccgggtggccgccgcgccactgccgcccacggaccgcgcgctggcccgcgtcctcgccgtggctgcgcggtgcgtgtcggagagcgtggagcggcggccggccatggacgaggtggtggccgagctgcgcgagtgcgccgggtggcggcacgggcaccgcggcggcggcgtggtggggcgggtgtgcgagcgcgtcgcggcgtggggccagcgcgtgatgaggaggggcagcaaccgggtggtggcgaccaaggtcgagtgcaccgagcactccgacagcgacgtggcacccgatcgccagggctcctcctcctcctcgtgcacgaccgcggctctgccaccgcatcggaacgacggcatgatgaccggcgcacccaaatgaaccgaagacgaggtagtgtctgacccaattcgagagcgagtttggatctcgttttcagtagttgacaaactacggatgtttactggtaatagtactagctagttacgtgtcacgagactattactgtcacagcagttatggcatgcgctaatctgcgactgctttgctcgttccgatcatcgcacagtctcgagatatggattgacgtcgtggtgtatatacgcttcttcattttacgtttggaatttgggtttcttttgtctttgaccatcatgctggcagtggcatgcatgaggcccgacggcattcatcggcagcacaggtagcggtatactagcatcagaaggacatttcctttcttctccggttcaggcatgagatggccattatgtgaacaccgaagaaccggcagctgctgaactgccctgcacgcatgctgcatgcaaccgtagtaaaaagaaaaaaaaagctccttgatctgatttacactgtaaaaggtgggagagagagagagaaaaaaggaagaagggtg

SEQ ID NO: 216066 - DNA, 2188 bp, Zea Mays
caacgaccttcgattgagcatgtgaggttttttttgcaaatatgtagctgggccgtgggcgtgggggagaagagcgtggaaggttcttctttgacttctctcctacatacgttggagttggcatgatctgcccatacatcgtgaatgtgtctgttctgctgggtggtatcctctcatggggtttaatgtggcctctcattgccaagaagaaggggagttggtacccagctaacctggaagactcaagtttacatgggttgcaggcttacagggtaaacatcgatccaacttttggctgttctctcctcttttctcaaagctatatcattcagcttcatcgcatacgaacattagttttgtgaccaagaattcaactgctagttccttgcaatggcaggttttcatttccatcgctttgatccttggggacggtttatacaacttcattaaggtgctgatccgcacaattgcgggtttcatatcaatggtgcagcaaaattcaaaaagcatgcttcctgtttcggacaatggcagttccatgtccagtatggaggctgtatcctttgacgatgaacgtcgcattgagaattttctgaaagatcagattcccaagtcagttgcatacgggggctatgttgcagttgctgctatatctattggcacccttcctcagatcttcccgcagctcaagtggtactacattttagtagcctacgtcgtggcacctgtgctggccttctgcaatgcttatggaagtggcctcactgactggtctctcgcctccacctacggcaagctcgctatcttcgtgttcggtgcatgggctggcctctcacacggtggcgtgctcgttgggctcgcagcttgtggtgtcatgatgagcatcgtgtcgaccgcctcagacctgatgcaagacttcaagaccgggtacctgacgctggcgtcaccgaggtctatgttcatcagccaggtgattggcaccggaatggggtgtgtcatcgggccctgcatcttctggctcttctacaaggcgttcggtgacattggcgagagcggcaccgagtacccggcgccctatgccatcgtgtaccgcaacatggccatcctcggcgtggatggcttcggctcgctcccgaaaaactgcctcaccctctgctacattttctttgcggcagcgatcactatcaaccttgtcagggacctgaccccctacaaggtgtcgaggttcatcccgctgccaatggcaatggcgattccgttctacatcgggtcctacttcgccattgacatgtttctgggcagcgcgatcctcttcgtgtgggagcggctgaacaaggcgaaagcggacgcattcggacctgcggtcgcgtcggggctgatctgcggagacggcatctggaccctgccgcagtccattctggccctcgccaaggtgcagccccccatttgcatgaagtttttgtccagatcgaccaatgccaaggtggacagcttcctcggcttgtcatgattttacacagaatggcaagtagacacgccctcatcctgtaattattggtgcaagatgcaatcaccaggctacagctctgtaaaagagaagaggttttgctgtggagtgaccaaagctttgtccgtgtagtctgtgtcaagaggaaaatactcaatggccctctgcctttttttgtgcaattattaactagcgtattcacagttataggtatttttgaaatgtgaaacgttcactacaaatttttttttaacgaatggagcttttgaaggtggagcggcagctataaggtgtgcgttggaaaagggtccatgaaagcctaagggttatggtgtgatcctatttatggtccgctgtgaaagaccaaactccttgtagttctttactttagggagtagcatataagccgtgttaatgctacgatcctgaaaaggaaaatgaaggggttgatgacagtggcggcgacacgaggggaggcgttgatgctacgatcctgaaaaggaaaatgaaggggttgatgacagtggcggcgacacgaggggaggcgttgatgaggcgaaagggtcaagggaaagggatgatggatgatcaaataatattatacattggatttgagtgaatatatatgtgagggttatggagcgatatgaaccattcattttgatgttgtgttaagtctgg

SEQ ID NO: 216067 - DNA, 2857 bp, Zea Mays
tacgtgcaggatggaagttctggcgaggtttacaaagtttctatggagcgtgaggaaagacgcctaactgagcttgctcagaagatactagagacatttgtgctatctcatatatttagttgcataccaagaagctgttgctttgaaaaggcaagaagagcttattcgtgaagaggaggaggaggctggacttcttgaacatcagatgaaggggaagcgtggtggtggtgcaaatgaaaaggacaagcgtgccaagaaaaagcagaccaagcaaaagaagaacaaccgtaaggctaaagacaaggaaagagatgtgaaatgtgaggttaaaattctggaaaggcttcatgatgaaactgttattgataacagtgatggcttaccagctaaggtggaagtgatagccaaggttgatgccttggaagaaggttcttcagatgggtcagacatgccaaatagtgttacaggtggttcaggccgcaatagttctggctgctgcacagctccaaaactggatcaggatactgttctgcttaccttgagagataaacttcgtaagctagggcagcgtctgcaagagaaaaacattgaggggcagaaacttctcaaagctcattttgaagctagggacacaaaagtgaaggtagaagaatcttctgactcatctaattctttggataggccacctgatgttccagagagctcgatgcattcttcagaagatacagttgatcttaaagttaatggaacaccaaataaggatgcctctgtggtcaaccctgtcctggaggaatctgtttcaggcataccagtcactgcaaagaatgaatccttgccttctgccagaacaaaagaaggcccagtttcaaacaaagataacgcatcaagtttgaaaatgaaaaccatggcatcttgcttgaaattgcatccagctgatgtggataaagatgccccttttccttctaaatcaccacgaatcaatagggctgctccagttccctcgaagttaccttcggctgataaagctactccagttcttccaaaatcatctctgtcagtaaacaaagcagctctggtccgtcccaaatctccagcagttgacaaagcaactccagtttgtcctgaatctccagcagttgacaaagtaactccagttcgtcccagatctccagcagttgacaaagcaactccagttcgttctcaatctccagcagttgacaaagctactcatgtttgccctcaatctccatcagttgacaaggcaactccatccattgacaaagcaactccagttcgcccaaaatctccagccatagataaagtaactccaattcctcccaaatctccaccagttgacaaagcctctccagcaccaccaaaatcactatcaggtgctaaagatgtgcctgttccttcaaggtcgctgcaaattgataggttcattccagcccccccaagattatcgcaagttgataaagctgctctgccttcttcagaacagccacatatatctccagctactaattctgaagcccaaggggcaactacttctaggaaggtcacagccagctcagttttggaggttgctgcagcatcgaggccttcaagtgctcctgtgttacccacaccaagatcaactgcaccagttgcttcacatattcaaacttccacgttgctttcccgctcgatgagtgaggcagctgggagaaggtcagtaaatgatccttccttttctgccccatcttatactccccagacctaccgaaatgcaataattggtaagactggtctggctactacctctgcaaaccttgcatatcagtcctattctctgggtcaagatactgctccttcacagcctctatcagcatatgcatcaagcacagcagtcatgatgcctcctgctggaagatctgatcaatcatcagctaggcatggattcaagtctgggtctggtaagctagaagcacatgacagctggcagcagtggaaaggtgataataatgttgatatgcatctctggagggatcacactacctatcaacaaatgaccaggggtcaagcgtatgaccaatctcggagggacgatacttatcagcaaacatgcagcagaggaacagaaaagttcagcaggcacgcaggactgcaagctaggcagttccaaaccgagacacccgccagccatgtctggcaccaacaacaggggcaagtggcagaagagtttccacaccttgacatcataaacgatttgcttgaggaggaccagatcaacggcagtataccagagtcatttcatcaagattacaatgtgtttggcctgccattttcaccaagaggaaacgtgtcagatatgggaatggcttctgttagaagtcctgctcggttcaattcaaccaagtatgagtatgacggtggattctcgggggcttatgacataaatgcggtcaatgggttgagggaacggcagtttccctcgttggatagttactctaatggcctgtctgacgtgagtgcatcaaagccttggctgaatggctctcccagtccatcggtgatgagccttggggttaacacaaatggataccacccccaggttgcggactaccccagtctgggaaatggggtgaacggagtctccttgtggcgccgccatgctaacgggcgctggtaatgcgaggtgcctgtatacaatcatacagatggaataatgtttgttgtaacaaatggtttcgggcctgagctgatgtgccatgtaattaaaagttttaagttttaaaagggaaagaaagcgatacatgctgcaaaatctgccccgtgatttggttaatttgattgcttttctggttaaactctgttc

SEQ ID NO: 216068 - DNA, 2949 bp, Zea Mays
catgcctacgtgcaggatggaagttctggcgaggtttacaaagtttctatggagcgtgaggaaagacgcctaactgagcttgctcagaagatactagagacatttgtgctatctcatatatttagcggaattgaagttgcataccaagaagctgttgctttgaaaaggcaagaagagcttattcgtgaagaggaggaggaggctggacttcttgaacatcagatgaaggggaagcgtggtggtggtgcaaatgaaaaggacaagcgtgccaagaaaaagcagaccaagcaaaagaagaacaaccgtaaggctaaagacaaggaaagagatgtgaaatgtgaggttaaaattctggaaaggcttcatgatgaaactgttattgataacagtgatggcttaccagctaaggtggaagtgatagccaaggttgatgccttggaagaaggttcttcagatgggtcagacatgccaaatagaggaaaaaatcagtgtaacaagggcttaagcattagtcttgccaaagaaggtgatggtcttccctccacctctagtgttacaggtggttcaggccgcaatagttctggctgctgcacagctccaaaactggatcaggatactgttctgcttaccttgagagataaacttcgtaagctagggcagcgtctgcaagagaaaaacattgaggggcagaaacttctcaaagctcattttgaagctagggacacaaaagtgaaggtagaagaatcttctgactcatctaattctttggataggccacctgatgttccagagagctcgatgcattcttcagaagatacagttgatcttaaagttaatggaacaccaaataaggatgcctctgtggtcaaccctgtcctggaggaatctgtttcaggcataccagtcactgcaaagaatgaatccttgccttctgccagaacaaaagaaggcccagtttcaaacaaagataacgcatcaagtttgaaaatgaaaaccatggcatcttgcttgaaattgcatccagctgatgtggataaagatgccccttttccttctaaatcaccacgaatcaatagggctgctccagttccctcgaagttaccttcggctgataaagctactccagttcttccaaaatcatctctgtcagtaaacaaagcagctctggtccgtcccaaatctccagcagttgacaaagcaactccagtttgtcctgaatctccagcagttgacaaagtaactccagttcgtcccagatctccagcagttgacaaagcaactccagttcgttctcaatctccagcagttgacaaagctactcatgtttgccctcaatctccatcagttgacaaggcaactccatccattgacaaagcaactccagttcgcccaaaatctccagccatagataaagtaactccaattcctcccaaatctccaccagttgacaaagcctctccagcaccaccaaaatcactatcaggtgctaaagatgtgcctgttccttcaaggtcgctgcaaattgataggttcattccagcccccccaagattatcgcaagttgataaagctgctctgccttcttcagaacagccacatatatctccagctactaattctgaagcccaaggggcaactacttctaggaaggtcacagccagctcagttttggaggttgctgcagcatcgaggccttcaagtgctcctgtgttacccacaccaagatcaactgcaccagttgcttcacatattcaaacttccacgttgctttcccgctcgatgagtgaggcagctgggagaaggtcagtaaatgatccttccttttctgccccatcttatactccccagacctaccgaaatgcaataattggtaagactggtctggctactacctctgcaaaccttgcatatcagtcctattctctgggtcaagatactgctccttcacagcctctatcagcatatgcatcaagcacagcagtcatgatgcctcctgctggaagatctgatcaatcatcagctaggcatggattcaagtctgggtctggtaagctagaagcacatgacagctggcagcagtggaaaggtgataataatgttgatatgcatctctggagggatcacactacctatcaacaaatgaccaggggtcaagcgtatgaccaatctcggagggacgatacttatcagcaaacatgcagcagaggaacagaaaagttcagcaggcacgcaggactgcaagctaggcagttccaaaccgagacacccgccagccatgtctggcaccaacaacaggggcaagtggcagaagagtttccacaccttgacatcataaacgatttgcttgaggaggaccagatcaacggcagtataccagagtcatttcatcaagattacaatgtgtttggcctgccattttcaccaagaggaaacgtgtcagatatgggaatggcttctgttagaagtcctgctcggttcaattcaaccaagtatgagtatgacggtggattctcgggggcttatgacataaatgcggtcaatgggttgagggaacggcagtttccctcgttggatagttactctaatggcctgtctgacgtgagtgcatcaaagccttggctgaatggctctcccagtccatcggtgatgagccttggggttaacacaaatggataccacccccaggttgcggactaccccagtctgggaaatggggtgaacggagtctccttgtggcgccgccatgctaacgggcgctggtaatgcgaggtgcctgtatacaatcatacagatggaataatgtttgttgtaacaaatggtttcgggcctgagctgatgtgccatgtaattaaaagttttaagttttaaaagggaaagaaagcgatacatgctgcaaaatctgccccgtgatttggttaatttgattgcttttctggttaaactctgttc

SEQ ID NO: 216069 - DNA, 3359 bp, Zea Mays
cgcgaccatttccgtgaaagggagaaagtggatagaccttttcgttgccttgatcgtccttatcggagagaattaatccgcatctatatgacaaatgtggaacaaatctaccgacgtttcgttgaggagcgaagaagtaaattaagcaagctcattgaggacaaaatgaaatggtccagtttccgtgctttctggtcagcaattgacccaaacaccaggcatcacatgtccagggaaaagactgagactatattgaaaattttagtgaagcaattctttgtagagaaagaagttacttccacattagtgatggactctttgtatacaagtctgaaggcacttgaataccggatgaagagcaagaaatgcaaaacaaaattagcagatttggaagaactacctgcgcctatggtccatgttgacatggacatgtttgttttggctgatgatgttatagctttgcttgagagggcagccttagaacccttgccttgtcaacctgtagcccccaaggatgacaaaacttcccaaagccgcatgaagaacctcgatcaattatattaggacaactttgttgctagtttctcatgcctacgtgcaggatggaagttctggcgaggtttacaaagtttctatggagcgtgaggaaagacgcctaactgagcttgctcagaagatactagagacatttgtgctatctcatatatttagcggaattgaagttgcataccaagaagctgttgctttgaaaaggcaagaagagcttattcgtgaagaggaggaggaggctggacttcttgaacatcagatgaaggggaagcgtggtggtggtgcaaatgaaaaggacaagcgtgccaagaaaaagcagaccaagcaaaagaagaacaaccgtaaggctaaagacaaggaaagagatgtgaaatgtgaggttaaaattctggaaaggcttcatgatgaaactgttattgataacagtgatggcttaccagctaaggtggaagtgatagccaaggttgatgccttggaagaaggttcttcagatgggtcagacatgccaaatagtgttacaggtggttcaggccgcaatagttctggctgctgcacagctccaaaactggatcaggatactgttctgcttaccttgagagataaacttcgtaagctagggcagcgtctgcaagaggccacctgatgttccagagagctcgatgcattcttcagaagatacagttgatcttaaagttaatggaacaccaaataaggatgcctctgtggtcaaccctgtcctggaggaatctgtttcaggcataccagtcactgcaaagaatgaatccttgccttctgccagaacaaaagaaggcccagtttcaaacaaagataacgcatcaagtttgaaaatgaaaaccatggcatcttgcttgaaattgcatccagctgatgtggataaagatgccccttttccttctaaatcaccacgaatcaatagggctgctccagttccctcgaagttaccttcggctgataaagctactccagttcttccaaaatcatctctgtcagtaaacaaagcagctctggtccgtcccaaatctccagcagttgacaaagcaactccagtttgtcctgaatctccagcagttgacaaagtaactccagttcgtcccagatctccagcagttgacaaagcaactccagttcgttctcaatctccagcagttgacaaagctactcatgtttgccctcaatctccatcagttgacaaggcaactccatccattgacaaagcaactccagttcgcccaaaatctccagccatagataaagtaactccaattcctcccaaatctccaccagttgacaaagcctctccagcaccaccaaaatcactatcaggtgctaaagatgtgcctgttccttcaaggtcgctgcaaattgataggttcattccagcccccccaagattatcgcaagttgataaagctgctctgccttcttcagaacagccacatatatctccagctactaattctgaagcccaaggggcaactacttctaggaaggtcacagccagctcagttttggaggttgctgcagcatcgaggccttcaagtgctcctgtgttacccacaccaagatcaactgcaccagttgcttcacatattcaaacttccacgttgctttcccgctcgatgagtgaggcagctgggagaaggtcagtaaatgatccttccttttctgccccatcttatactccccagacctaccgaaatgcaataattggtaagactggtctggctactacctctgcaaaccttgcatatcagtcctattctctgggtcaagatactgctccttcacagcctctatcagcatatgcatcaagcacagcagtcatgatgcctcctgctggaagatctgatcaatcatcagctaggcatggattcaagtctgggtctggtaagctagaagcacatgacagctggcagcagtggaaaggtgataataatgttgatatgcatctctggagggatcacactacctatcaacaaatgaccaggggtcaagcgtatgaccaatctcggagggacgatacttatcagcaaacatgcagcagaggaacagaaaagttcagcaggcacgcaggactgcaagctaggcagttccaaaccgagacacccgccagccatgtctggcaccaacaacaggggcaagtggcagaagagtttccacaccttgacatcataaacgatttgcttgaggaggaccagatcaacggcagtataccagagtcatttcatcaagattacaatgtgtttggcctgccattttcaccaagaggaaacgtgtcagatatgggaatggcttctgttagaagtcctgctcggttcaattcaaccaagtatgagtatgacggtggattctcgggggcttatgacataaatgcggtcaatgggttgagggaacggcagtttccctcgttggatagttactctaatggcctgtctgacgtgagtgcatcaaagccttggctgaatggctctcccagtccatcggtgatgagccttggggttaacacaaatggataccacccccaggttgcggactaccccagtctgggaaatggggtgaacggagtctccttgtggcgccgccatgctaacgggcgctggtaatgcgaggtgcctgtatacaatcatacagatggaataatgtttgttgtaacaaatggtttcgggcctgagctgatgtgccatgtaattaaaagttttaagttttaaaagggaaagaaagcgatacatgctgcaaaatctgccccgtgatttggttaatttgattgcttttctggttaaactctgttc

SEQ ID NO: 216070 - DNA, 4813 bp, Zea Mays
accacggcatccaccattccagctccaggccaggagaaaacgttccgggactgggactgcgttcaccttgctttttcttcccacgctcaccccgcaccgcgtgccctctctggctctctccctctcgtggggacgactgggcgaccgccgccgccgccgccttacgccaggtgcccaggtcttagtcggccccttcgccggcgacgaggacctaccagctgtgaataaggttgtctggaacggccgtgggctctgcggatggcaggttctgtggtaacggatgattcagctgctagcacaactggaatgagggatgatgaaaacagtctctctggcgagtccttctctgagtggaggtcctgtgatagggcagacagcgataccccttcaacatccccacccttctgggatagcgatggtgatgatgatgatcctggcccaaagccttcagaattgtttggacatcacacttggaggattgaaaacttctcaaaggagaagaaaagagaaatgaaaagtgagccatttgaagctggtggttacaaatggtatattcttgtataccctcaaggatgtgatgtctctaatcatctttcattattcctttgcgttgctaatcatgacaaacttctcccaggatggagtcattttgcacagttcactatagctgtagccaatatagatcctaaaaagatgaagtactcaggtgagctgaacttggtttgttttcttcttggaaggttttggaagaaggaacatgattggggatggaaaaagtttatggagctgtcaaagattcaggatggttttcttgttgacgatgttcttgaaatcatagctcaagttcaggtcatcagggagaaagtggatagaccttttcgttgccttgatcgtccttatcggagagaattaatccgcatctatatgacaaatgtggaacaaatctaccgacgtttcgttgaggagcgaagaagtaaattaagcaagctcattgaggacaaaatgaaatggtccagtttccgtgctttctggtcagcaattgacccaaacaccaggcatcacatgtccagggaaaagactgagactatattgaaaattttagtgaagcaattctttgtagagaaagaagttacttccacattagtgatggactctttgtatacaagtctgaaggcacttgaataccggatgaagagcaagaaatgcaaaacaaaattagcagatttggaagaactacctgcgcctatggtccatgttgacatggacatgtttgttttggctgatgatgttatagctttgcttgagagggcagccttagaacccttgccttgtcaacctgtagcccccaaggatgacaaaacttcccaaagccgcatgaaggtagggataatacaatttgatatgttatatcttggttttatttccaagttttgcgtatcttagtaggtgtctgttttcatggccctagaacctcgatcaattatattaggacaactttgttgctagtttctcatgcctacgtgcaggtaatccttttgaacttgtctggattggtttggtttcagacagctgtttaatgaacaagttattatctgtgtttactattactctcatcacatacacaaataccttctcatcacatacacaaataccttacatgttattgctcataggcttgtgccttgttgaaagagatgtgttccatttccagccagaacagcctagcatatggcatttgctgagatattttctgttgatacaaacaaatatttgggcatgcaattagtatgttctcctaaactatcttggtaggttggtctacagttagtttgttttcatcgcattgtattgactacctgctatgtttctgtatgagcgcatagctttacatgatctgttatattttgagaagtgaaataactgttgcatataatcatttttttgttacacccgtcatcgtaggatggaagttctggcgaggtttacaaagtttctatggagcgtgaggaaagacgcctaactgagcttgctcagaagatactagagacatttgtgctatctcatatatttagcggaattgaagttgcataccaagaagctgttgctttgaaaaggcaagaagagcttattcgtgaagaggaggaggaggctggacttcttgaacatcagatgaaggggaagcgtggtggtggtgcaaatgaaaaggacaagcgtgccaagaaaaagcagaccaagcaaaagaagaacaaccgtaaggctaaagacaaggaaagagatgtgaaatgtgaggttaaaattctggaaaggcttcatgatgaaactgttattgataacagtgatggcttaccagctaaggtggaagtgatagccaaggttgatgccttggaagaaggttcttcagatgggtcagacatgccaaataggtggttcaggccgcaatagttctggctgctgcacagctccaaaactggatcaggatactgttctgcttaccttgagagataaacttcgtaagctagggcagcgtctgcaagagaaaaacattgaggggcagaaacttctcaaagctcattttgaagctagggacacaaaagtgaaggtagaagaatcttctgactcatctaattctttggataggccacctgatgttccagagagctcgatgcattcttcagaagatacagttgatcttaaagttaatggaacaccaaataaggatgcctctgtggtcaaccctgtcctggaggaatctgtttcaggcataccagtcactgcaaagaatgaatccttgccttctgccagaacaaaagaaggcccagtttcaaacaaagataacgcatcaagtttgaaaatgaaaaccatggcatcttgcttgaaattgcatccagctgatgtggataaagatgccccttttccttctaaatcaccacgaatcaatagggctgctccagttccctcgaagttaccttcggctgataaagctactccagttcttccaaaatcatctctgtcagtaaacaaagcagctctggtccgtcccaaatctccagcagttgacaaagcaactccagtttgtcctgaatctccagcagttgacaaagtaactccagttcgtcccagatctccagcagttgacaaagcaactccagttcgttctcaatctccagcagttgacaaagctactcatgtttgccctcaatctccatcagttgacaaggcaactccatccattgacaaagcaactccagttcgcccaaaatctccagccatagataaagtaactccaattcctcccaaatctccaccagttgacaaagcctctccagcaccaccaaaatcactatcaggtgctaaagatgtgcctgttccttcaaggtcgctgcaaattgataggttcattccagcccccccaagattatcgcaagttgataaagctgctctgccttcttcagaacagccacatatatctccagctactaattctgaagcccaaggggcaactacttctaggaaggtcacagccagctcagttttggaggttgctgcagcatcgaggccttcaagtgctcctgtgttacccacaccaagatcaactgcaccagttgcttcacatattcaaacttccacgttgctttcccgctcgatgagtgaggcagctgggagaaggtcagtaaatgatccttccttttctgccccatcttatactccccagacctaccgaaatgcaataattggtaagactggtctggctactacctctgcaaaccttgcatatcagtcctattctctgggtcaagatactgctccttcacagcctctatcagcatatgcatcaagcacagcagtcatgatgcctcctgctggaagatctgatcaatcatcagctaggcatggattcaagtctgggtctggtaagctagaagcacatgacagctggcagcagtggaaaggtgataataatgttgatatgcatctctggagggatcacactacctatcaacaaatgaccaggggtcaagcgtatgaccaatctcggagggacgatacttatcagcaaacatgcagcagaggaacagaaaagttcagcaggcacgcaggactgcaagctaggcagttccaaaccgagacacccgccagccatgtctggcaccaacaacaggggcaagtggcagaagagtttccacaccttgacatcataaacgatttgcttgaggaggaccagatcaacggcagtataccagagtcatttcatcaagattacaatgtgtttggcctgccattttcaccaagaggaaacgtgtcagatatgggaatggcttctgttagaagtcctgctcggttcaattcaaccaagtatgagtatgacggtggattctcgggggcttatgacataaatgcggtcaatgggttgagggaacggcagtttccctcgttggatagttactctaatggcctgtctgacgtgagtgcatcaaagccttggctgaatggctctcccagtccatcggtgatgagccttggggttaacacaaatggataccacccccaggttgcggactaccccagtctgggaaatggggtgaacggagtctccttgtggcgccgccatgctaacgggcgctggtaatgcgaggtgcctgtatacaatcatacagatggaataatgtttgttgtaacaaatggtttcgggcctgagctgatgtgccatgtaattaaaagttttaagttttaaaagggaaagaaagcgatacatgctgcaaaatctgccccgtgatttggttaatttgattgcttttctggttaaactctgttc

SEQ ID NO: 216071 - DNA, 4302 bp, Zea Mays
accacggcatccaccattccagctccaggccaggagaaaacgttccgggactgggactgcgttcaccttgctttttcttcccacgctcaccccgcaccgcgtgccctctctggctctctccctctcgtggggacgactgggcgaccgccgccgccgccgccttacgccaggtgcccaggtcttagtcggccccttcgccggcgacgaggacctaccagctgtgaataaggttgtctggaacggccgtgggctctgcggatggcaggttctgtggtaacggatgattcagctgctagcacaactggaatgagggatgatgaaaacagtctctctggcgagtccttctctgagtggaggtcctgtgatagggcagacagcgataccccttcaacatccccacccttctgggatagcgatggtgatgatgatgatcctggcagagtgtggcatctgccagctggtgtgaaggaggatgagaaggtgcaggtggagacgtggaagaagggggatggtggtgatggcccaaagccttcagaattgtttggacatcacacttggaggattgaaaacttctcaaaggagaagaaaagagaaatgaaaagtgagccatttgaagctggtggttacaaatggtatattcttgtataccctcaaggatgtgatgtctctaatcatctttcattattcctttgcgttgctaatcatgacaaacttctcccaggatggagtcattttgcacagttcactatagctgtagccaatatagatcctaaaaagatgaagtactcagatactttgcataggttttggaagaaggaacatgattggggatggaaaaagtttatggagctgtcaaagattcaggatggttttcttgttgacgatgttcttgaaatcatagctcaagttcaggtcatcagggagaaagtggatagaccttttcgttgccttgatcgtccttatcggagagaattaatccgcatctatatgacaaatgtggaacaaatctaccgacgtttcgttgaggagcgaagaagtaaattaagcaagctcattgaggacaaaatgaaatggtccagtttccgtgctttctggtcagcaattgacccaaacaccaggcatcacatgtccagggaaaagactgagactatattgaaaattttagtgaagcaattctttgtagagaaagaagttacttccacattagtgatggactctttgtatacaagtctgaaggcacttgaataccggatgaagagcaagaaatgcaaaacaaaattagcagatttggaagaactacctgcgcctatggtccatgttgacatggacatgtttgttttggctgatgatgttatagctttgcttgagagggcagccttagaacccttgccttgtcaacctgtagcccccaaggatgacaaaacttcccaaagccgcatgaaggatggaagttctggcgaggtttacaaagtttctatggagcgtgaggaaagacgcctaactgagcttgctcagaagatactagagacatttgtgctatctcatatatttagcggaattgaagttgcataccaagaagctgttgctttgaaaaggcaagaagagcttattcgtgaagaggaggaggaggctggacttcttgaacatcagatgaaggggaagcgtggtggtggtgcaaatgaaaaggacaagcgtgccaagaaaaagcagaccaagcaaaagaagaacaaccgtaaggctaaagacaaggaaagagatgtgaaatgtgaggttaaaattctggaaaggcttcatgatgaaactgttattgataacagtgatggcttaccagctaaggtggaagtgatagccaaggttgatgccttggaagaaggttcttcagatgggtcagacatgccaaatagtgttacaggtggttcaggccgcaatagttctggctgctgcacagctccaaaactggatcaggatactgttctgcttaccttgagagataaacttcgtaagctagggcagcgtctgcaagagaaaaacattgaggggcagaaacttctcaaagctcattttgaagctagggacacaaaagtgaaggtagaagaatcttctgactcatctaattctttggataggccacctgatgttccagagagctcgatgcattcttcagaagatacagttgatcttaaagttaatggaacaccaaataaggatgcctctgtggtcaaccctgtcctggaggaatctgtttcaggcataccagtcactgcaaagaatgaatccttgccttctgccagaacaaaagaaggcccagtttcaaacaaagataacgcatcaagtttgaaaatgaaaaccatggcatcttgcttgaaattgcatccagctgatgtggataaagatgccccttttccttctaaatcaccacgaatcaatagggctgctccagttccctcgaagttaccttcggctgataaagctactccagttcttccaaaatcatctctgtcagtaaacaaagcagctctggtccgtcccaaatctccagcagttgacaaagcaactccagtttgtcctgaatctccagcagttgacaaagtaactccagttcgtcccagatctccagcagttgacaaagcaactccagttcgttctcaatctccagcagttgacaaagctactcatgtttgccctcaatctccatcagttgacaaggcaactccatccattgacaaagcaactccagttcgcccaaaatctccagccatagataaagtaactccaattcctcccaaatctccaccagttgacaaagcctctccagcaccaccaaaatcactatcaggtgctaaagatgtgcctgttccttcaaggtcgctgcaaattgataggttcattccagcccccccaagattatcgcaagttgataaagctgctctgccttcttcagaacagccacatatatctccagctactaattctgaagcccaaggggcaactacttctaggaaggtcacagccagctcagttttggaggttgctgcagcatcgaggccttcaagtgctcctgtgttacccacaccaagatcaactgcaccagttgcttcacatattcaaacttccacgttgctttcccgctcgatgagtgaggcagctgggagaaggtcagtaaatgatccttccttttctgccccatcttatactccccagacctaccgaaatgcaataattggtaagactggtctggctactacctctgcaaaccttgcatatcagtcctattctctgggtcaagatactgctccttcacagcctctatcagcatatgcatcaagcacagcagtcatgatgcctcctgctggaagatctgatcaatcatcagctaggcatggattcaagtctgggtctggtaagctagaagcacatgacagctggcagcagtggaaaggtgataataatgttgatatgcatctctggagggatcacactacctatcaacaaatgaccaggggtcaagcgtatgaccaatctcggagggacgatacttatcagcaaacatgcagcagaggaacagaaaagttcagcaggcacgcaggactgcaagctaggcagttccaaaccgagacacccgccagccatgtctggcaccaacaacaggggcaagtggcagaagagtttccacaccttgacatcataaacgatttgcttgaggaggaccagatcaacggcagtataccagagtcatttcatcaagattacaatgtgtttggcctgccattttcaccaagaggaaacgtgtcagatatgggaatggcttctgttagaagtcctgctcggttcaattcaaccaagtatgagtatgacggtggattctcgggggcttatgacataaatgcggtcaatgggttgagggaacggcagtttccctcgttggatagttactctaatggcctgtctgacgtgagtgcatcaaagccttggctgaatggctctcccagtccatcggtgatgagccttggggttaacacaaatggataccacccccaggttgcggactaccccagtctgggaaatggggtgaacggagtctccttgtggcgccgccatgctaacgggcgctggtaatgcgaggtgcctgtatacaatcatacagatggaataatgtttgttgtaacaaatggtttcgggcctgagctgatgtgccatgtaattaaaagttttaagttttaaaagggaaagaaagcgatacatgctgcaaaatctgccccgtgatttggttaatttgattgcttttctggttaaactctgttc

SEQ ID NO: 216072 - DNA, 4266 bp, Zea Mays
gcacgctgcctgcatcatcacagccaaaccacggcatccaccattccagctccaggccaggagaaaacgttccgggactgggactgcgttcaccttgctttttcttcccacgctcaccccgcaccgcgtgccctctctggctctctccctctcgtggggacgactgggcgaccgccgccgccgccgccttacgccaggtgcccaggtcttagtcggccccttcgccggcgacgaggacctaccagctgtgaataaggttgtctggaacggccgtgggctctgcggatggcaggttctgtggtaacggatgattcagctgctagcacaactggaatgagggatgatgaaaacagtctctctggcgagtccttctctgagtggaggtcctgtgatagggcagacagcgataccccttcaacatccccacccttctgggatagcgatggtgatgatgatgatcctggcccaaagccttcagaattgtttggacatcacacttggaggattgaaaacttctcaaaggagaagaaaagagaaatgaaaagtgagccatttgaagctggtggttacaaatggtatattcttgtataccctcaaggatgtgatgtctctaatcatctttcattattcctttgcgttgctaatcatgacaaacttctcccaggatggagtcattttgcacagttcactatagctgtagccaatatagatcctaaaaagatgaagtactcaggtgagctgaacttggtttgttttcttcttggaaggttttggaagaaggaacatgattggggatggaaaaagtttatggagctgtcaaagattcaggatggttttcttgttgacgatgttcttgaaatcatagctcaagttcaggtcatcagggagaaagtggatagaccttttcgttgccttgatcgtccttatcggagagaattaatccgcatctatatgacaaatgtggaacaaatctaccgacgtttcgttgaggagcgaagaagtaaattaagcaagctcattgaggacaaaatgaaatggtccagtttccgtgctttctggtcagcaattgacccaaacaccaggcatcacatgtccagggaaaagactgagactatattgaaaattttagtgaagcaattctttgtagagaaagaagttacttccacattagtgatggactctttgtatacaagtctgaaggcacttgaataccggatgaagagcaagaaatgcaaaacaaaattagcagatttggaagaactacctgcgcctatggtccatgttgacatggacatgtttgttttggctgatgatgttatagctttgcttgagagggcagccttagaacccttgccttgtcaacctgtagcccccaaggatgacaaaacttcccaaagccgcatgaaggatggaagttctggcgaggtttacaaagtttctatggagcgtgaggaaagacgcctaactgagcttgctcagaagatactagagacatttgtgctatctcatatatttagcggaattgaagttgcataccaagaagctgttgctttgaaaaggcaagaagagcttattcgtgaagaggaggaggaggctggacttcttgaacatcagatgaaggggaagcgtggtggtggtgcaaatgaaaaggacaagcgtgccaagaaaaagcagaccaagcaaaagaagaacaaccgtaaggctaaagacaaggaaagagatgtgaaatgtgaggttaaaattctggaaaggcttcatgatgaaactgttattgataacagtgatggcttaccagctaaggtggaagtgatagccaaggttgatgccttggaagaaggttcttcagatgggtcagacatgccaaatagtgttacaggtggttcaggccgcaatagttctggctgctgcacagctccaaaactggatcaggatactgttctgcttaccttgagagataaacttcgtaagctagggcagcgtctgcaagagaaaaacattgaggggcagaaacttctcaaagctcattttgaagctagggacacaaaagtgaaggtagaagaatcttctgactcatctaattctttggataggccacctgatgttccagagagctcgatgcattcttcagaagatacagttgatcttaaagttaatggaacaccaaataaggatgcctctgtggtcaaccctgtcctggaggaatctgtttcaggcataccagtcactgcaaagaatgaatccttgccttctgccagaacaaaagaaggcccagtttcaaacaaagataacgcatcaagtttgaaaatgaaaaccatggcatcttgcttgaaattgcatccagctgatgtggataaagatgccccttttccttctaaatcaccacgaatcaatagggctgctccagttccctcgaagttaccttcggctgataaagctactccagttcttccaaaatcatctctgtcagtaaacaaagcagctctggtccgtcccaaatctccagcagttgacaaagcaactccagtttgtcctgaatctccagcagttgacaaagtaactccagttcgtcccagatctccagcagttgacaaagcaactccagttcgttctcaatctccagcagttgacaaagctactcatgtttgccctcaatctccatcagttgacaaggcaactccatccattgacaaagcaactccagttcgcccaaaatctccagccatagataaagtaactccaattcctcccaaatctccaccagttgacaaagcctctccagcaccaccaaaatcactatcaggtgctaaagatgtgcctgttccttcaaggtcgctgcaaattgataggttcattccagcccccccaagattatcgcaagttgataaagctgctctgccttcttcagaacagccacatatatctccagctactaattctgaagcccaaggggcaactacttctaggaaggtcacagccagctcagttttggaggttgctgcagcatcgaggccttcaagtgctcctgtgttacccacaccaagatcaactgcaccagttgcttcacatattcaaacttccacgttgctttcccgctcgatgagtgaggcagctgggagaaggtcagtaaatgatccttccttttctgccccatcttatactccccagacctaccgaaatgcaataattggtaagactggtctggctactacctctgcaaaccttgcatatcagtcctattctctgggtcaagatactgctccttcacagcctctatcagcatatgcatcaagcacagcagtcatgatgcctcctgctggaagatctgatcaatcatcagctaggcatggattcaagtctgggtctggtaagctagaagcacatgacagctggcagcagtggaaaggtgataataatgttgatatgcatctctggagggatcacactacctatcaacaaatgaccaggggtcaagcgtatgaccaatctcggagggacgatacttatcagcaaacatgcagcagaggaacagaaaagttcagcaggcacgcaggactgcaagctaggcagttccaaaccgagacacccgccagccatgtctggcaccaacaacaggggcaagtggcagaagagtttccacaccttgacatcataaacgatttgcttgaggaggaccagatcaacggcagtataccagagtcatttcatcaagattacaatgtgtttggcctgccattttcaccaagaggaaacgtgtcagatatgggaatggcttctgttagaagtcctgctcggttcaattcaaccaagtatgagtatgacggtggattctcgggggcttatgacataaatgcggtcaatgggttgagggaacggcagtttccctcgttggatagttactctaatggcctgtctgacgtgagtgcatcaaagccttggctgaatggctctcccagtccatcggtgatgagccttggggttaacacaaatggataccacccccaggttgcggactaccccagtctgggaaatggggtgaacggagtctccttgtggcgccgccatgctaacgggcgctggtaatgcgaggtgcctgtatacaatcatacagatggaataatgtttgttgtaacaaatggtttcgggcctgagctgatgtgccatgtaattaaaagttttaagttttaaaagggaaagaaagcgatacatgctgcaaaatctgccccgtgatttggttaatttgattgcttttctggttaaactctgttc

SEQ ID NO: 216073 - DNA, 4330 bp, Zea Mays
gtgtgtttaggcacgctgcctgcatcatcacagccaaaccacggcatccaccattccagctccaggccaggagaaaacgttccgggactgggactgcgttcaccttgctttttcttcccacgctcaccccgcaccgcgtgccctctctggctctctccctctcgtggggacgactgggcgaccgccgccgccgccgccttacgccaggtgcccaggtcttagtcggccccttcgccggcgacgaggacctaccagctgtgaataaggttgtctggaacggccgtgggctctgcggatggcaggttctgtggtaacggatgattcagctgctagcacaactggaatgagggatgatgaaaacagtctctctggcgagtccttctctgagtggaggtcctgtgatagggcagacagcgataccccttcaacatccccacccttctgggatagcgatggtgatgatgatgatcctggcccaaagccttcagaattgtttggacatcacacttggaggattgaaaacttctcaaaggagaagaaaagagaaatgaaaagtgagccatttgaagctggtggttacaaatggtatattcttgtataccctcaaggatgtgatgtctctaatcatctttcattattcctttgcgttgctaatcatgacaaacttctcccaggatggagtcattttgcacagttcactatagctgtagccaatatagatcctaaaaagatgaagtactcagatactttgcataggttttggaagaaggaacatgattggggatggaaaaagtttatggagctgtcaaagattcaggatggttttcttgttgacgatgttcttgaaatcatagctcaagttcaggtcatcagggagaaagtggatagaccttttcgttgccttgatcgtccttatcggagagaattaatccgcatctatatgacaaatgtggaacaaatctaccgacgtttcgttgaggagcgaagaagtaaattaagcaagctcattgaggacaaaatgaaatggtccagtttccgtgctttctggtcagcaattgacccaaacaccaggcatcacatgtccagggaaaagactgagactatattgaaaattttagtgaagcaattctttgtagagaaagaagttacttccacattagtgatggactctttgtatacaagtctgaaggcacttgaataccggatgaagagcaagaaatgcaaaacaaaattagcagatttggaagaactacctgcgcctatggtccatgttgacatggacatgtttgttttggctgatgatgttatagctttgcttgagagggcagccttagaacccttgccttgtcaacctgtagcccccaaggatgacaaaacttcccaaagccgcatgaaggatggaagttctggcgaggtttacaaagtttctatggagcgtgaggaaagacgcctaactgagcttgctcagaagatactagagacatttgtgctatctcatatatttagcggaattgaagttgcataccaagaagctgttgctttgaaaaggcaagaagagcttattcgtgaagaggaggaggaggctggacttcttgaacatcagatgaaggggaagcgtggtggtggtgcaaatgaaaaggacaagcgtgccaagaaaaagcagaccaagcaaaagaagaacaaccgtaaggctaaagacaaggaaagagatgtgaaatgtgaggttaaaattctggaaaggcttcatgatgaaactgttattgataacagtgatggcttaccagctaaggtggaagtgatagccaaggttgatgccttggaagaaggttcttcagatgggtcagacatgccaaatagaggaaaaaatcagtgtaacaagggcttaagcattagtcttgccaaagaaggtgatggtcttccctccacctctagtgttacaggtggttcaggccgcaatagttctggctgctgcacagctccaaaactggatcaggatactgttctgcttaccttgagagataaacttcgtaagctagggcagcgtctgcaagagaaaaacattgaggggcagaaacttctcaaagctcattttgaagctagggacacaaaagtgaaggtagaagaatcttctgactcatctaattctttggataggccacctgatgttccagagagctcgatgcattcttcagaagatacagttgatcttaaagttaatggaacaccaaataaggatgcctctgtggtcaaccctgtcctggaggaatctgtttcaggcataccagtcactgcaaagaatgaatccttgccttctgccagaacaaaagaaggcccagtttcaaacaaagataacgcatcaagtttgaaaatgaaaaccatggcatcttgcttgaaattgcatccagctgatgtggataaagatgccccttttccttctaaatcaccacgaatcaatagggctgctccagttccctcgaagttaccttcggctgataaagctactccagttcttccaaaatcatctctgtcagtaaacaaagcagctctggtccgtcccaaatctccagcagttgacaaagcaactccagtttgtcctgaatctccagcagttgacaaagtaactccagttcgtcccagatctccagcagttgacaaagcaactccagttcgttctcaatctccagcagttgacaaagctactcatgtttgccctcaatctccatcagttgacaaggcaactccatccattgacaaagcaactccagttcgcccaaaatctccagccatagataaagtaactccaattcctcccaaatctccaccagttgacaaagcctctccagcaccaccaaaatcactatcaggtgctaaagatgtgcctgttccttcaaggtcgctgcaaattgataggttcattccagcccccccaagattatcgcaagttgataaagctgctctgccttcttcagaacagccacatatatctccagctactaattctgaagcccaaggggcaactacttctaggaaggtcacagccagctcagttttggaggttgctgcagcatcgaggccttcaagtgctcctgtgttacccacaccaagatcaactgcaccagttgcttcacatattcaaacttccacgttgctttcccgctcgatgagtgaggcagctgggagaaggtcagtaaatgatccttccttttctgccccatcttatactccccagacctaccgaaatgcaataattggtaagactggtctggctactacctctgcaaaccttgcatatcagtcctattctctgggtcaagatactgctccttcacagcctctatcagcatatgcatcaagcacagcagtcatgatgcctcctgctggaagatctgatcaatcatcagctaggcatggattcaagtctgggtctggtaagctagaagcacatgacagctggcagcagtggaaaggtgataataatgttgatatgcatctctggagggatcacactacctatcaacaaatgaccaggggtcaagcgtatgaccaatctcggagggacgatacttatcagcaaacatgcagcagaggaacagaaaagttcagcaggcacgcaggactgcaagctaggcagttccaaaccgagacacccgccagccatgtctggcaccaacaacaggggcaagtggcagaagagtttccacaccttgacatcataaacgatttgcttgaggaggaccagatcaacggcagtataccagagtcatttcatcaagattacaatgtgtttggcctgccattttcaccaagaggaaacgtgtcagatatgggaatggcttctgttagaagtcctgctcggttcaattcaaccaagtatgagtatgacggtggattctcgggggcttatgacataaatgcggtcaatgggttgagggaacggcagtttccctcgttggatagttactctaatggcctgtctgacgtgagtgcatcaaagccttggctgaatggctctcccagtccatcggtgatgagccttggggttaacacaaatggataccacccccaggttgcggactaccccagtctgggaaatggggtgaacggagtctccttgtggcgccgccatgctaacgggcgctggtaatgcgaggtgcctgtatacaatcatacagatggaataatgtttgttgtaacaaatggtttcgggcctgagctgatgtgccatgtaattaaaagttttaagttttaaaagggaaagaaagcgatacatgctgcaaaatctgccccgtgatttggttaatttgattgcttttctggttaaactctgttc

SEQ ID NO: 216074 - DNA, 4264 bp, Zea Mays
tttggatgcgtgtgtttaggcacgctgcctgcatcatcacagccaaaccacggcatccaccattccagctccaggccaggagaaaacgttccgggactgggactgcgttcaccttgctttttcttcccacgctcaccccgcaccgcgtgccctctctggctctctccctctcgtggggacgactgggcgaccgccgccgccgccgccttacgccaggtgcccaggtcttagtcggccccttcgccggcgacgaggacctaccagctgtgaataaggttgtctggaacggccgtgggctctgcggatggcaggttctgtggtaacggatgattcagctgctagcacaactggaatgagggatgatgaaaacagtctctctggcgagtccttctctgagtggaggtcctgtgatagggcagacagcgataccccttcaacatccccacccttctgggatagcgatggtgatgatgatgatcctggcccaaagccttcagaattgtttggacatcacacttggaggattgaaaacttctcaaaggagaagaaaagagaaatgaaaagtgagccatttgaagctggtggttacaaatggtatattcttgtataccctcaaggatgtgatgtctctaatcatctttcattattcctttgcgttgctaatcatgacaaacttctcccaggatggagtcattttgcacagttcactatagctgtagccaatatagatcctaaaaagatgaagtactcagatactttgcataggttttggaagaaggaacatgattggggatggaaaaagtttatggagctgtcaaagattcaggatggttttcttgttgacgatgttcttgaaatcatagctcaagttcaggtcatcagggagaaagtggatagaccttttcgttgccttgatcgtccttatcggagagaattaatccgcatctatatgacaaatgtggaacaaatctaccgacgtttcgttgaggagcgaagaagtaaattaagcaagctcattgaggacaaaatgaaatggtccagtttccgtgctttctggtcagcaattgacccaaacaccaggcatcacatgtccagggaaaagactgagactatattgaaaattttagtgaagcaattctttgtagagaaagaagttacttccacattagtgatggactctttgtatacaagtctgaaggcacttgaataccggatgaagagcaagaaatgcaaaacaaaattagcagatttggaagaactacctgcgcctatggtccatgttgacatggacatgtttgttttggctgatgatgttatagctttgcttgagagggcagccttagaacccttgccttgtcaacctgtagcccccaaggatgacaaaacttcccaaagccgcatgaaggatggaagttctggcgaggtttacaaagtttctatggagcgtgaggaaagacgcctaactgagcttgctcagaagatactagagacatttgtgctatctcatatatttagcggaattgaagttgcataccaagaagctgttgctttgaaaaggcaagaagagcttattcgtgaagaggaggaggaggctggacttcttgaacatcagatgaaggggaagcgtggtggtggtgcaaatgaaaaggacaagcgtgccaagaaaaagcagaccaagcaaaagaagaacaaccgtaaggctaaagacaaggaaagagatgtgaaatgtgaggttaaaattctggaaaggcttcatgatgaaactgttattgataacagtgatggcttaccagctaaggtggaagtgatagccaaggttgatgccttggaagaaggttcttcagatgggtcagacatgccaaatagtgttacaggtggttcaggccgcaatagttctggctgctgcacagctccaaaactggatcaggatactgttctgcttaccttgagagataaacttcgtaagctagggcagcgtctgcaagagaaaaacattgaggggcagaaacttctcaaagctcattttgaagctagggacacaaaagtgaaggtagaagaatcttctgactcatctaattctttggataggccacctgatgttccagagagctcgatgcattcttcagaagatacagttgatcttaaagttaatggaacaccaaataaggatgcctctgtggtcaaccctgtcctggaggaatctgtttcaggcataccagtcactgcaaagaatgaatccttgccttctgccagaacaaaagaaggcccagtttcaaacaaagataacgcatcaagtttgaaaatgaaaaccatggcatcttgcttgaaattgcatccagctgatgtggataaagatgccccttttccttctaaatcaccacgaatcaatagggctgctccagttccctcgaagttaccttcggctgataaagctactccagttcttccaaaatcatctctgtcagtaaacaaagcagctctggtccgtcccaaatctccagcagttgacaaagcaactccagtttgtcctgaatctccagcagttgacaaagtaactccagttcgtcccagatctccagcagttgacaaagcaactccagttcgttctcaatctccagcagttgacaaagctactcatgtttgccctcaatctccatcagttgacaaggcaactccatccattgacaaagcaactccagttcgcccaaaatctccagccatagataaagtaactccaattcctcccaaatctccaccagttgacaaagcctctccagcaccaccaaaatcactatcaggtgctaaagatgtgcctgttccttcaaggtcgctgcaaattgataggttcattccagcccccccaagattatcgcaagttgataaagctgctctgccttcttcagaacagccacatatatctccagctactaattctgaagcccaaggggcaactacttctaggaaggtcacagccagctcagttttggaggttgctgcagcatcgaggccttcaagtgctcctgtgttacccacaccaagatcaactgcaccagttgcttcacatattcaaacttccacgttgctttcccgctcgatgagtgaggcagctgggagaaggtcagtaaatgatccttccttttctgccccatcttatactccccagacctaccgaaatgcaataattggtaagactggtctggctactacctctgcaaaccttgcatatcagtcctattctctgggtcaagatactgctccttcacagcctctatcagcatatgcatcaagcacagcagtcatgatgcctcctgctggaagatctgatcaatcatcagctaggcatggattcaagtctgggtctggtaagctagaagcacatgacagctggcagcagtggaaaggtgataataatgttgatatgcatctctggagggatcacactacctatcaacaaatgaccaggggtcaagcgtatgaccaatctcggagggacgatacttatcagcaaacatgcagcagaggaacagaaaagttcagcaggcacgcaggactgcaagctaggcagttccaaaccgagacacccgccagccatgtctggcaccaacaacaggggcaagtggcagaagagtttccacaccttgacatcataaacgatttgcttgaggaggaccagatcaacggcagtataccagagtcatttcatcaagattacaatgtgtttggcctgccattttcaccaagaggaaacgtgtcagatatgggaatggcttctgttagaagtcctgctcggttcaattcaaccaagtatgagtatgacggtggattctcgggggcttatgacataaatgcggtcaatgggttgagggaacggcagtttccctcgttggatagttactctaatggcctgtctgacgtgagtgcatcaaagccttggctgaatggctctcccagtccatcggtgatgagccttggggttaacacaaatggataccacccccaggttgcggactaccccagtctgggaaatggggtgaacggagtctccttgtggcgccgccatgctaacgggcgctggtaatgcgaggtgcctgtatacaatcatacagatggaataatgtttgttgtaacaaatggtttcgggcctgagctgatgtgccatgtaattaaaagttttaagttttaaaagggaaagaaagcgatacatgctgcaaaatctgccccgtgatttggttaatttgattgcttttctggttaaactctgttc

SEQ ID NO: 216075 - DNA, 4298 bp, Zea Mays
atttggtttggatgcgtgtgtttaggcacgctgcctgcatcatcacagccaaaccacggcatccaccattccagctccaggccaggagaaaacgttccgggactgggactgcgttcaccttgctttttcttcccacgctcaccccgcaccgcgtgccctctctggctctctccctctcgtggggacgactgggcgaccgccgccgccgccgccttacgccaggtgcccaggtcttagtcggccccttcgccggcgacgaggacctaccaggttctgtggtaacggatgattcagctgctagcacaactggaatgagggatgatgaaaacagtctctctggcgagtccttctctgagtggaggtcctgtgatagggcagacagcgataccccttcaacatccccacccttctgggatagcgatggtgatgatgatgatcctggcccaaagccttcagaattgtttggacatcacacttggaggattgaaaacttctcaaaggagaagaaaagagaaatgaaaagtgagccatttgaagctggtggttacaaatggtatattcttgtataccctcaaggatgtgatgtctctaatcatctttcattattcctttgcgttgctaatcatgacaaacttctcccaggatggagtcattttgcacagttcactatagctgtagccaatatagatcctaaaaagatgaagtactcagatactttgcataggttttggaagaaggaacatgattggggatggaaaaagtttatggagctgtcaaagattcaggatggttttcttgttgacgatgttcttgaaatcatagctcaagttcaggtcatcagggagaaagtggatagaccttttcgttgccttgatcgtccttatcggagagaattaatccgcatctatatgacaaatgtggaacaaatctaccgacgtttcgttgaggagcgaagaagtaaattaagcaagctcattgaggacaaaatgaaatggtccagtttccgtgctttctggtcagcaattgacccaaacaccaggcatcacatgtccagggaaaagactgagactatattgaaaattttagtgaagcaattctttgtagagaaagaagttacttccacattagtgatggactctttgtatacaagtctgaaggcacttgaataccggatgaagagcaagaaatgcaaaacaaaattagcagatttggaagaactacctgcgcctatggtccatgttgacatggacatgtttgttttggctgatgatgttatagctttgcttgagagggcagccttagaacccttgccttgtcaacctgtagcccccaaggatgacaaaacttcccaaagccgcatgaaggatggaagttctggcgaggtttacaaagtttctatggagcgtgaggaaagacgcctaactgagcttgctcagaagatactagagacatttgtgctatctcatatatttagcggaattgaagttgcataccaagaagctgttgctttgaaaaggcaagaagagcttattcgtgaagaggaggaggaggctggacttcttgaacatcagatgaaggggaagcgtggtggtggtgcaaatgaaaaggacaagcgtgccaagaaaaagcagaccaagcaaaagaagaacaaccgtaaggctaaagacaaggaaagagatgtgaaatgtgaggttaaaattctggaaaggcttcatgatgaaactgttattgataacagtgatggcttaccagctaaggtggaagtgatagccaaggttgatgccttggaagaaggttcttcagatgggtcagacatgccaaatagaggaaaaaatcagtgtaacaagggcttaagcattagtcttgccaaagaaggtgatggtcttccctccacctctagtgttacaggtggttcaggccgcaatagttctggctgctgcacagctccaaaactggatcaggatactgttctgcttaccttgagagataaacttcgtaagctagggcagcgtctgcaagagaaaaacattgaggggcagaaacttctcaaagctcattttgaagctagggacacaaaagtgaaggtagaagaatcttctgactcatctaattctttggataggccacctgatgttccagagagctcgatgcattcttcagaagatacagttgatcttaaagttaatggaacaccaaataaggatgcctctgtggtcaaccctgtcctggaggaatctgtttcaggcataccagtcactgcaaagaatgaatccttgccttctgccagaacaaaagaaggcccagtttcaaacaaagataacgcatcaagtttgaaaatgaaaaccatggcatcttgcttgaaattgcatccagctgatgtggataaagatgccccttttccttctaaatcaccacgaatcaatagggctgctccagttccctcgaagttaccttcggctgataaagctactccagttcttccaaaatcatctctgtcagtaaacaaagcagctctggtccgtcccaaatctccagcagttgacaaagcaactccagtttgtcctgaatctccagcagttgacaaagtaactccagttcgtcccagatctccagcagttgacaaagcaactccagttcgttctcaatctccagcagttgacaaagctactcatgtttgccctcaatctccatcagttgacaaggcaactccatccattgacaaagcaactccagttcgcccaaaatctccagccatagataaagtaactccaattcctcccaaatctccaccagttgacaaagcctctccagcaccaccaaaatcactatcaggtgctaaagatgtgcctgttccttcaaggtcgctgcaaattgataggttcattccagcccccccaagattatcgcaagttgataaagctgctctgccttcttcagaacagccacatatatctccagctactaattctgaagcccaaggggcaactacttctaggaaggtcacagccagctcagttttggaggttgctgcagcatcgaggccttcaagtgctcctgtgttacccacaccaagatcaactgcaccagttgcttcacatattcaaacttccacgttgctttcccgctcgatgagtgaggcagctgggagaaggtcagtaaatgatccttccttttctgccccatcttatactccccagacctaccgaaatgcaataattggtaagactggtctggctactacctctgcaaaccttgcatatcagtcctattctctgggtcaagatactgctccttcacagcctctatcagcatatgcatcaagcacagcagtcatgatgcctcctgctggaagatctgatcaatcatcagctaggcatggattcaagtctgggtctggtaagctagaagcacatgacagctggcagcagtggaaaggtgataataatgttgatatgcatctctggagggatcacactacctatcaacaaatgaccaggggtcaagcgtatgaccaatctcggagggacgatacttatcagcaaacatgcagcagaggaacagaaaagttcagcaggcacgcaggactgcaagctaggcagttccaaaccgagacacccgccagccatgtctggcaccaacaacaggggcaagtggcagaagagtttccacaccttgacatcataaacgatttgcttgaggaggaccagatcaacggcagtataccagagtcatttcatcaagattacaatgtgtttggcctgccattttcaccaagaggaaacgtgtcagatatgggaatggcttctgttagaagtcctgctcggttcaattcaaccaagtatgagtatgacggtggattctcgggggcttatgacataaatgcggtcaatgggttgagggaacggcagtttccctcgttggatagttactctaatggcctgtctgacgtgagtgcatcaaagccttggctgaatggctctcccagtccatcggtgatgagccttggggttaacacaaatggataccacccccaggttgcggactaccccagtctgggaaatggggtgaacggagtctccttgtggcgccgccatgctaacgggcgctggtaatgcgaggtgcctgtatacaatcatacagatggaataatgtttgttgtaacaaatggtttcgggcctgagctgatgtgccatgtaattaaaagttttaagttttaaaagggaaagaaagcgatacatgctgcaaaatctgccccgtgatttggttaatttgattgcttttctggttaaactctgttc

SEQ ID NO: 216076 - DNA, 2141 bp, Zea Mays
ggcagattaacgtgctgcatggcaactgaatccggcaaaaccgattcgtttccccgcgcgcagccgtccgccgccacgcgatcgccgcccgctgtcagccctcccgatcccgactgcgactgcgccagctaccgcatggacgaacgccggatgacgcggccccacccgcccgacgcgccggcgcgacccgacgcggccctgcccaggcggccggacgtgcaaagttgcccaggggcggcctgcgatgagctccagagggagaagcggaaggaagggaaggggaaggggaagcggaagcggaagcggaaggatgacggcgagatggaggggacggggaaggacaagacgatggggaagaaggaaaagaacggggaagaaaagctgaagaagggcaagggaggcgggattctgacaaacaagcttttctcagagctctgcatctcggagctcactgccaaggccatcagagagatgaactatacccacctcaccaagattcaagctagatcaataccgcatctgatggaaggaagtgacgtgatgggttcagcaaagactggctcaggcaagacccttgctttccttgtaccagcgattgaactgctccacagatcgcacttcttgccaaggaacggaactggagttgttgtggtttgcccaacaagggagcttgctatccagacacacaatgttgccaaggaattaatgaagtatcactcgcaaactcttggatatgtaattggtggcactagcatgagaagtgaggccaaccagctcgcagaagggatcaatattttagttgccacaccaggcaggctcctggaccatctgcgaaataccagtagtttcaaatacaaagagctaaagtgccttataattgatgaagctgatcggatacttgagcaaaatttcgaggaggacatgaaacaaatatttaaacgcctccctcaggacagacaaagtgttcttttttctgccacgcagactaaaaaggttcaagatttcgcgaacttcacgtttgggaaaaatgaagaacgacaacggaaacttgtttatgttggagttgacgattctgaattaaagcctaccgttgagggcttgcagcagggctactgtgtcattccaagcgagaaaaggtttcttgttctgtacactttcctaagattgaaagcgcgcgaggcgcagacggcgaaggccgccctaagaggggaagtgggtgaggagcagaagaaggtgaagatcatggtgttcttctcgtcatgtagctcagtcaaattccacgcagaactcctaaacttcctcgggatcgagtgttacgagatccatgggcaactgaagcagcagaaacgaaccagtacattcttccgatttctgaaggaaaaaagtggcatcttgttgtgcactaacgtggcagcacgtggccttgatattcctgaagtcgactatattgtgcagtacgatcctccagatgacccaaaggattacattcacagggttggtcgtaccgcacgaggtgataaaggcagaggaagcgcattactgttcttgctaccggaggaattaaagctgctcattcacctgcaggcagccagaatttctctgactgaatatgtgttcaccgaaaagcatgtcccaaagtcactatcacagctcgagaatatcgttagtgggaattactttctaaacaagtctgccaaggaagcctataggtcctaccttttggcatacaactcacactctatgaaagatatttttgatatccatcagcttgatctcaagaaagtagcggcgtcattctgttttaaggagcctccgaaagtgaatctagacctggagagcagcgcatcaagacatcgaaagatgaggaaagtgttcggcgggcagagccatggaattggcgcttcaaacccctatggaaggagaggcgtatatgatcgcagcaaatttgcaagattctgaaacgacatcatacgttttaggcggtgtatggttctctctgtaaggccttgtttgggttaaaaggtattgaagtggattgaagtgtattttagggattgaaagagaaattagttcatattacacttcaatacaccttataccacctcaatccactccaatccaagattacccaaacaagccct

SEQ ID NO: 216077 - DNA, 1774 bp, Zea Mays
aaagaatccagcggagaatgatattcagatgcttgtcccaacagaaaggcaacagtaactttcttccattgggtgctcttgtattccaggaaattgcctggttctactacttgaaagattcaagctatatgcatctacacatgacatgggttctcgagaaaggatgttatttgaccttaacaaactcccagcagaagttgaagaagaagctgctgctgtcgtaccaaatgaatctgctgttgttgtgtcacaagaagctgctgttgtcgcgtcacaagctgctgttgttgtgtcacaacctcagaaatccctccctgttccaatgacgtatgccccatcattgtttcagccagggggaggatcacagtcacaggggatattgaacgataataatgccttcaagcatgcatccattggatctggctttcagccctttgtgaagaacaacaaagattcaaacaatacaaaggagccgatgaaggtggaagataatcagaattctagtatacaatcaacggccatggtaaacaatcgaaccactgatagtgcttctcctaaggctgaaacttgcaatcaggtgtcacaagccgttgaaagagaagaaggagaatgctttgatgcagatagcatttctgaaaatgcagggagtagcaacaaagatgagatcactggtacggcaagcactcatttgaagaaagaatcccaagagagcgagccccatctcattaaatctggtggtgtgactaaagatgatactgctgctgaatgtagtgatgctgaaatggttgatgcgtctaaagatctggttcatggttcttctacaggatcagagaacatgcaaatttctgaatgtaaaggaaatcagcctggtgatgatctagatccttgcaacaggtcaaaggatgttaaaggagtggaagccaattatgcgtttaggtttgcgagcaatcccgcaaagagacccaagttaaatgaacacaaagaggccatgcttggcaaaaaacgagctaggcaaaccgtcttcatcggtgtagaggatgcgaaacaagctggtactatgaagacgacaacgcccaggaggcagtcgtcctttccagcaccgattgttacacgtactgtgaaggaagcttctcgtggtattggtgaaaaggctgcagaaaaacaaaatcagcaagcaatcagagatcagagacaacctgaaatgatgggatcagaacgaagcaattctgtagatcctagtgaccaacacactgaacccaatggtgacactgagttgggtacccagggctggtcaaagaaaatgaatacagaagagccagcctcagatggttatcagcatcctgcccaaagacaagcttcattaaagcaaaccatggacttcaagcagccaaagggccgaccattctcttcccaaagaacaattctaacagggcaaaacaatgctgatcagaagccagccaacaaaaggtctattatttctaaaaagaaaacttttttaaacaatgtacagtatcaggactcatctattgagcgacttataagggaagtgacaaacgacaagttctggcataatccagagctcagctttatagttcgtatgaggagagtcttgaggctgtgggaagggatgcacatgtagcggtgcaagtaaaaaccgtggataaacgtgaaagaggttggtatgatgttgtcgtcctaccgatacatgaacgtaaatggaatttcaaagaaggcgatgttgctattctgtcgtttccacatcctggttcaggta

SEQ ID NO: 216078 - DNA, 1870 bp, Zea Mays
aaagaatccagcggagaatgatattcagtgcagatgcttgtcccaacagaaaggcaacagtaactttcttccattgggtgctcttgtattccaggaaattgcctggttctactacttgaaagattcaagctatatgcatctacacatgacatgggttctcgagaaaggatgttatttgaccttaacaaactcccagcagaagttgaagaagaagctgctgctgtcgtaccaaatgaatctgctgttgttgtgtcacaagaagctgctgttgtcgcgtcacaagctgctgttgttgtgtcacaacctcagaaatccctccctgttccaatgacgtatgccccatcattgtttcagccagggggaggatcacagtcacaggggatattgaacgataataatgccttcaagcatgcatccattggatctggctttcagccctttgtgaagaacaacaaagattcaaacaatacaaaggagccgatgaaggtggaagataatcagaattctagtatacaatcaacggccatggtaaacaatcgaaccactgatagtgcttctcctaaggctgaaacttgcaatcaggtgtcacaagccgttgaaagagaagaaggagaatgctttgatgcagatagcatttctgaaaatgcagggagtagcaacaaagatgagatcactggtacggcaagcactcatttgaagaaagaatcccaagagagcgagccccatctcattaaatctggtggtgtgactaaagatgatactgctgctgaatgtagtgatgctgaaatggttgatgcgtctaaagatctggttcatggttcttctacaggatcagagaacatgcaaatttctgaatgtaaaggaaatcagcctggtgatgatctagatccttgcaacaggtcaaaggatgttaaaggagtggaagccaattatgcgtttaggtttgcgagcaatcccgcaaagagacccaagttaaatgaacacaaagaggccatgcttggcaaaaaacgagctaggcaaaccgtcttcatcggtgtagaggatgcgaaacaagctggtactatgaagacgacaacgcccaggaggcagtcgtcctttccagcaccgattgttacacgtactgtgaaggaagcttctcgtggtattggtgaaaaggctgcagaaaaacaaaatcagcaagcaatcagagatcagagacaacctgaaatgatgggatcagaacgaagcaattctgtagatcctagtgaccaacacactgaacccaatggtgacactgagttgggtacccagggctggtcaaagaaaatgaatacagaagagccagcctcagatggttatcagcatcctgcccaaagacaagcttcattaaagcaaaccatggacttcaagcagccaaagggccgaccattctcttcccaaagaacaattctaacagggcaaaacaatgctgatcagaagccagccaacaaaaggtctattatttctaaaaagaaaacttttttaaacaatgtacagtatcaggactcatctattgagcgacttataagggaagtgacaaacgacaagttctggcataatccagaggaggctgaacttgagtgtgttcctggaagttttgaatctgctgaggagtacattagagtttttgagcctttgctttttgaggaatgcagagctcagctttatagttcgtatgaggagagtcttgaggctgtgggaagggatgcacatgtagcggtgcaagtaaaaaccgtggataaacgtgaaagaggttggtatgatgttgtcgtcctaccgatacatgaacgtaaatggaatttcaaagaaggcgatgttgctattctgtcgtttccacatcctggttcaggta

SEQ ID NO: 216079 - DNA, 1978 bp, Zea Mays
gtaaatacccgcacggccatagatccgcacgctaccctcggcatcgttgccggctgcccttcctcgctccccaccactccgttccatccctcgcctgccttcgcacgggtgtgccgcccgttcgacggccacgccgcgccgctgccccggcgcccgcccttcctcgtcgagctcgggatcgacgtctcccacacctcctcgcgcccgttccgggctccgcatccggcccctccccgtccccaacaccattccgcagcaggcgaccagcacaacatccggaatcccccgccgcgccttcggctcgtcgtcgctcctcctccgcgtcccgccaccccccgcacgatgcttgtcccaacagaaaggcaacagtaactttcttccattgggtgctcttgtattccaggaaattgcctggttctactacttgaaagattcaagctatatgcatctacacatgacatgggttctcgagaaaggatgttatttgaccttaacaaactcccagcagaagttgaagaagaagctgctgctgtcgtaccaaatgaatctgctgttgttgtgtcacaagaagctgctgttgtcgcgtcacaagctgctgttgttgtgtcacaacctcagaaatccctccctgttccaatgacgtatgccccatcattgtttcagccagggggaggatcacagtcacaggggatattgaacgataataatgccttcaagcatgcatccattggatctggctttcagccctttgtgaagaacaacaaagattcaaacaatacaaaggagccgatgaaggtggaagataatcagaattctagtatacaatcaacggccatggtaaacaatcgaaccactgatagtgcttctcctaaggctgaaacttgcaatcaggtgtcacaagccgttgaaagagaagaaggagaatgctttgatgcagatagcatttctgaaaatgcagggagtagcaacaaagatgagatcactggtacggcaagcactcatttgaagaaagaatcccaagagagcgagccccatctcattaaatctggtggtgtgactaaagatgatactgctgctgaatgtagtgatgctgaaatggttgatgcgtctaaagatctggttcatggttcttctacaggatcagagaacatgcaaatttctgaatgtaaaggaaatcagcctggtgatgatctagatccttgcaacaggtcaaaggatgttaaaggagtggaagccaattatgcgtttaggtttgcgagcaatcccgcaaagagacccaagttaaatgaacacaaagaggccatgcttggcaaaaaacgagctaggcaaaccgtcttcatcggtgtagaggatgcgaaacaagctggtactatgaagacgacaacgcccaggaggcagtcgtcctttccagcaccgattgttacacgtactgtgaaggaagcttctcgtggtattggtgaaaaggctgcagaaaaacaaaatcagcaagcaatcagagatcagagacaacctgaaatgatgggatcagaacgaagcaattctgtagatcctagtgaccaacacactgaacccaatggtgacactgagttgggtacccagggctggtcaaagaaaatgaatacagaagagccagcctcagatggttatcagcatcctgcccaaagacaagcttcattaaagcaaaccatggacttcaagcagccaaagggccgaccattctcttcccaaagaacaattctaacagggcaaaacaatgctgatcagaagccagccaacaaaagagctcagctttatagttcgtatgaggagagtcttgaggctgtgggaagggatgcacatgtagcggtgcaagtaaaaaccgtggataaacgtgaaagaggttggtatgatgttgtcgtcctaccgatacatgaacgtaaatggaatttcaaagaaggcgatgttgctattctgtcgtttccacatcctggttcaggta

SEQ ID NO: 216080 - DNA, 2097 bp, Zea Mays
ctgaaggagaaaacaacagaccatcaatgatctcgagatccccaaatctctttcttaagtaggtaccgctgcgccgcaaacccaccgcttccaccatcgccacccgtcagtccgtcacccctcgcgcccatagtccccttccccataccatgtccgacctccacccgccggagcaccaagtcgccggccaccgcgcctccgccagcaagctgggcccgctcatcgacggctccggcctcttctacaagccgctccaggccggcgaccgtggggagcacgaggtcgccttctatgaggcgttctccgcccacgccgccgtcccggcccgcatccgagacaccttcttcccccggttccacggcacgcgactcctccccaccgaggcgcagcccggggagccgcatcctcacctcgtcctcgacgacctcctcgcggggtttcaggcgccctgcgtcgcagacatcaagatcggcgccatcacgtggccaccgagttcgccggagccctacatcgccaagtgcctcgccaaggaccgcgggaccacgagcgttctgctcggattccgcgtctccggcgtccgagtcgtcggccccgagggcgccgtgtggcggacggagcgcccggaggtgaaggccatggacaccgccggcgtccgccgcgtgctccggcgctacgtgtcatccgttgccgacgaggggatggactgtgcgctcgccgcggcggtgtacggaggaaaaggtggagtcttgtcacagctgcgcgagctcaaggcgtggttcgaggagcagactctgttccacttctactcggcgtcgattcttctgggctatgatgctgctgcagtcgcagcaggcggagatgggggtggggtgacggtgaagctggtggactttgcccatgtggccgagggtgatggggtgattgaccacaacttcctgggcgggctctgctcgctgatcaagttcgtttctgacattgttccggagactcctcatacgcagcctttgggtccttcttaagagaggatcctggcatttcgatttgataacaaaggttccttgcagcgctcgggagatggtgcaggctggtgatgactacggcggcggcgaggcttttccgtccctatctgtctgccccgatggtgcccctatggagtttgtttggttggcttggataagcggtggacaaggtacgcgtgtatatatatactcttcgcagagaagtccggctgggagaagcgagcagactttgccggatttcacgcaaccaaaccgctcgacgctcgggagcatgtttgtttagcgaagacggggcggcttttaattgcatgcagatatcactgcgatgatatttacggttttagaattaaagaaaacaagaaatacacccatggcatgatcacgtgaagggagttggaaaaataaatgggcccgcacaagtgcctttggtcgacgtgataccagccctacaagttttgtctggaaaaagaagcgcctccgagttgtgctgggtgtggagatctgagacggtcgtcggcccacttggttgccttgcctttgccttgcctgcaaacatacggcaacctgctccttttttcgcaaccccttacttccgaagaaactttttttttcccactttgggggttcgattacgttggatctggtttgtgccactcggtcagaggttgtaagcatggagggaggcgtgttgatccggcaactgtgtcagtctttgcgctgcctgccgtttctgcatggcttttgcctgctgcgatccgatgtgtactggagatcgtagtgatggacgtctctacctccaaacgaatccgtccgataaatctaacgcaggttgagagtccatttgggttatgggttgtccaaatccattgtcggctcagaagccagcgttgagttcggatgtgcagacggatggggatgtggctgtggacactggagacaggggaggctactcggcttgcgtcgtcatgggaaaaagaggcaatctttttctagtagccgtcctgtccgtttgggtcgcatactcgcacggttggctgctccacccgtgacctcgagcctctttgtattcggatctgag

SEQ ID NO: 216081 - DNA, 463 bp, Zea Mays
tgcgtgggtttgcacgtctgttgctctctaccggagacggatcagcgtgtcaactgacagccctatgtccttcgccgctttctcatggccgtttcgccgccggggcggggctggcagcagtggcgcaagcaagtccgccgccacggcagaggaggacgaggagctgggcgtgaccccgcagctcctcgacttcctccggacgctctcgcccgacgccttcaaggccgccgcactccagctccaaggaggctccacggaggcggccgccggcgacctcaccagctggcaggagcggcacgccgtgctcgtgctatccaaagctaaggaactcgccaagattcggtatgatctgtgccctcggcacctgaaggataagcagttctggaggatatacttcctgctcgccaagagttacatctcacctctgtcagtcgttgatcaatgagcgaaacttcgaaattag

SEQ ID NO: 216082 - DNA, 2271 bp, Zea Mays
cagaaaagggacgggaaggtgccaataaattgcgaggatgccgctttatctcttctcctctcccgccgccgccaagctcgccaccggcccacacgcgtccctgcaccggcggcgccagttcctcttccgagttccccaccgccccagccgccgcgccccactgctaacttcggcggctgagcgtccagcagggcgcaccatggctactgcggataccggagcgtccacggtgaccgattcgaggctccgagctacaggagtgaagcaagcactgatatcattgtcagataaaacagacctggctaatcttggaaatggtcttcagcgtttggggttttctattatttccactggtggcacggcatcaagtttggaagcatctggtgttaatgttacaaaagttgaagaaattacacagtttcctgaaatgcttgatggaagagtaaaaacattgcaccccagtatacatggtggtattcttgcgcgaagagaccaggagcaccatctgaaagcactgaaagagcatggcattgggacatttgatgtggttgtagtgaatttgtatccattctatgataaggtcacctcaggtgcaatatcttttgaggatggcattgaaaatattgatattggtgggcctacattgatccgagctgctgccaagaatcataaggacgttcttgtcgttgttgatcataaagactatcctgctctactggaatatctagaagggaaacaagatgaccctgatttccgcaggacacttgcatggaaagcattccaacatgttgcttcctatgattctgctatctcggagtggttgtggaagcaatctaataaagcagattcatttcctcccagctttactgtgcccctcacaatgaagtctacacttcgctatggtgagaatcctcatcaaaaggctgccttttatggtgacaggagtctttctctagtaaatgctggcggtattgcaacagcaattcagcaccatggaaagggctttgcaattttacgtacgtcgtcttacaggaaatgtcctacaacaactatctggacgcggacgctgcgtggaactgcgtctcggagtttgagagcccgacttgcgtcgtggttaagcacacaaatccgtgtggcgtagcgtctcggcacgacatcctggaagcgtacaggttggctgtgagggcagaccccgtgagcgcgttcggaggcatagtcgccttcaacacgacggtcgacgaggatctcgcgagggagatccgggagttcaggaggccgacggacggcgagacgaggatgttctacgagatcgtggtggcgcctgggtacacggcggagggcctggaggtgctgaaagggaagtcgaagacgctgaggatactggaggcgaagcggaggaggagcgggaagggcacgctgctgtcgctgcggcaggtcggcggcggctggctggcccaggagcccgacgacgtgaccccggaggacgtggccttcacgaacgtgtccgagagggctcccgacgcccgtgagctctcggacgccaagttcgcgtgcctctgcgtcaagcacgtgaagagcaacgccattgtgatcgccaagaacagttgcatgctgggcatgggcagtggccagccgaaccggctggagagcctgaggatcgctttcaggaaggcaggggaggaggccaagggagctgctttggccagcgacgccttcttcccgttcgcttggaacgacgcggtggaggaggcgtgccagcgcggcgtggcggtgatcgcagagcccggcggcagcatccgggaccaggacgccgtggagtgctgcaacaagtacggggtggccctcgtcttcaccggcgtccggcacttcaggcactgatcgacggcgacggtggcagcggagaccgtgacgacggacgatgggagggacctctatatagctgcgtcgatctggccggtggctggaaggaaggatctggcgtttcatcccagcgctgatgccggctggcgtttcttggctactagggagactctgatggtgctgatacaaccaaatgtcgcctctcgagaggatgggtcggtgggtcccggtttgtatatatgacgtcgtcagcctggcaagaggttgattgagcttaatactaactcttgcggtggatggaaatcggaaacggtcgctgaccggtgggatcgcacagtctgctgctagaagcatgcaaaggctacatgccgtgttattattgttattaatatttattgctgtcacgttaca

SEQ ID NO: 216083 - DNA, 2230 bp, Zea Mays
cagaaaagggacgggaaggtgccaataaattgcgaggatgccgctttatctcttctcctctcccgccgccgccaagctcgccaccggcccacacgcgtccctgcaccggcggcgccagttcctcttccgagttccccaccgccccagccgccgcgccccactgctaacttcggcggctgagcgtccagcagggcgcaccatggctactgcggataccggagcgtccacggtgaccgattcgaggctccgaggagtgaagcaagcactgatatcattgtcagataaaacagacctggctaatcttggaaatggtcttcagcgtttggggttttctattatttccactggtggcacggcatcaagtttggaagcatctggtgttaatgttacaaaagttgaagaaattacacagtttcctgaaatgcttgatggaagagtaaaaacattgcaccccagtatacatggtggtattcttgcgcgaagagaccaggagcaccatctgaaagcactgaaagagcatggcattgggacatttgatgtggttgtagtgaatttgtatccattctatgataaggtcacctcaggtgcaatatcttttgaggatggcattgaaaatattgatattggtgggcctacattgatccgagctgctgccaagaatcataaggacgttcttgtcgttgttgatcataaagactatcctgctctactggaatatctagaagggaaacaagatgaccctgatttccgcaggacacttgcatggaaagcattccaacatgttgcttcctatgattctgctatctcggagtggttgtggaagcaatctaataaagattcatttcctcccagctttactgtgcccctcacaatgaagtctacacttcgctatggtgagaatcctcatcaaaaggctgccttttatggtgacaggagtctttctctagtaaatgctggcggtattgcaacagcaattcagcaccatggaaaggaaatgtcctacaacaactatctggacgcggacgctgcgtggaactgcgtctcggagtttgagagcccgacttgcgtcgtggttaagcacacaaatccgtgtggcgtagcgtctcggcacgacatcctggaagcgtacaggttggctgtgagggcagaccccgtgagcgcgttcggaggcatagtcgccttcaacacgacggtcgacgaggatctcgcgagggagatccgggagttcaggaggccgacggacggcgagacgaggatgttctacgagatcgtggtggcgcctgggtacacggcggagggcctggaggtgctgaaagggaagtcgaagacgctgaggatactggaggcgaagcggaggaggagcgggaagggcacgctgctgtcgctgcggcaggtcggcggcggctggctggcccaggagcccgacgacgtgaccccggaggacgtggccttcacgaacgtgtccgagagggctcccgacgcccgtgagctctcggacgccaagttcgcgtgcctctgcgtcaagcacgtgaagagcaacgccattgtgatcgccaagaacagttgcatgctgggcatgggcagtggccagccgaaccggctggagagcctgaggatcgctttcaggaaggcaggggaggaggccaagggagctgctttggccagcgacgccttcttcccgttcgcttggaacgacgcggtggaggaggcgtgccagcgcggcgtggcggtgatcgcagagcccggcggcagcatccgggaccaggacgccgtggagtgctgcaacaagtacggggtggccctcgtcttcaccggcgtccggcacttcaggcactgatcgacggcgacggtggcagcggagaccgtgacgacggacgatgggagggacctctatatagctgcgtcgatctggccggtggctggaaggaaggatctggcgtttcatcccagcgctgatgccggctggcgtttcttggctactagggagactctgatggtgctgatacaaccaaatgtcgcctctcgagaggatgggtcggtgggtcccggtttgtatatatgacgtcgtcagcctggcaagaggttgattgagcttaatactaactcttgcggtggatggaaatcggaaacggtcgctgaccggtgggatcgcacagtctgctgctagaagcatgcaaaggctacatgccgtgttattattgttattaatatttattgctgtcacgttaca

SEQ ID NO: 216084 - DNA, 2106 bp, Zea Mays
cagaaaagggacgggaaggtgccaataaattgcgaggatgccgctttatctcttctcctctcccgccgccgccaagctcgccaccggcccacacgcgtccctgcaccggcggcgccagttcctcttccgagttccccaccgccccagccgccgcgccccactgctaacttcggcggctgagcgtccagcagggcgcaccatggctactgcggataccggagcgtccacggtgaccgattcgaggctccgaggagtgaagcaagcactgatatcattgtcagataaaacagacctggctaatcttggaaatggtcttcagcgtttggggttttctattatttccactggtggcacggcatcaagtttggaagcatctggtgttaatgttacaaaagttgaagaaattacacagtttcctgaaatgcttgatggaagagtaaaaacattgcaccccagtatacatggtggtattcttgcgcgaagagaccaggagcaccatctgaaagcactgaaagagcatggcattgggacatttgatgtggttgtagtgaatttgtatccattctatgataaggtcacctcaggtgcaatatcttttgaggatggcattgaaaatattgatattggtgggcctacattgatccgagctgctgccaagaatcataaggacgttcttgtcgttgttgatcataaagactatcctgctctactggaatatctagaagggaaacaagatgaccctgatttccgcaggacacttgcatggaaagcattccaacatgttgcttcctatgattctgctatctcggagtggttgtggaagcaatctaataaagcagattcatttcctcccagctttactgtgcccctcacaatgaagtctacacttcgctatggtgagaatcctcatcaaaaggctgccttttatggtgacaggagtctttctctagtaaatgctggcggtattgcaacagcaattcagcaccatggaaaggaaatgtcctacaacaactatctggacgcggacgctgcgtggaactgcgtctcggagtttgagagcccgacttgcgtcgtggttaagcacacaaatccgtgtggcgtagcgtctcggcacgacatcctggaagcgtacaggttggctgtgagggcagaccccgtgagcgcgttcggaggcatagtcgccttcaacacgacggtcgacgaggatctcgcgagggagatccgggagttcaggaggccgacggacggcgagacgaggatgttctacgagatcgtggtggcgcctgggtacacggcggagggcctggaggtgctgaaagggaagtcgaagacgctgaggatactggaggcgaagcggaggaggagcgggaagggcacgctgctgtcgctgcggcaggtcggcggcggctggctggcccaggagcccgacgacgtgaccccggaggacgtggccttcacgaacgtgtccgagagggctcccgacgcccgtgagctctcggacgccaagttcgcgtgcctctgcgtcaagcacgtgaagagcaacgccattgtgatcgccaagcttggaacgacgcggtggaggaggcgtgccagcgcggcgtggcggtgatcgcagagcccggcggcagcatccgggaccaggacgccgtggagtgctgcaacaagtacggggtggccctcgtcttcaccggcgtccggcacttcaggcactgatcgacggcgacggtggcagcggagaccgtgacgacggacgatgggagggacctctatatagctgcgtcgatctggccggtggctggaaggaaggatctggcgtttcatcccagcgctgatgccggctggcgtttcttggctactagggagactctgatggtgctgatacaaccaaatgtcgcctctcgagaggatgggtcggtgggtcccggtttgtatatatgacgtcgtcagcctggcaagaggttgattgagcttaatactaactcttgcggtggatggaaatcggaaacggtcgctgaccggtgggatcgcacagtctgctgctagaagcatgcaaaggctacatgccgtgttattattgttattaatatttattgctgtcacgttaca

SEQ ID NO: 216085 - DNA, 3101 bp, Zea Mays
tggcactaggcctggtcagtggtcacgcccggttcccacatgtcagcgccaaacccgtcgtaactcgaggcccgccccgaccccgagtccacctctttcacccagcccggcgaccccgccgcgctcctgcctcgcctcgcctcgccgtcggcgaccgaccccacgtctgcccggcgatgtcctcctccgtatccattgcggcagagtgggatctcctctccgatcgcttctaccgccggctcacactctactcacctctcccatggtccaccccagccgcggccggcgcgacctcgtcctcctccggcgtcagcggtgctgtgatcggtcgccttgacctgtccacccacatcgtcgccgccgcgccctttggaggcccgatcgccgccgtccgcgacgactctaagatcgtgcagctccactccgagccatcccgccgccgcgtcctcctcttctcctcctccggccacccaattgcctccgcgccctggccaccccttctcccacgcctccactcgctcggtttctccagctccctcagcctcctcgcacttctctccgacggctcgctcctccgcttccgcctccccgatctgcaacccagcccttgctccagtcccgttcccctgctcccgccggcctccggcggcgtcgccgacgctctattctggggcggcggtgtagccatcctcacggaagacaaccgcgtcgtggtggccactgacatcgaggtcgacgatcctcacccccgtcacctcgccgacccaggcatcggtgatgaggaacatgttctgtgtatggccgtggtggaggcacagtttgtcatgtcagggagcccagaagtgctgcttgctgttggcgaccgggtcattgcggttgacgaggatggcgtacaagtgcttggggaagagctggagattggacccgtgcagaagatggcagtttcacccaatggcaagctcctcgcagcatttgcacatgatggtcgccttctcgttattcccaccgatttctctaggatcatattcgagtatgagtgcgaatctgcattgccaccagagcaaatagcttggtgtggactagacagtgtactcgtctactggcctgaagtgcttttgatggttggtccaaatggagatcctgtccaatacaattatgatgaacccataaaactgattcctgagtgcgatggtgtaaggatcctatctaactcaagtatggaatttctacaccgagtctcagactctaccacgtcaatttttggcattggaagcatgtccccagcggcattactgtatgatgctcgtgatcactatgacaggcaaagtgcaaaggcttatgacaactatcaattaatatcatcttcattgcctgaggcaattgaggcttgcatcgacgctgctggccatgagtttgatgtttcacgccagcgcacattgctgagagctgctacatatggcctagctttctgcagtcgatttccacatgaacgctttcaagaaatgtgcaaaatgttgagagttctaaatgctgttcgtgatcctgagattgggatgccactgaccattcatcagtacaagctgcttactacatcggtgctcattggacgtctcattaatgctaatcagcaccttttggcccttcgcatctctgagtaccttaacctgaacccggaggttgtgataatgcattgggcatgtgagaagataacagcatcaacaactcttccagatacagtccttcttgatggtctgcttgataaggctatgtaaagggatatcatatgctgcagtggcagctcatgcagataacagtggtcgacgaaggttggctgcaatgctcgttgatcatgagtcacagtcctctaagcagatccccttgttgctcagcatcgatgaacaagacaaagcattatcaaaggcaattgaaagtggcgataccgatcttgtgtaccttgtgctattccatatttggcagaaggtagctgtagagaagaaagctcctttggatttttttggtgttataaatgcaaggcctgtggctagagatttgtttatggcatatgcaagacattctaagcatgaagaattgaaggacttctttttatcgactgggagacttcaagatgccgcctttcttttgttgaaggaatcatgggaattggagaagaaccccatggcaagcaaggggtctcctctccatggtccacaagtgaggctcattgagcaggcccatagactttttgctgaaaccaaggaacatgtttttgagtccaaagcttctgaagagcatgccaaattgctaagatcacagcatgaacttgaagtttccacaaagcagccaatatttgtgggttctagtgttagtgatacaataaaaacctgtattgcaatgggaaacgagcgtgctgcactcagagtgaagtccgaattcaaggttcctgataagaggtggtactggcttaaaacgtgcgctttagccacagttggaaactgggatggtttggaaaaattttcaagggagaaaaggccaccgggaggctataaaccttttgtggaagcatgcattgatgctggtcaaaaaaatgaagctgtcaaatatattccaaagttaacagatcctcgtgaaagatctgaggcatatgctcggatgggcatggcgaaggaggcccaagatgcagcctcacaagctaaagatagtgatgagctatttggccgcctaaagattacacttgcacagagcagtgctgccgcctccattttcgatacattgcgggatcggctatcctttcaaggagcatattgatcaacgtgattttgtcgtaggcccggatgtgcacctcgatgttttgaacagaccggcaatttatttatttatttgttttctgctctgttgtatgtatgaagaattaacctcagtgtgaatacatgtccatggaaatttacggtcacagaactgtgcagccagtgcacgtgtggttcacctgtgacattttggatttctagggtatatggggacacgaagtggagtagctctgtctgtggtgcttgagtgggaggtgcatctgaatagaacctcctctcccatccctctcactagcg

SEQ ID NO: 216086 - DNA, 3106 bp, Zea Mays
tggcactaggcctggtcagtggtcacgcccggttcccacatgtcagcgccaaacccgtcgtaactcgaggcccgccccgaccccgagtccacctctttcacccagcccggcgaccccgccgcgctcctgcctcgcctcgcctcgccgtcggcgaccgaccccacgtctgcccggcgatgtcctcctccgtatccattgcggcagagtgggatctcctctccgatcgcttctaccgccggctcacactctactcacctctcccatggtccaccccagccgcggccggcgcgacctcgtcctcctccggcgtcagcggtgctgtgatcggtcgccttgacctgtccacccacatcgtcgccgccgcgccctttggaggcccgatcgccgccgtccgcgacgactctaagatcgtgcagctccactccgagccatcccgccgccgcgtcctcctcttctcctcctccggccacccaattgcctccgcgccctggccaccccttctcccacgcctccactcgctcggtttctccagctccctcagcctcctcgcacttctctccgacggctcgctcctccgcttccgcctccccgatctgcaacccagcccttgctccagtcccgttcccctgctcccgccggcctccggcggcgtcgccgacgctctattctggggcggcggtgtagccatcctcacggaagacaaccgcgtcgtggtggccactgacatcgaggtcgacgatcctcacccccgtcacctcgccgacccaggcatcggtgatgaggaacatgttctgtgtatggccgtggtggaggcacagtttgtcatgtcagggagcccagaagtgctgcttgctgttggcgaccgggtcattgcggttgacgaggatggcgtacaagtgcttggggaagagctggagattggacccgtgcagaagatggcagtttcacccaatggcaagctcctcgcagcatttgcacatgatggtcgccttctcgttattcccaccgatttctctaggatcatattcgagtatgagtgcgaatctgcattgccaccagagcaaatagcttggtgtggactagacagtgtactcgtctactggcctgaagtgcttttgatggttggtccaaatggagatcctgtccaatacaattatgatgaacccataaaactgattcctgagtgcgatggtgtaaggatcctatctaactcaagtatggaatttctacaccgagtctcagactctaccacgtcaatttttggcattggaagcatgtccccagcggcattactgtatgatgctcgtgatcactatgacaggcaaagtgcaaaggcttatgacaactatcaattaatatcatcttcattgcctgaggcaattgaggcttgcatcgacgctgctggccatgagtttgatgtttcacgccagcgcacattgctgagagctgctacatatggcctagctttctgcagtcgatttccacatgaacgctttcaagaaatgtgcaaaatgttgagagttctaaatgctgttcgtgatcctgagattgggatgccactgaccattcatcagtacaagctgcttactacatcggtgctcattggacgtctcattaatgctaatcagcaccttttggcccttcgcatctctgagtaccttaacctgaacccggaggttgtgataatgcattgggcatgtgagaagataacagcatcaacaactcttccagatacagtccttcttgatggtctgcttgataagctcaggctatgtaaagggatatcatatgctgcagtggcagctcatgcagataacagtggtcgacgaaggttggctgcaatgctcgttgatcatgagtcacagtcctctaagcagatccccttgttgctcagcatcgatgaacaagacaaagcattatcaaaggcaattgaaagtggcgataccgatcttgtgtaccttgtgctattccatatttggcagaaggtagctgtagagaagaaagctcctttggatttttttggtgttataaatgcaaggcctgtggctagagatttgtttatggcatatgcaagacattctaagcatgaagaattgaaggacttctttttatcgactgggagacttcaagatgccgcctttcttttgttgaaggaatcatgggaattggagaagaaccccatggcaagcaaggggtctcctctccatggtccacaagtgaggctcattgagcaggcccatagactttttgctgaaaccaaggaacatgtttttgagtccaaagcttctgaagagcatgccaaattgctaagatcacagcatgaacttgaagtttccacaaagcagccaatatttgtgggttctagtgttagtgatacaataaaaacctgtattgcaatgggaaacgagcgtgctgcactcagagtgaagtccgaattcaaggttcctgataagaggtggtactggcttaaaacgtgcgctttagccacagttggaaactgggatggtttggaaaaattttcaagggagaaaaggccaccgggaggctataaaccttttgtggaagcatgcattgatgctggtcaaaaaaatgaagctgtcaaatatattccaaagttaacagatcctcgtgaaagatctgaggcatatgctcggatgggcatggcgaaggaggcccaagatgcagcctcacaagctaaagatagtgatgagctatttggccgcctaaagattacacttgcacagagcagtgctgccgcctccattttcgatacattgcgggatcggctatcctttcaaggagcatattgatcaacgtgattttgtcgtaggcccggatgtgcacctcgatgttttgaacagaccggcaatttatttatttatttgttttctgctctgttgtatgtatgaagaattaacctcagtgtgaatacatgtccatggaaatttacggtcacagaactgtgcagccagtgcacgtgtggttcacctgtgacattttggatttctagggtatatggggacacgaagtggagtagctctgtctgtggtgcttgagtgggaggtgcatctgaatagaacctcctctcccatccctctcactagcg

SEQ ID NO: 216087 - DNA, 3528 bp, Zea Mays
tggcactaggcctggtcagtggtcacgcccggttcccacatgtcagcgccaaacccgtcgtaactcgaggcccgccccgaccccgagtccacctctttcacccagcccggcgaccccgccgcgctcctgcctcgcctcgcctcgccgtcggcgaccgaccccacgtctgcccggcgatgtcctcctccgtatccattgcggcagagtgggatctcctctccgatcgcttctaccgccggctcacactctactcacctctcccatggtccaccccagccgcggccggcgcgacctcgtcctcctccggcgtcagcggtgctgtgatcggtcgccttgacctgtccacccacatcgtcgccgccgcgccctttggaggcccgatcgccgccgtccgcgacgactctaagatcgtgcagctccactccgagccatcccgccgccgcgtcctcctcttctcctcctccggccacccaattgcctccgcgccctggccaccccttctcccacgcctccactcgctcggtttctccagctccctcagcctcctcgcacttctctccgacggctcgctcctccgcttccgcctccccgatctgcaacccagcccttgctccagtcccgttcccctgctcccgccggcctccggcggcgtcgccgacgctctattctggggcggcggtgtagccatcctcacggaagacaaccgcgtcgtggtggccactgacatcgaggtcgacgatcctcacccccgtcacctcgccgacccaggcatcggtgatgaggaacatgttctgtgtatggccgtggtggaggcacagtttgtcatgtcagggagcccagaagtgctgcttgctgttggcgaccgggtcattgcggttgacgaggatggcgtacaagtgcttggggaagagctggagattggacccgtgcagaagatggcagtttcacccaatggcaagctcctcgcagcatttgcacatgatggtcgccttctcgttattcccaccgatttctctaggatcatattcgagtatgagtgcgaatctgcattgccaccagagcaaatagcttggtgtggactagacagtgtactcgtctactggcctgaagtgcttttgatggttggtccaaatggagatcctgtccaatacaattatgatgaacccataaaactgattcctgagtgcgatggtgtaaggatcctatctaactcaagtatggaatttctacaccgagtctcagactctaccacgtcaatttttggcattggaagcatgtccccagcggcattactgtatgatgctcgtgatcactatgacaggcaaagtgcaaaggcttatgacaactatcaattaatatcatcttcattgcctgaggcaattgaggcttgcatcgacgctgctggccatgagtttgatgtttcacgccagcgcacattgctgagagctgctacatatggcctagctttctgcagtcgatttccacatgaacgctttcaagaaatgtgcaaaatgttgagagttctaaatgctgttcgtgatcctgagattgggatgccactgaccattcatcagtacaagctgcttactacatcggtgctcattggacgtctcattaatgctaatcagcaccttttggcccttcgcatctctgagtaccttaacctgaacccggaggttgtgataatgcattgggcatgtgagaagataacagcatcaacaactcttccagatacagtccttcttgatggtctgcttgataagctcaggctatgtaaagggatatcatatgctgcagtggcagctcatgcagataacagtggtcgacgaaggttggctgcaatgctcgttgatcatgagtcacagtcctctaagcagatccccttgttgctcagcatcgatgaacaagacaaagcattatcaaaggcaattgaaagtggcgataccgatcttgtgtaccttgtgctattccatatttggcagaaggtagctgtagagaagaaagctcctttggatttttttggtgttataaatgcaaggcctgtggctagagatttgtttatggcatatgcaagacattctaagcatgaagaattgaaggacttctttttatcgactgggagacttcaagatgccgcctttcttttgttgaaggaatcatgggaattggagaagaaccccatggcaagcaaggggtctcctctccatggtccacaagtgaggctcattgagcaggcccatagactttttgctgaaaccaaggaacatgtttttgagtccaaagcttctgaagagcatgccaaattgctaagatcacagcatgaacttgaagtttccacaaagcagccaatatttgtgggttctagtgttagtgatacaataaaaacctgtattgcaatgggaaacgagcgtgctgcactcagagtgaagtccgaattcaaggttcctgataagaggtggtactggcttaaaacgtgcgctttagccacagttggaaactgggatggtttggaaaaattttcaagggagaaaaggccaccgggaggctataaaccttttgtggaagcatgcattgatgctggtcaaaaaaatgaagctgtcaaatatattccaaagttaacagatcctcgtgaaagatctgagttgcacactgggatctaatacaatggctagcgatggtgatgcttcaccttcacggaagcatatgttgttggagttgccttgtgatgaagaaggtgcaaatgtgagccaaaatgttggtgtgtccgcatcatcagccacgacccacacctgccgctgccagagcttctcatgaacaaggtgaaaatctagaaggtggaagtaatgttgatggggatgattcttcaaaggaaaagcaatcaaagaagtccacttcagatgtttagcagtaattttaagaatattagagcatttgtgctagctgttaaggggtatccattgcaatgggaggagtttcaaaaatgtgctactgaatgtggtgtggacacaaaggttggactctctattgatgttgctactaggtgtaattcaacatattgcatgttgagggatgcactacataacagggctgcctttgaaaggcttatgtcatatgaacgtcacaggatgaagacctagatgatgatcatgatgatggacgtgaggcatcgttgtaagcttgttgatgatgacctagatgatgataatgcgacatgaatgctttgaatgtttcttactgtacttattgccaacttgggacttgttatattgtgaacttgtgatcaactttttatgttgtgaacttgtgatctttgtggtcaacttgttatattgtgatctttgtggtcaacttgttatattgtgaacttgtgatctgtgtgatcaacttgttatattatgaacttatgatctcaatgatcaacttgttatattgtgaattgtgaacttgtgatctgtgtgatcaacttgttatattatgaacttatgatctcaatgatcaacttgttatattgtgaattgtgaacttgtg

SEQ ID NO: 216088 - DNA, 1445 bp, Zea Mays
tctcatcactgcaccgggaggttgtgataatgcattgggcatgtgagaagataacagcatcaacaactcttccagatacagtccttcttgatggtctgcttgataaggctatgtaaagggatatcatatgctgcagtggcagctcatgcagataacagtggtcgacgaaggttggctgcaatgctcgttgatcatgagtcacagtcctctaagcagatccccttgttgctcagcatcgatgaacaagacaaagcattatcaaaggcaattgaaagtggcgataccgatcttgtgtaccttgtgctattccatatttggcagaaggtagctgtagagaagaaagctcctttggatttttttggtgttataaatgcaaggcctgtggctagagatttgtttatggcatatgcaagacattctaagcatgaagaattgaaggacttctttttatcgactgggagacttcaagatgccgcctttcttttgttgaaggaatcatgggaattggagaagaaccccatggcaagcaaggggtctcctctccatggtccacaagtgaggctcattgagcaggcccatagactttttgctgaaaccaaggaacatgtttttgagtccaaagcttctgaagagcatgccaaattgctaagatcacagcatgaacttgaagtttccacaaagcagccaatatttgtgggttctagtgttagtgatacaataaaaacctgtattgcaatgggaaacgagcgtgctgcactcagagtgaagtccgaattcaaggttcctgataagaggtggtactggcttaaaacgtgcgctttagccacagttggaaactgggatggtttggaaaaattttcaagggagaaaaggccaccgggaggctataaaccttttgtggaagcatgcattgatgctggtcaaaaaaatgaagctgtcaaatatattccaaagttaacagatcctcgtgaaagatctgaggcatatgctcggatgggcatggcgaaggaggcccaagatgcagcctcacaagctaaagatagtgatgagctatttggccgcctaaagattacacttgcacagagcagtgctgccgcctccattttcgatacattgcgggatcggctatcctttcaaggagcatattgatcaacgtgattttgtcgtaggcccggatgtgcacctcgatgttttgaacagaccggcaatttatttatttatttgttttctgctctgttgtatgtatgaagaattaacctcagtgtgaatacatgtccatggaaatttacggtcacagaactgtgcagccagtgcacgtgtggttcacctgtgacattttggatttctagggtatatggggacacgaagtggagtagctctgtctgtggtgcttgagtgggaggtgcatctgaatagaacctcctctcccatccctctcactagcg

SEQ ID NO: 216089 - DNA, 1449 bp, Zea Mays
ctcatcactgcaccgggaggttgtgataatgcattgggcatgtgagaagataacagcatcaacaactcttccagatacagtccttcttgatggtctgcttgataagctcaggctatgtaaagggatatcatatgctgcagtggcagctcatgcagataacagtggtcgacgaaggttggctgcaatgctcgttgatcatgagtcacagtcctctaagcagatccccttgttgctcagcatcgatgaacaagacaaagcattatcaaaggcaattgaaagtggcgataccgatcttgtgtaccttgtgctattccatatttggcagaaggtagctgtagagaagaaagctcctttggatttttttggtgttataaatgcaaggcctgtggctagagatttgtttatggcatatgcaagacattctaagcatgaagaattgaaggacttctttttatcgactgggagacttcaagatgccgcctttcttttgttgaaggaatcatgggaattggagaagaaccccatggcaagcaaggggtctcctctccatggtccacaagtgaggctcattgagcaggcccatagactttttgctgaaaccaaggaacatgtttttgagtccaaagcttctgaagagcatgccaaattgctaagatcacagcatgaacttgaagtttccacaaagcagccaatatttgtgggttctagtgttagtgatacaataaaaacctgtattgcaatgggaaacgagcgtgctgcactcagagtgaagtccgaattcaaggttcctgataagaggtggtactggcttaaaacgtgcgctttagccacagttggaaactgggatggtttggaaaaattttcaagggagaaaaggccaccgggaggctataaaccttttgtggaagcatgcattgatgctggtcaaaaaaatgaagctgtcaaatatattccaaagttaacagatcctcgtgaaagatctgaggcatatgctcggatgggcatggcgaaggaggcccaagatgcagcctcacaagctaaagatagtgatgagctatttggccgcctaaagattacacttgcacagagcagtgctgccgcctccattttcgatacattgcgggatcggctatcctttcaaggagcatattgatcaacgtgattttgtcgtaggcccggatgtgcacctcgatgttttgaacagaccggcaatttatttatttatttgttttctgctctgttgtatgtatgaagaattaacctcagtgtgaatacatgtccatggaaatttacggtcacagaactgtgcagccagtgcacgtgtggttcacctgtgacattttggatttctagggtatatggggacacgaagtggagtagctctgtctgtggtgcttgagtgggaggtgcatctgaatagaacctcctctcccatccctctcactagcg

SEQ ID NO: 216090 - DNA, 307 bp, Zea Mays
atgacggtggtggctgtggagtcagatgagcctaggacagaatcatcgttggagcggggaacaatcatctacaacctcctcgtcacgctcccctttccctccggcctgatctcgcgcctccgtcgtgcattcctcctctaccgcttcaccaacgacctagtctctagatcctccctccacatgctccaactcctggttttgctccacgtatctgcctcccaaaacgctaccgcccacaatgatgttcatgttatgcgcacggatattaaagaacagaaacagagacaaatccccacgtccagagtta

SEQ ID NO: 216091 - DNA, 3240 bp, Zea Mays
cccctccctctcactgcccactgccgccgctgctctcccactcctctaccctcctctcctctgcttctctgccgcccagcccagcttgccttctcgaacagcgcgagcgcgcaggcgaggagcagcgtgtccgtccgtccttgcactctctgcagcctccctctctctctaccccgcccatctccctccccaggccttcaaatccgcggccgcgccacccgctgcgctgctgccccggtccttgcattgctcgactcgaggcgccccagcgctggtcgcctccgtgccttccgcggtgttcctgggcgcggctcctaggctcgctcattttacttctgctgctcctgtgctgcctcttggggggcgttcctttacggcccggagcagcgcctagctgcttccgccattgatccggcaaccccagctctaggtttgctttgctctcgtgtgtggtagcgattctggtgttgggggggtgccaccaacagttacaggttgtcgccacgccgagggtgtcgtcctgcgttccttttttttatcttctctccgtgatctctctagctgcatccttgcccccccttcgctccttgctttcttctctgcgctgcctttggtgtgttgccagatagctcccgggacttcaccggttcgctaaccggcaccggcccatagtctgcggacaaacaggggccagttcggcctatttcatttcacaaaagggggcaaagattaggcggcggaatcctgttctttcccgattccttttggacatactgctcgagaggaagtgaaagcgcgcaactttggaggttccgaggagggaggaacacatcccttgcagctgcatgaggaggcaggcattgatacaatgagagatgacggttcaagcaagaacaagctgtcctggtccaagacccttgttaggaagtggttcaacatcaaaacaaaggcgaaggacttccattcggattatgcagctgaggaagtcggagtgcagtggaggaccagcagcttctctgatagagatgcatgtaaatccaagaaaagtaggacagagaggttgcctaagaggaatgtggagcgagatggtagagtagggaacggatttgatggtgcctatattacaaacacacaggactacagggtcttcgttggtacatggaacgtgggcggaaggtcaccatctagtcatttgaatctggaagactggcttcacacttctcctgctgctgatatatatgtgatagggaaattgttcccttgaatgctggtaatgttctattgactgaagacaatggtccagcgaggaaatgggtctctcttgttagaaaaactctgaataatcttgatcagcaaggctctggtgtctataattaccacaccccctcaccagctccggatccaatcgtggagctcaatgttgacttcgagcgatcgtcaagaagacaaaggaactcgtcgtttttccatcggcgttcgttccaatccttcaaccgtagctcaaggatcgacatgatggatccacactcgttagtggaccgtcgattcagtgtctgcgacaggattagcttcgggagcaggccgagtgatgttgacactagcatgaggtgtggtgggtcgtctgatgatgagaacattgacgaggaatcacctagcggtatattcttcccaccgatgccatgtgcatatggtgctccactgtgcactggttctaggtattgcttagttgccagcaagcaaatggttggaattttcctcatggtgtgggtgcgaagcgatataagggagcatgtgaagaacttgaaggtttcatgtgtcggtagaggtctgatgggctaccttgggaacaagggatccatatcaatcagtatgtctctgcatcagacaagcttctgcttcgtttgcacccacttaacgtcaggccaaaaggatggagatcaacttagacgaaatgcggatgtggtggaaatcctgaggaagaccagattcccgcatgtccatggagcaggcgacaggaagtcaccagagacgattctggatcatgatcgtattatttggctcggggacctgaactaccggatagctctttcgtatcgctcagtgaaggctttagttgagatgcacagctggaaacagttgctggagaaggaccagcttcgcatagagcagagatttggtcgggtctttgcaggctggaaagaaggaaggatttactttcctcccacctacaagtactcatacaactccgatagatacgctggcgacgacatgcacccgaacgagaagcgaaggactccggcatggtgtgaccggattctatggtacgggcgaggcctgtcccagctatgctacgtgcgcggcgagtctcggttctcggatcacaggcctgtgtacagcatattcacggcggaggttgagattccgagccagtcagctgctcacttcggcggcatcactcgttccgcgtctctcctggggctggacgagctgccaccgtaccagacttatccacgcagttacatggacataaacttctactgaccggtcatcgtctcgacggggaggacggggccagcagccagccaagagttgcagacagacattcctcgctacctgatgagtggcagggcaggccttctgacgaccgactgactgactgactgggggttcgtttctcccaaggttcagttccatcggtcggaaatcggaatgtttggtagctagcagatgtgactcctttcgccatgcgtttctgtgcacctggcgcctggactcttgctgctgctgtcctgcatgccattgacgcccccaactcctacgccgtgccgtcttcagcgtgcagaatagatactcgaggagatcaatgctttccgagcgtgagattgttgctaggaacatttgcacagctagttttgttgaatcataaccatctgcgtgtcccgatttactacgggagaaagaagaaggagaagaaaaaaaggagtttggttcttgcttttggtgtcctgatgtaatgcaacgagggccgcgccatgggctcattcaaatgttttcttttttttgttttaatagtccgaggaatgaaatgatggcttgtacagcaaactgttccagtaaacccggcctctgttcatgctcgcggcgaaatgatcacctgaacagcatgcatgcaggggtgtcatctagttcctgaacgcttgtgcgcgaagcgaccgtgctgaggctgccggctgccgcctc

SEQ ID NO: 216092 - DNA, 3260 bp, Zea Mays
cccctccctctcactgcccactgccgccgctgctctcccactcctctaccctcctctcctctgcttctctgccgcccagcccagcttgccttctcgaacagcgcgagcgcgcaggcgaggagcagcgtgtccgtccgtccttgcactctctgcagcctccctctctctctaccccgcccatctccctccccaggccttcaaatccgcggccgcgccacccgctgcgctgctgccccggtccttgcattgctcgactcgaggcgccccagcgctggtcgcctccgtgccttccgcggtgttcctgggcgcggctcctaggctcgctcattttacttctgctgctcctgtgctgcctcttggggggcgttcctttacggcccggagcagcgcctagctgcttccgccattgatccggcaaccccagctctaggtttgctttgctctcgtgtgtggtagcgattctggtgttgggggggtgccaccaacagttacaggttgtcgccacgccgagggtgtcgtcctgcgttccttttttttatcttctctccgtgatctctctagctgcatccttgcccccccttcgctccttgctttcttctctgcgctgcctttggtgtgttgccagatagctcccgggacttcaccggttcgctaaccggcaccggcccatagtctgcggacaaacaggggccagttcggcctatttcatttcacaaaagggggcaaagattaggcggcggaatcctgttctttcccgattccttttggacatactgctcgagaggaagtgaaagcgcgcaactttggaggttccgaggagggaggaacacatcccttgcagctgcatgaggaggcaggcattgatacaatgagagatgacggttcaagcaagaacaagctgtcctggtccaagacccttgttaggaagtggttcaacatcaaaacaaaggcgaaggacttccattcggattatgcagctgaggaagtcggagtgcagtggaggaccagcagcttctctgatagagatgcatgtaaatccaagaaaagtaggacagagaggttgcctaagaggaatgtggagcgagatggtagagtagggaacggatttgatggtgcctatattacaaacacacaggactacagggtcttcgttggtacatggaacgtgggcggaaggtcaccatctagtcatttgaatctggaagactggcttcacacttctcctgctgctgatatatatgtgatagggttgttgtgccaggtttcaggaaattgttcccttgaatgctggtaatgttctattgactgaagacaatggtccagcgaggaaatgggtctctcttgttagaaaaactctgaataatcttgatcagcaaggctctggtgtctataattaccacaccccctcaccagctccggatccaatcgtggagctcaatgttgacttcgagcgatcgtcaagaagacaaaggaactcgtcgtttttccatcggcgttcgttccaatccttcaaccgtagctcaaggatcgacatgatggatccacactcgttagtggaccgtcgattcagtgtctgcgacaggattagcttcgggagcaggccgagtgatgttgacactagcatgaggtgtggtgggtcgtctgatgatgagaacattgacgaggaatcacctagcggtatattcttcccaccgatgccatgtgcatatggtgctccactgtgcactggttctaggtattgcttagttgccagcaagcaaatggttggaattttcctcatggtgtgggtgcgaagcgatataagggagcatgtgaagaacttgaaggtttcatgtgtcggtagaggtctgatgggctaccttgggaacaagggatccatatcaatcagtatgtctctgcatcagacaagcttctgcttcgtttgcacccacttaacgtcaggccaaaaggatggagatcaacttagacgaaatgcggatgtggtggaaatcctgaggaagaccagattcccgcatgtccatggagcaggcgacaggaagtcaccagagacgattctggatcatgatcgtattatttggctcggggacctgaactaccggatagctctttcgtatcgctcagtgaaggctttagttgagatgcacagctggaaacagttgctggagaaggaccagcttcgcatagagcagagatttggtcgggtctttgcaggctggaaagaaggaaggatttactttcctcccacctacaagtactcatacaactccgatagatacgctggcgacgacatgcacccgaacgagaagcgaaggactccggcatggtgtgaccggattctatggtacgggcgaggcctgtcccagctatgctacgtgcgcggcgagtctcggttctcggatcacaggcctgtgtacagcatattcacggcggaggttgagattccgagccagtcagctgctcacttcggcggcatcactcgttccgcgtctctcctggggctggacgagctgccaccgtaccagacttatccacgcagttacatggacataaacttctactgaccggtcatcgtctcgacggggaggacggggccagcagccagccaagagttgcagacagacattcctcgctacctgatgagtggcagggcaggccttctgacgaccgactgactgactgactgggggttcgtttctcccaaggttcagttccatcggtcggaaatcggaatgtttggtagctagcagatgtgactcctttcgccatgcgtttctgtgcacctggcgcctggactcttgctgctgctgtcctgcatgccattgacgcccccaactcctacgccgtgccgtcttcagcgtgcagaatagatactcgaggagatcaatgctttccgagcgtgagattgttgctaggaacatttgcacagctagttttgttgaatcataaccatctgcgtgtcccgatttactacgggagaaagaagaaggagaagaaaaaaaggagtttggttcttgcttttggtgtcctgatgtaatgcaacgagggccgcgccatgggctcattcaaatgttttcttttttttgttttaatagtccgaggaatgaaatgatggcttgtacagcaaactgttccagtaaacccggcctctgttcatgctcgcggcgaaatgatcacctgaacagcatgcatgcaggggtgtcatctagttcctgaacgcttgtgcgcgaagcgaccgtgctgaggctgccggctgccgcctc

SEQ ID NO: 216093 - DNA, 4035 bp, Zea Mays
cccgtagctgacgcatagggaggggaggaacattagcctggaccctggaaagagcaagcaagtcggcgacgggcaacccgtttcggcggcggcgctagggcgcggacccccagcaagtagccaccgcaggcaagctcctcctcccgcccgcccattggaatgcggagagatccacccgggagtgggtggattggtttcttcctctgttgatacttcaaatggactattatggactcagcttggtatctgaaaaagaaccagcatagctacactccctttgcaagactaatagactctaaagatgcctccctcaccatcacctaggagatctctgaaagaagtttgccacgcaagggggcatagttttgtcagtattctgcctgctaaatcgaaggatgatgaactcacgttgttcaaggatatgcagaaatatgagagggataacttcttactggaagcaacagaggattttgatgaatccatctcaaagttgagatattttcgagattcaaagattggtgtcaacattgctgcacgcggagaaaatcgtgatttacttaatactgatggtgaaagaaatgactatgattggctgttgactccaccagagaccccactttttcgttcattggatgatgaagatcaacacattggtatggctcataggggcagggcgcaggttaagccaatatcaatttcgaggtcttccacaatggaaaatactcaaagttttaacagaagaagtgcaagcccaagtaggcttagcccagcaccacgctcatgtagcagcactatgttgacaaggataagatcatcaaattcttcttcacgatgcagccctgcacttcatttgcaaccagcggcaccatcacgaaggtcttcgactcctccagcttctaggacatcaacacctccacaaaggtcaccaagtcctgcttcaaggaggttgagtactggctcaagtgacccaattttaaacagaaaaggaggaacttcgcctgttaaaaccagtaacaggccatcgtcaccaaaacttcaaggttggcaatcaagtgaccctggtttctcttttgacgcacctccgaatctacgcacatctctgtcagatcgtctagtatcccattcaaggggtggatctccttcatctttcagtggattggacatgaattggagaggtagaaggcaatctgtgtctcccactccatcaagaagagccagttcatcgcatagcaatgatcgattcagctcatacagcaaagcatctgcaacatcttctgctgaagacgacctagagtctatgcagtctgtgctgattagttactccagtagcccagctctaagaaagaacatgccagtaataaaatccagaactattgcatcacctaagaagccgtccaagagtttctcccctagttctggtccaaagaggtcctttgattctgcagtttggttaatggatcgtcgcaaagctcctcaagataagttcaggccacttctatcaagtgttccttgcaccacatttggtgttggcaaaggggataatgtacactcatctatgttgtctcataattcctcactcacaacaagcagtaatttaagctctgaccatggtgtcacttttagcccttgtatgggtaatgaacaaggaccaagtgatatagccggtgactgtgaagcaacacctacttacagtttgtctgctactcaaagtagcccaaaatctccaagcacagaaaaaaatgcggaaagtaacatggaagacctcaatatggaaagaagtagaatagtcgagacttcaggtaatgttgcaagtggttccaaggctgggctaactaaaatggcaacatgcactaggtgtgaaaagttatttaatgcgataaaagatgatggagaaattgatttgtgtgaagaatgtggtttagtagatgaggttctttttgtgaaccccaagatagagactttggaagaacatcaaaaagaccacaaaactagaatttctaaaccttgtgttgccttggaagctcctcacattactcccgatcatggtgaagataccaagaagtcatttcttgatagtcagctgttgaatgatgaacctccagctgattgtctgcaaaagtgtcctcagtctcagtcaacaatatatacaaccgacagaatgcttttaatgctgcatggagagaatgttaatgaaaatttaaggccagatgatgttggcaactcttcccaaggaagtagcctcgatatttcatcccatcaatgtaacataaataattatcaacaatcggaactagcatctgtagttgagtgtgataatttaagagatcaaactgccaaccaccagaatgaggtgttccaacgcctgccagggtcagtgtatcaaagcattgaatttgcctctaatacacttacctatgacagttgttgtaaacagggatcggctgggcattcaaatctaaaggttgaaaatacggagggtgctgggatttcagtactgctgcagaagtcaagcagtaacaaatggcctgttatagaagggcgacccttagctggtacaaatattatctgttcagaaccctactatacaagagatggtgttactatgctaaagcgtaccattggatgggatagttcatcagcgtcttccattgatcaagggtctacaaggcaatctggacatttggaacaccttaaaagtagtaatcgtcatgactttgagaagtctcaaataagtagtaccatgagttgtaaaagcattgcatccatgtcagacatgtcaagtagcaattgttcagtttcagtttgtcctcgggatgatgcaattgcagatactggcttcctaaccgacaattcagaaagcagtgctcctcgatccataatttgtactgaagaacttaatgagtcgtgtaagtacacactctcaagtgctatagagtgctggtctgctgcacaggctattgttaatgttggcattggttcaactgaagatgtagtgattcagaaactatgtacaggtaggatggttcacaaagattacacaagtgataactcatgttcatcagatactgaaacatgtagcaatatctcactctctctggctcctgaggaacgatgcatacagaaaattgaagaaggtacctcagttggcactccagaacacccagatggtgattgtggcatcagtaattatcaaatgcagcatgaaacaattcctgaggcagataggttggatgatggttgtgcgtctgttatctctgaggaggccaacataatggggcttcctggtaatgttgagggaccaagagaacaaactcaaagatgcttcaccttagaagaggctacggatacaattctcttctgcagctccattgcccatgacattgcatacagggctgcaacaattggactggagcatgaacagcattcagaacttgcttctgctcgtcgcccagcagttcccatggcaggacaatccattcccaggggtgatggttcacggaaaccaccccacagactagtgccaagacataggaaaagatcagaaggtgaaacagttacagaacctgacaagatggaagtggtcgctgaagatcctatacctgttcggccagttcctgaattttcaaggacatcaggcagcttcaagtctccaaaggtcgattcaaagtgcaactgtgcaattatgtagagttatgcatcaactcaagttggcaactatacttattatgatcactaaaatccatggttgcttgttattatttcagcgcatgtgagttaacaaatgaatctgcacccacctggttcagtaagcagcagcgacctacaattttttttggttgtggtgcatttgccctttatttctgggtcatagagtgctcaacgagccattcttttgtaaattcttgcttctccagtcagttctatggtttgtctatttttttttcctgagagtcaacatctcaagcttaagcatatttatataataaaataataacatttatgataccaaataagcatcattagatttttcgttaa

SEQ ID NO: 216094 - DNA, 1659 bp, Zea Mays
atggcagaatccaacaagcggcagagcgccccaaacaaaacccaactcatttttttttcccagctcgcggaacgggcggcctcgttgcaacttgcagagacccagtcctctcgctttctcaccgcgattcgcctcgcttccatccgattcgattcgggagctagaggagagagaggagaggagaggcagtgatgccgctggctgagtcgcccccgtggcgccgcaaggccacagatttcttctccacgtccagtgtcaagctgaagcaggcaggccaatcggccggggataatatagttgatgttgctgggaaggttgggtccgtggtgaagagtcggtgggctgtcttccaagaggctaggcagcagcagcagcagcagcaacgtccgccgcatgagacagtgcaagagcgtatcatcactgctgctgcctccactggtttgcttttcaggaaaggcatttcagagacaaaggagaaggttgcagtgggaaaggtcaaagttgaagaggctgctaaaaaaactgcagataaaagcaagagtatcttgaacaatattgaacgctggcagaagggagtcgcaagcactgatgtgtttggtgttcctattgaagctactgtacaacgagagcaatctgatagagcggtgcccctggtgcttgtgagatgtgcggactacctggttatatcaggtttgaataatgagtacttattcaaatctgaaggtgacaaaaaagttcttcagcagttagtttctctttacaatgaagactcgggtgcatctttacttgaaggtgtaaatcctattgatgtaggtgcactggtgaagtgctaccttgccagtatcccggagccacttactacattttcgctttatgatgagcttcgagctgcgagggttagcattcctgatcttaggaacatattgaagaagcttccaaatgtgaactacatgacgctagagtttgttacagcgttgctgctgcgagtcagccgtaaatcatcacttaacaagatggactcccgcagccttgctgtggaatttgcgcctttgatcatgtggcggcaaggtgacactggcacagatttgcgtaaccacctcaagtttaccctgaaaccgcctccaaaaattgtggatacaacatcaaatgctgccacatgggacctgttagatgaggatgacgaggatgcttcatcccagatccccttagacgatgcttcaccaccagactacagctccattgaggttatccagtgtctgatcgagcatcacaatgccatcttcaccgacgcaaatgaaaccgtgtggagatgatcggcatctcctctagatctctctggtgttagatcgtgctattgtacaagttccaggtaggaaggtgggaaggtggattagcgctcgctattgttagggataagcattttggccggaatatttttgaagtaggtttgtatatacactagtgttaactgttaattctccacgggactagaaccgggtcatgccatatcaataaaaatatatttggatggatgtaaacgaaatgtgttgtttccatcattgattgtattcagatcatataataataacaaagcctttgtccccagttgggctagactaaagttgaaatccaataaaagccacaaattatggtttagtc

SEQ ID NO: 216095 - DNA, 1318 bp, Zea Mays
atggcagaatccaacaagcggcagagcgccccaaacaaaacccaactcatttttttttcccagctcgcggaacgggcggcctcgttgcaacttgcagagacccagtcctctcgctttctcaccgcgattcgcctcgcttccatccgattcgattcgggagctagaggagagagaggagaggagaggcagtgatgccgctggctgagtcgcccccgtggcgccgcaaggccacagatttcttctccacgtccagtgtcaagctgaagcaggcaggccaatcggccggggataatatagttgatgttgctgggaaggttgggtccgtggtgaagagtcggtgggctgtcttccaagaggctaggcagcagcagcagcagcagcaacgtccgccgcatgagacagtgcaagagcgtatcatcactgctgctgcctccactggtttgcttttcaggaaaggcatttcagagacaaaggagaaggttgcagtgggaaaggtcaaagttgaagaggctgctaaaaaaactgcagataaaagcaagagtatcttgaacaatattgaacgctggcagaagggagtcgcaagcactgatgtgtttggtgttcctattgaagctactgtacaacgagagcaatctgatagagcggtgcccctggtgcttgtgagatgtgcggactacctggttatatcagactcgggtgcatctttacttgaaggtgtaaatcctattgatgtaggtgcactggtgaagtgctaccttgccagtatcccggagccacttactacattttcgctttatgatgagcttcgagctgcgagggttagcattcctgatcttaggaacatattgaagaagcttccaaatgtgaactacatgacgctagagtttgttacagcgttgctgctgcgagtcagccgtaaatcatcacttaacaagatggactcccgcagccttgctgtggaatttgcgcctttgatcatgtggcggcaaggtgacactggcacagatttgcgtaaccacctcaagtttaccctgaaaccgcctccaaaaattgtggatacaacatcaaatgctgccacatgggacctgttagatgaggatgacgaggatgcttcatcccagatccccttagacgatgcttcaccaccagactacagctccattgaggttatccagtgtctgatcgagcatcacaatgccatcttcaccgacgcaaatgaaaccgtgtggagatgatcggcatctcctctagatctctctggtgttagatcgtgctattgtacaagttccaggtcactgaatttggaaggtaagttgct

SEQ ID NO: 216096 - DNA, 1661 bp, Zea Mays
gacgaaccggtcggctgaacaagacggcgcgtgtggagccatgcttgccagcgcgacgagagcagggacgtcgtcgacgaccaagcccgaccacgcggcgggcgccgtccacggagccggagccggagccggcggcacccccatcgtcgtcaccgacggcgggcaggaggtcaccgtctctcagttcgtcgcgcagctaggtttcagctgtgttttgacagatgaggcggcgcggcggaggctggacagcatccaccagaggttgaggctgctggagcagcagatggagacgctggaggccgagtagcattagcagatgaagaggcggaatattcttcttgggatagtgacgacgagtaccagaaattcatccaaaacatcaatcgattcctgacttaacctccaagattgcgaggcttgggctgagaagttaatttagctgctctttttttacgtgatggcccggttcagagacagtaatggaggaggcctcgctcgggacgatggcggagccactgctggtgagagcaatcagagggaaaaaggtcgagagggcaccaatctggctcctgaggcaagccgggaggtacatgaagatggcaaggacacagaagaacaaagccactgctcaccatcttggtcttctgaaggtatgaagaagttctccaactggcccactgttcctcaactctactgcaaaggcgagcttcttggtggatgtgatattgttattgctatgcatgacagtggtgaattgaaggatgtttttgaggagcacaatattcccctcaaaccacagggtagcaaaaatgaagaagcaggtcagcccgagtctgcaactgagaagggtggtgcagttgctgaaccaatcgggcttactgatgctcagaaagctcgtttggaaagccttattaattccagcccagtgatggtattcatcaaaggtacaccagaggaaccaaggtgtgggttcagtgggaagttggtccacatacttaagcaagagaatattcctttctcaagttttgacatcctttcagatgatgaggttagacaggggctgaaagtgctctcaaactggcccagttaccctcaactgtacataaaaggtgagctggttggcggctcagacatagtgatggagatgcacaagagtggtgagctgaagaaggttctgtctgagaaaggggttattccaaaggaaagcctggaggacagattgaagtccctggtttcctctgcaccggtgatgcttttaatgaagggcactccagatgctcctcgttgcggcttcagttcgaaggttgtgaacgccttgaagaaggaaggggttagctttgggtccttcgacatcttatctgacgaggaagttaggcaaggtttgaagacgtactccaactggcctaccttcccccagctctactacaaatcggagctgattgggggatgtgatatcgttcttgagatggagaagagcggagacctgaagtcgaccctgtcagagtagacacctagctagcattcttgcttcgctggcatttttaccatattgcctgcattggatcactctactctggtattcgtagatccacgttggtacttgtctgcagtaccacattgctagaattgtgacacatctgcagaaggaataactcacgctt

SEQ ID NO: 216097 - DNA, 2214 bp, Zea Mays
ccctgccttccccacgcgcacgactcacgacgcacggcgaagcgctccgcggggccgcgcggccgcgaacgtcgccacggtcatggtcgccatgacggagccgcgtgacccgccgaccggctgcgccatgttcggcatctacagcggactgttccgccgtcgccgctccgcatccatgacctccctccaccggatcgacgaggccccggccgtggcgccgttggcgaacccggcgcatcatcagaagcccgccgtgcaccacgacgcatcctccctcgcgcgccgccccaacgccgtgcccgtgccggcggcgcagaacggcgccgtcgcccgcgccgcgccaccggcggcgaacggcaggggcaggacagtcaccaaggcggtgaacggcgccggcggcccgaggcccgccgtggagcccgcggcggagtacacgggcatggccgcggagctggacaggatgatcctcgaccaccagagggtcaagggcaccacgcagctggtgcgcgccacctcgggcaacatgatgctgcaccgcaacctcggcaacctgaacgcgggcgccaccggcacggcagtgcgcagccccgtagtagagcgcggcggcaccgcggcggcgaacgagcggaaggcgccgcccaacgggtacgcgtcctccggtatgggcaacatcgtcagggagcccaggacgccggcagcggcgggcgagctgtgccgggcgctgtcgcaccgcacggaccccgagaagctcaaggagatgggcaacgaggagtaccggcagggccattacgaggaggctgtggcgctctacgaccaggccatcatgatggacgcgaggcgaccggcgtactggagcaacaaggcggccgcgctcgccgcgctcgggcggctcatcgaggccgtcgccgactgcaaggaggccgtccggatcgacccttcgtacgatcgcgctcaccaccggcttggcggcttgtacctcagattaggagaagctgacaaagccatctaccacttgaagcaatcttccaacgaatccgcgagcgcagacgtttcccgtgcgcagtcggtgaagagccgcatcgctaagagcaacgacgcgcgaaggctcaagaactggttcacggtgctccaagaagcgcaggccgccgcgtccgacggcgccgactgtgctccacaggtgatggcgttgcaagccgaggcgttgctgaggctgcagcggcacgacgaagcggactcgcttctcagcagcgccggcgcgccgaggttcggtgtcgacgagtcgaccaagttcttcggcaccttcggccacgcctacttcctcatcgtgcgagcccaggtcgacatggctgctggcaggttcgaggacgcggtggcgacggcgcagacggcgtttcagctggacccgagcaaccgggaggtggcggtcgtgcagaggagggccaaggcggcggccgcggcgcggctgcgtggcaacgacctcttcaaggccgccaagttcgtggaggcgtgcgccgcgtacggcgagggcctcgacagggagcccggcaacgccgtgctgctctgcaaccgcgcggcgtgccacgcgaagctcgggcggcacgagaaggccgtcgaggactgcagtggcgcgctcgtcgtgcgcccgtcgtacagcaaggcgaggctcaggagggccgactgcaacgtcaagctggagagatgggaagcgtccttgagagactaccaggtgctgatccaagaactgccggagaacgaggacgtgaagaaggctctctctgaagtcgaagccaagctcaaggaccaaaggaacggggctgcagcagccagatctcagcactgacgtcctgtaataagtttctttatactgtcggctacccgagaaatcaaccgcaacttcttaagaagacaaaggctttcgacaaaacaattctgcacgcgcagctgcacagtttgttgtaccagatctcttgtttgttttttgttcaccttacaccaatttgcaaacagaaccaagaaatggaactgtacataatacttgctccaatggtgatgtgtagttagctgaatgtgcttggtccttccgaaaagaaaactgatgtatatagttatgggtgataccgcctaacggtgacggttcccagagatttgtgaagattcatctgaaactgaacaacagcattctgaaggctctgctctaaaacctaatttttttta

SEQ ID NO: 216098 - DNA, 3184 bp, Zea Mays
ccgagctcccccacattgaccgcctccgtaccagcgacagcctttccttcaatcatccactgccaactcaattttcttgtggaggccgggcccccatcacccgattcatccctgccactttgcatttcaggtttcagctcacctctcgcgttccttctttctccctcccgctcaccgccagcgccaccatgcccaccgagccacccattgctctcgccgcactaaactctccgccgtagccatcgcccttttggcagaaccatgtgtaattacaactgaagacgctagtatgagccaagaactacaggggaggtcggcggacccgatggcggccgatcacgcgctgccattggcgtcatcagcgccgtcctggccggtctcgacgcacccctccgccgcttccgccgccgccgccgcggtctactacttcggcctttctttcgctctagcgcaggggagagcttccggcgggttcgatcttggtggcgcgaggcggcgggggtgccggtggtcgcgggccatggagctggcgctgcaggagaaggtagccgcgcttgagcgccaggtcgcggagctccgctgtcggcgggccgaggacgccagggccaacgagaaggtggcgggaattttcgcgtcccacgaacagcggtggttcgccgagcgcaagtccctgcgccggcaggtgcacgccgtcgtcgccgctgcgcgcgcgcgcgaggccaagcgcgaggaggagaccgcggagctcaggcgccagctggaggagcagcgggacacagtggcgctcaaggacagggccctggagcaggaggtgcagaggcggcaaggcgcggaggagcgactacgagccgcggagaaggcggaggaggagctgcgggagcgcgccggcaaggaggcgatggagcacgccgcggaggtgcggaagcacaaggcggcgttcgtggagctcgtgtccgcgcagcggcagctggaggcggacctggcccgcgccgcgcgcctcgcggacacggcggaggccgagctccgggccgcgctggagcgccgcgacgaggcggcctccacggccgccgacctctccgccgaggccgcacgcctgcggcgggacgccgaccacaaggacaagatcctctcggcgatgctgcgcaagtccaagatcgacatggaggacagggagatgctggtgcgggaggtcaagatgtgcaaggccagacggaagcaggcggagctggaggccgaccggtggcgcaagatgtgggagtcccgtggccaccgccggggctcctccagatcgtcggcgcggggcgtggccgacctgccggccgggagctcagacaagctgctggccaccgacgccgccgtggcgtgcgccaccaatgaaactaagatattgttcgtggaccacgcggagggcgacgccaagaaggaccaccggaagacgccggcgaaggaactgaacgccattgaatgcgtcgaccgctatgctagccatgtcgtcgacgacaagcccgctgtggaggaataccaaggcctgcaggagtggttccagatggagacggagaagtacacggctctgatacaacaccggcacacggcggagatcgaggcgttcacggagcagctccggctcaaggacgagaagttggaggcgttccggtggcgcgcggtgagcatggacgtcgaggcggcgcgtctccggagccggatccacgagctggagggccgtctagcgcggcacgagaagcacagcgccgcgctggaggccctgctccaggacagggaaagcgagaacagagcactcgaggagcagctggagacgctccaagcgcaggcgcttggtgtggagatctgcacgccggcccgtggcagtggccaagacgacgggctcgacgaccagtgcatcgcgtgttcgcccgtggatgccgtccagagaacaatgtcatccggaagctcgcggcaccaagagggcgccgaggtcagcaagtatgagacgaagctggacgagctagtcaccctctccccagaagatcacaaggaggatgcaacagaggcgcttgtagtctcggtcggggatctcgcgtgcgccgtcgccgcggcagcaacgtccgtggaacacgagcgaagacatgatgccccggcgagccggcagtctttcaggtctgagatcgaggaggaggaggaggtgtacaccgagccgggcaatgcacacacgacaggtagctcccaagaggcgacgtctgagctcgcgctcgtggtcgtgccgcctgggcacaagagctctgcttggaagacggacatccacgccctagccgtgtcgtacaagatcaagaggctgaagcagcagctgcttgtgctggagaggctggccaacgaatgcaaggatgaggaagccgcggcgacgaagccgtcagggagtgaagccagctgcagcggcggcggcggcagcaggcagcagccgaggtcgaggtaccacacgatgatgtcgttcctcagcaagcacgtcaggcggtaccagtccctcgacgacaagatcgacgacctctgcgctagaatggaggagagcaagaggagcgcggggcggggcgcgggagaggagagccagagccagagcgcggcgctgggccagttcctggaggagacgttccagctgcagcgattcatggtggccacggggcagaagctgctggagacgcagtccaggatcgcggctggcctcgcgcgcgatcgctgctgctgtggcgacggagaagacggcgtggatatgaagaggctcatggaggtggctggggcgctgctgagggacgtgcagcgagggctggaggtgcggatcgcgcggatcatcggcgacctcgagggcacgctcaccttccacggcatcctccgaagcacgcgctgatatatatacacacacgcacaggcacacacacccgacgctgtcctccagacacagtaaggccccctttgggagggctcctggacggctccggctctagctctttgctggagccctcccaaacgcagcgtccaaaaacagctccggaggaggagctggagccaggaaacgggcaggagccggagccggaaattttggctctgcacggctccgttcgacacttcgcgtagtctgttcatctaccaagtttctttagtgtagttagcaagtagtttgaatgcagtttgaactccg

SEQ ID NO: 216099 - DNA, 2848 bp, Zea Mays
atgccgaaaggcaaggcaaacgcaaatgccacaacccacctctcgactcgccgccgcagccgcatgacacccaccgtcggctggccatcccctcgggtcgccacccccttcggccgctgcctcacagctcgctgcatcgtcagtctcggcctccacaaccaccaagtcctcctatcccgctttgccgccgccttcaatgccctcgcgtccccgtcccgcaacgccgccgccgccagccggccatccgttgcgctcgccactctcctcgggcgctgctgcaccgtgcgctgcctcgcccagctccacgcccgcatcatcctactcggtctccacaaccaccacgccctcctcgcccgcttcaccaccgcctgcgatgccctcgaatgcccctccgtcgccgcctctttcatcgccgcgcttaccgactcccacgccgccccgctccgcctccgcaacgccgtgctcgcgtccctcgcccgccacgccccgctccacgccgcgctcacggagttcaacctcctccgacaggccgcgctcccggactctttttccttcccttgcctcctccgcgcgtgcgcccgcgtatcctgcctccccgctggacgagccctgcacgccgccgctatccgccttggcgtgcacgccgatctcttcatccgcactgcgctcatccagttctacggcaggtgcggcgtggccgacgcggcccgggcgctattttatcaaatcgacatccccagtgaggtttcctggaccgccattatcgttgcctacgtcaacaatggtggcatcatagacgctagagctctgtttgatacaatgcctcaaaggaacgtggtgcactggaatgtgatggtcgatggttacgtaaagtgtggggacttggagggcgcaaggaggctgtttgatgaaatgcctgagagaactgctacagcatgcacatctttgattggtgggtatgcaaaggcagggaacatggaagctgcgagattgttgtttgataagttagaggaccgtgatgtgttctcatggtcagcgatgatatcaggttatgcacagaatggttaccctggcgaggctttgaggacttttgatgagttccaagggcaaggcatacacccagacgaacttgttgtggttggcctgatgtctgcatgctcccaactaggtaacatcaggttggcaagttggattgaagattacatcacaaagtactctatagatatgaacaatgctcatgtgttggctggtcttgtgaacatgaatgcaaagtgtgggaacttggagagggctacttttttgtttgagtctatgccagttcgagatgtgttttcatattgttcactgatgcaaggttactgcctccatggttcagctgacaaggctgttaagcttttctctcggatgcttttggagggactcacccctgacaatgctgtgtttacaattgttttaacagcttgctgtcatgctggtctagtagaagaagggaagaagttctttgatataatgaagaatgtgtacttgatggtgccatctggtgagcattatgcttgccttgtcaatcttcttggacgttgtggtatgctagaagatgcatattggcttatcatgtcgatgcccgggaaacctcatcctggagcatggggtgcactgttgggtggatgcaagcttcactgtaatatagagcttggaaaaattgcagcaaaaaaactttttgaaattgaaccggataatgctggaaattatgtctccctgtcaaatatgtatgctaacattgacaggtggggagatgtttctgaagttagggctgagatgactggaaagagaataaccaaaatagcagggcgtaccctagttttgcagtgaagcagtgttgaccagaatggtgtatttatcttgtaccatgttactggcccccattgaaaacttgaggctgtgaataaacgtaaaatgagatatcatgctcaatgcatatggtggaagtcatcatatggtgatatagatttggtggtcaacaggctgagttcatacactggaaacctttttctcaaatacacaggggagctgcgtaccattggattgagaagaacacctaagtacaaaaacaaaaagaccaccacaccaacacagccgtaccaaatacacacacatacactcaaacccaacctcataggtggcatacatctggaccgagttaagacacttccattagcttagagttcacattgccagactcagctgggtggatgctttgatttttggtattgtgaaagatcagggtgcttctgtacaaatgttggaatatgggcctgattaagacacagagttttgacatttgctgttaagcctgtaccagaggactgaaggcgccattctctccagagctgcagaggcagcatccaagcctggtttctcttttcttgcccttctaccactgatccctctgatccaatctcactgcgtgctgctgccaggtcaaatcaatgtctacctcgtgccctctaccgcacacctgatcgtgcttccctggccgctgtctccccttcttagcccccatggaggcagaaattgggctgacactgacagggcctgcaccagtctagaggctgctcagctcctgccgccaccatggaggggatctcatcaaaggagagctgagggacacagaaggggtagtgggcggaggttgagtgcgtatggagggaggtgcagcgaagaagctgaggctgagccatggacagaaaaagctgctcgctcagtcaccctgcgctttagaggaacatggtttgtcagtagaaattggagacatgctgggccattgtcaagttcatgggtgaagaattga

SEQ ID NO: 216100 - DNA, 1972 bp, Zea Mays
atttaattagggtttgctgggtagcagcaactgttttgctgcaatctgacaaagtggagggtttaagagtcgctgcttcttttatgtctgaacaatctttgctttatttgggattgctgggagagtattcttgcgcgacgaggaaaaggcacaagtttctgctccactgcatgcatcaagagcccatccggtttccttgttctgaggtgtcattcgctagtgctcagagccggcttggttttctcgaaagatcagcagccactcttgattcaggactttgtcacacctgatagcatctagttaatacatctttatccaagatggcactgcaaaacattggtgcttcaaacagggatgatgccttctacaggtacaagatgcccagaatgattaccaagatagaaggtcgtggtaatggtatcaagacaaatattgtgaacatggttgacatagcaaaagcacttgccaggcctgcttcctatacaaccaaatactttggatgtgagcttggtgcacagtccaaatttgatgagaagacagggatttccttggttaatggggctcatgatactgcaaagctggctggtctccttgagcctgtgggtttgtctcagatgttgacatgagggacaagctcacaaccttcatcctgaaaaacccaccagaacagaagaagggaggaaaagacaagaagaaggccatgaggagagctgagaaggaacgcctgaaggaaggtgaggctgctgatgaggagcagaagaaactgaagaaggatgcaaagaagaagggtgcatcttccaaggagtctactgccaagggttcaaagaagaaggctactgctggtggctctgatgaggaccactcaacctctccaactcgcagccgtgatggtgaccatgcagctgcggacgaggaagaggatgatgatgatgtccagtggcagactgacacttctattgaggctgcgaagcagcgtatgcaggagcagctgagtgcagcaaccgctgaaatggtgatgctgtccactgaggagactgagaagaagaaacatgcaacccacaaagatggcactgctaatggttcagcaaaagaaatacctgatgaaaagcctgccgtcactaagcctagtccctataaagaactgattggagacatcaaggctagcctgggaagtgctcccacacctacccagctcaaggctatgctggcctcctcgacccttccttcccaggacgtgatgaatgctctcctcgaggctctctttgacggtgtgggcaagggatttgcaaaggaggtcgtgaagaacaagaagtaccttgcagttgctgtgccagatgagggtgcccagaccctgctggttcaagccatcgaggcttttggcagcaagtgcaaccccgaggcgctgaaggaggtcccagttgtcctgaaagccctgtacgacggagatatcctggaggaggaaaccgttgtggactggtacaacgctgctgtcgcagctggaaaggactcccaggtcgtcaagaatgccaagccgtttgtcgagtggctccagagcgccgagtctgacgacgaggatggcgatgaatgaagaggcgatgctgctctactgttcatggcttcacttgataatattaattcaataagtttattttgcttgtctggtgtcatcgatgtcagtcttcgtttggtgtcagtcggtctggtgtcgatgtctaaaaactgttattgtcgtgccgcgcagcataccctatgtggttggctgcgtttggtgtcagtccgttttgtgtttggatgtcacggtttattatgttcctgtgggctgccactatatattatagttgcttgggatgtgttttttataaccttttggggtgttgcactttcttattgcattgttttatagtattttaagggttgatgagattttatatcaaacttatatggaatccttatcatgtgttggtactggtga

SEQ ID NO: 216101 - DNA, 2040 bp, Zea Mays
atgaaattgagcaaaattgggataatattttgacaaatgtcatgggaactttgaatatgttgggtctggcaaagcgagttggtgcaaggtttttgttgactagcacaagtgaagtttatggtgatccacttgagcatccacagaaggagtcatactggggacacgttaatcctattggtgttaggagctgttatgatgaggggaagagaacagctgagacttcaactatggactatcatcgtggtgctggtgttgaggtgcgtattgcccgcattttcaatacatatggtcctcgtatgtgtctcgatgatggccgtgtggtcagcaattttgttgcacaggcactacgaagacaaccaatgacggtttatggtgatggaaaacaaactcgaagtttccaatatgtttctgatctggttgctggattgatggctctaatggagagtgatcacattggtcctttcaacttgggaaacccaggagagtttaccatgttggagctagcacaggttgtgaaggaaacaattgacccaatggcaaccattgaattcaaacccaacacagctgatgatccccatatgagaaagccggatatcaccaaggctaagcaactgctacattgggagccaaacgtctctctcagagaaggccttccgctaatggtcaaagacttccgtcaaaggatctcggatgagtaatcgaggcaatcctacgatactggtgaccggtttgattctgaactatgctgcaaatacagtcagaagctctttatcgattggagccatgcagtacagtgtactgtgtacacagagactgtagaatcacccaggccccatttggaatgtggggatccatacaatttccactggatagtactgtttctgtgaaataactgaaaagttcatgggaagttcgtgttaatcttttttttttatatcttggtggggcagaacagaagcagtcaaatatttttttgtgcatatgtgaaattccagagttgtgggtggtgagagataggatacaatgctgtatgtatttcaggaacttctgtaacacgagaacattcatcatgtgaaaaaatgtaactgaatgtgttggccagctcgctcttgctgtacattcaactgacagtccacaaattccccattctcaagtgaaaaataacagtctcgtatacagtatctgagcagttttctggatacatttgtcatcagaagttgacttccaaaaacatcgaagctttgcaacacagtaggtgtttctgcaaattctgcagccttctacttgagatgcacactgaaactcagcactctgctcaggctgacattattcccacccgtttctggtacaccaccagcagctctgacaacggcaaagccggaggcgccactgtaccgccccgtccctccgacgaccgcgacgtgagactcctcctggtcgtcgcggcggacgccgaagaagctgatgctgtcgcccgcgccgtcgccggcgaacgaggccttcacggccaccatatggctgccgttgtcagccacgccggtgacgaggacgccctgcagcctcccatccagaggcagcccgaactccttgctgccgcggagccgctcgtcgaccacggtgaccgcggcaggccggagcgcgtccggcctcgtcaaggcgcgcagccagcggctgccgattggcccctcgtccgtgaagaccgggcgccgcgtggaaggagctgtgggtttgggcgacgcgacgccggtgccggtggtgtacagcgtgatcgtttgggcggagctgcgggacggcggcgacggcgaggaaccgcggcgtgccggacgggcgctggctgccgtgctcgtcaccgcgagcaggagcgcgagagcggcggcgcaggcttgcttgaggatgcgagtgcgagattgcgcgtgcatcttcgggcccggccggggccgtgcgtgtgtgtttttgcgtctggttggagcgtgtttaagtggtgcctgaaaggatttttggtttaggtggcgaagagggcaggcagatgtaggatcagag

SEQ ID NO: 216102 - DNA, 2601 bp, Zea Mays
cgccacgtagctctcgaccgcgctctcgccccgcctccctctcgcccgcctctcgcccgggcgggcgctccagcgcgggcgagagcgagtcccacaccataccaggtcaccatacccgcctccgccgcctggccgcgctctcccgccatgaagcagctccacaagtcttcccccacccaagcgccatcgccggcgcacgcaccggctcccaaggcagccaagccggcgcgccctggcccgcgctcctggatcgggtatatcctccgcgagcagcgcctcctcttcgtcctcctcggcgcgctcatcgccaccaccttcttcctcatccgtccctacttctcgctctccccgtcctcccacctccccgacgtccgcccgctcttctccttcgccgcccgctccgctgtcccgcccggcttccgcccgcccccgcgccgcgtcgtcgtcacaggcggggcagggttcgtcggcagccacctcgtcgaccggctcctagagcagggggacagcgtgatcgtggtcgacaacttcttcaccggcaggaaggagaacgtcgcgcaccacctccggaacccccggttcgagctgctccgccacgatgtagtcgaaccaatcctcctcgaggtcgaccggatctaccacctcgcatgccccgcgtcgcccgttcattacaagtataacccaatcaagacgatcaagacaaatgtcatgggaactttgaatatgttgggtctggcaaagcgagttggtgcaaggtttttgttgactagcacaagtgaagtttatggtgatccacttgagcatccacagaaggagtcatactggggacacgttaatcctattggtgttaggagctgttatgatgaggggaagagaacagctgagacttcaactatggactatcatcgtggtgctggtgttgaggtgcgtattgcccgcattttcaatacatatggtcctcgtatgtgtctcgatgatggccgtgtggtcagcaattttgttgcacaggcactacgaagacaaccaatgacggtttatggtgatggaaaacaaactcgaagtttccaatatgtttctgatctggttgctggattgatggctctaatggagagtgatcacattggtcctttcaacttgggaaacccaggagagtttaccatgttggagctagcacaggttgtgaaggaaacaattgacccaatggcaaccattgaattcaaacccaacacagctgatgatccccatatgagaaagccggatatcaccaaggctaagcaactgctacattgggagccaaacgtctctctcagagaaggccttccgctaatggtcaaagacttccgtcaaaggatctcggatgagtaatcgaggcaatcctacgatactggtgaccggtttgattctgaactatgctgcaaatacagtcagaagctctttatcgattggagccatgcagtacagtgtactgtgtacacagagactgtagaatcacccaggccccatttggaatgtggggatccatacaatttccactggatagtactgtttctgtgaaataactgaaaagttcatgggaagttcgtgttaatcttttttttttatatcttggtggggcagaacagaagcagtcaaatatttttttgtgcatatgtgaaattccagagttgtgggtggtgagagataggatacaatgctgtatgtatttcaggaacttctgtaacacgagaacattcatcatgtgaaaaaatgtaactgaatgtgttggccagctcgctcttgctgtacattcaactgacagtccacaaattccccattctcaagtgaaaaataacagtctcgtatacagtatctgagcagttttctggatacatttgtcatcagaagttgacttccaaaaacatcgaagctttgcaacacacagctctgacaacggcaaagccggaggcgccactgtaccgccccgtccctccgacgaccgcgacgtgagactcctcctggtcgtcgcggcggacgccgaagaagctgatgctgtcgcccgcgccgtcgccggcgaacgaggccttcacggccaccatatggctgccgttgtcagccacgccggtgacgaggacgccctgcagcctcccatccagaggcagcccgaactccttgctgccgcggagccgctcgtcgaccacggtgaccgcggcaggccggagcgcgtccggcctcgtcaaggcgcgcagccagcggctgccgattggcccctcgtccgtgaagaccgggcgccgcgtggaaggagctgtgggtttgggcgacgcgacgccggtgccggtggtgtacagcgtgatcgtttgggcggagctgcgggacggcggcgacggcgaggaaccgcggcgtgccggacgggcgctggctgccgtgctcgtcaccgcgagcaggagcgcgagagcggcggcgcaggcttgcttgaggatgcgagtgcgagattgcgcgtgcatcttcgggcccggccggggccgtgcgtgtgtgtttttgcgtctggttggagcgtgtttaagtggtgcctgaaaggatttttggtttaggtggcgaagagggcaggcagatgtaggatcagag

SEQ ID NO: 216103 - DNA, 3816 bp, Zea Mays
gaacatgccaggctcaaggcccacgcacagttgcctcaaagtgctgtcctcaagatcctgtcagctcctccaccagcagaatctaattctttccgtgtggacttccggtcttctcatgtgcattaccttaataacttggaggaagatgccatgtatagaagatggagaagcaacatccaggagctcttgatgccggtcttccctggtcagatgcggtacatccgtaaaaaatctgtttccactctgtttatgtgcttgatcctgcttcagcctgtggtgcagagaccattgacatgatggtatctctatatcaagatagtgtccctataaggtttggtatcataatgtattcttcaagattcatcaatgttgttgaaggaagtgatggcactcttacaaataatgatggagaagacacttccattttgataacaaggctttttcttgtacatcaaagaaacatactcaacacagttggcattccaatttctcggcaatatacataaatcaaggaatggtgaagatgactacaatgaagagcttgttgaggctcatcatgttgaaggggcatttgttgattcactattatcaactgctaaatctcatccacaagatgtgctgctaaagttgcaaaaagagaacatgtacaagcaggaagctgaagaaagctctcattttgttcacaagcttgggttgtatagactccagtgttgtctgttgatgaacggacttgtccatgaagcaagtgaggaagcgaccatgaatgctatgaatgatgaacttcctaggattcaagaacaagtttattatgggcatatccagtcccatacagatattttagagaagtttttgtcagaaaatagctacaagcggtacaacccatcaattactggcaagaatgcagagaagaaatttgtttcgctctttgcatcgtaccatcaggacagctttatatttaatgacatgaagtacttacagtctcctggaactacagatgatgcaaaacctgttactcatctacttgccattgatctttcatcaaaagttggaacaaaattgctttatgaggccatactttacctgatggacggatctgatagagctcgtgttggtctgctactttatgtccacactggtggttcatcacctattttacttctgaaagatattttcgatagaactatttcttctttcagctataaagaaaaggtattagtcttcctgcatgggctcttgaaattttatgatgcccaacctttgcccgcctcatctgttgctgatgattggactagaactatgatggaaaaggtctataccttagctgctgaaactgctttgcctgttgatgactataaagcgtggtttaaaagtttctctgctgatacagttctcaaagggatggataagttatctgacttcttatttgggcaattggggcttgtgtttggtagtaatgctgtgatcaccaatggacgggtttttattatgaatgaagggaaatcatttctagccaatgatttaggtctccttgagtctatggagtatgatttgagaacgaaatacatatttgaaataattgaagaggttgagtttgccagtgttgaccctgatgacctaacaaaccaattctacagcgacattgccatgttgatctcatcgtcgatgtctgttcgtgaaaggacatctgaaagagcccattttgagattttacatgcggaacatagtgctatcaaattgaataatgcaaattcaagtattcacattgatgctgtcattgatccgctaagtcccactgggcaaaaacttgccccacttctacgcatactctggaaacaaattcagccgagcatgaggattgtacttaatcctattagttccctcgcagatcttcctttaaaaaacttctacagatttgttcttccatccatggatgattttagcagtacagatcattctgtacacggacctaaagctttctttgcaaatatgccactgtcaaaaacacttacaatgaacatagatgttccagaaccatggcttgttgaatcagttattgccatccatgatttagacaacattcttttagagaatcttggcgatgtcagaactttgcaggcagtatttgaacttgaagctctcctcttgacaggtcattgcatggaaaaggaccgggaccctccccgtggtctgcagtttatccttggtactaaacaaagaccacacttagtagacacacttgtcatggccaacttgggttactggcagatgaaagtctcccctggtgtatggtacctacaattggctcctggtcgtagtgccgatctgtatgagctacctccgaaactcattgccattgatagcttgagaggcaaactaatgcatattgaagtgcaaaagaagaaaggcaaggagcatgaggacttgctaaatgctgccgatgactaccacttccaggaaaagacggataacaaaggctggaataagaaccttttgaaatgggcttctagtcttatcactggtgatgcttcatcaaaaagtaaagctgataaaaccactgaccgtaaggatgcaagacaaggggaaaccataaatatattctctgttgcttctgggcatctgtatgagcgtttcctcaaaataatgattttgagtgttctaaaaaagacacagaggccagtgaagttttggttcattaagaattatctatctccacagttcaaggatgtcataccgcacatggctcgggaatatgaattcgagtatgagctcgtcacatataaatggccaacatggttacacaagcagaaagagaagcaaaggattatatgggcatataagatcttatttctggatgtcatttttccactttcactgaggaaggtgatttttgttgatgctgatcaaattgtgagagcagacatgggagaattgtatgacatgaacctgaagggtcgcccgcttgcatatactccattctgtgataacaacaaggatatggatggttttcgattttggaagcaaggtttttggaaagatcatctgcgaggaagaccgtaccatatcagtgcgctttatgttgttgatttggccaaatttcggcaaactgcttctggggatactcttcgtgtcttctatgaacaactcagcaaggaccccaatagtctctccaatcttgatcaggatctcccgaattatgcccaacatacggtgcctatattctctcttcctcaagaatggctgtggtgtgaatcttggtgtggaaatgccacaaaagcaagagcaaagaccattgatctatgcaacaatccaatgacaaaggagccaaagcttcagggtgctagaagaatagttccggagtggactggtcttgacagtgaagcacggcagttcactgcacgaatcttgggtgatgatgtcgagcctgcagatgccacacctccgccatcggaggcaccgaagcctgaagatgatcaggatgtgaaagatgagctatgatcgcaagatgtttccaggcttggtcttactgaatgaaagtttggtgactcgacagtcatcagttcagaacacaggcacacagctagtggagcgcagagggatagtttaacgcaggtgcaaatttgtcaaaacactacacctggaatcctagactacgttgattcagttcatccctctctcactctagcaaggaagggaggaggattggaaggagatggccagcaaaaagaccatagggatcaagtagaagaccacaagatgaggattgagaaggaggagccttctctccctagcaagaaagagctagaaaggtatttcaag

SEQ ID NO: 216104 - DNA, 5716 bp, Zea Mays
gtctccggcgaagtctcctcccgaccgccctccgcatctcgtcgacgacgaaaggaaaacctcacaaatcctctggatgcggggtctagccgcctccgccctgtagcaccagtcggatcgaagaagcacaagcgcttcgggtcggcgcgcacctctccctcatggtggcggcgcgaggggcccgatctgggggctcggttgcggcggcggcgctggtctcggttcttctcgtgggttgcctcgtcgcgggcggccagggggcggagatccgtcgccagaaaaacgtgcaggctgcgctccgggccaagtgggctggcacgccgctgctgctcgaagccagctgtaggcaacgttggctgctagaggacctggcgggcgacgggccgacgtcattggcgaccgactctgaatgtgggagagcggagggggtgctcgggcactggaagagggaggcgggtgttggaggacaccgtcctggcggcgctggaggtggaggagggggtggaggagaggagggagaatggaaggatctattttgggattttattgacctctggaaggatctagagaaaggctctgaatgtttaacagcaaaatgctgtgcccagaagattgttgaggatgcccacatactactcaatgaaccgctctcttcaatttttgagttttctcttacccttcgatcagcatcaccaaaattagtgctttaccggcaacttgcaaaggagtcattatcttcgtttcctattgatgattcaccagagaacatttctggtcatggcactggaaaaacttttgatggggctgtggatcctggctcttctggaggaacttgctgctgggtagacactgggaatgttctattgttcaattcagccgatctgcatgaatggcttgggggattgggcaagctagctatggattctactgaacagcctgaactctttgaatttgaccatatatatcgtcgcacaaatattactgctccagttgctatattttatggggctgttgggacaaaatgcttcaaagagctgcatgttcaactagtagaagcatcaaagcagggaaaaatcaggtatgctctgcgtcctgtcctaccatctggatgtgagactacgtccaccttttgtggttcagttggtgctgtagatgcagtcaccttgagtggttatggggtggagcttgccctaaaaaacatggaatacaaagctatggatgacactgctataaagaagggtgttcctctagaagatcctaaaacagaggacctcagtcaagaagtcagagggtttatattttccaagattttggaacgcaagccagagctaaatgctgagataatggccttcagagattatctgttgtcatcggcagtgtctgatacacttgaagtctgggaactcaaagatctgggtcatcagacagcacagcgaatcgttcaagcatcagaccctttacagtcaatgcaggaaatcaatcaaaatttcccaagtatagtttcttcactatcacgaatgaagcttgacgattccatcaaagacgaaattattgcaaatcagcggatggttccacctggcaagtcattgatggctttgaatggtgctttgatcaatatcgaggatcttgatctttacctgttaatggatatggtccatggagaattatccctggctgatcagttcgtccggttaaagttgcctcaaagtgctgtcctcaagatcctgtcagctcctccaccagcagaatctaattctttccgtgtggacttccggtcttctcatgtgcattaccttaataacttggaggaagatgccatgtatagaagatggagaagcaacatccaggagctcttgatgccggtcttccctggtcagatgcggtacatccgtaaaaaatctgtttccactctgtttatgtgcttgatcctgcttcagcctgtggtgcagagaccattgacatgatggtatctctatatcaagatagtgtccctataaggtttggtatcataatgtattcttcaagattcatcaatgttgttgaaggaagtgatggcactcttacaaataatgatggagaagacacttccattttgataacaaggctttttcttgtacatcaaagaaacatactcaacacagttggcattccaatttctcggcaatatacataaatcaaggaatggtgaagatgactacaatgaagagcttgttgaggctcatcatgttgaaggggcatttgttgattcactattatcaactgctaaatctcatccacaagatgtgctgctaaagttgcaaaaagagaacatgtacaagcaggaagctgaagaaagctctcattttgttcacaagcttgggttgtatagactccagtgttgtctgttgatgaacggacttgtccatgaagcaagtgaggaagcgaccatgaatgctatgaatgatgaacttcctaggattcaagaacaagtttattatgggcatatccagtcccatacagatattttagagaagtttttgtcagaaaatagctacaagcggtacaacccatcaattactggcaagaatgcagagaagaaatttgtttcgctctttgcatcgtaccatcaggacagctttatatttaatgacatgaagtacttacagtctcctggaactacagatgatgcaaaacctgttactcatctacttgccattgatctttcatcaaaagttggaacaaaattgctttatgaggccatactttacctgatggacggatctgatagagctcgtgttggtctgctactttatgtccacactggtggttcatcacctattttacttctgaaagatattttcgatagaactatttcttctttcagctataaagaaaaggtattagtcttcctgcatgggctcttgaaattttatgatgcccaacctttgcccgcctcatctgttgctgatgattggactagaactatgatggaaaaggtctataccttagctgctgaaactgctttgcctgttgatgactataaagcgtggtttaaaagtttctctgctgatacagttctcaaagggatggataagttatctgacttcttatttgggcaattggggcttgtgtttggtagtaatgctgtgatcaccaatggacgggtttttattatgaatgaagggaaatcatttctagccaatgatttaggtctccttgagtctatggagtatgatttgagaacgaaatacatatttgaaataattgaagaggttgagtttgccagtgttgaccctgatgacctaacaaaccaattctacagcgacattgccatgttgatctcatcgtcgatgtctgttcgtgaaaggacatctgaaagagcccattttgagattttacatgcggaacatagtgctatcaaattgaataatgcaaattcaagtattcacattgatgctgtcattgatccgctaagtcccactgggcaaaaacttgccccacttctacgcatactctggaaacaaattcagccgagcatgaggattgtacttaatcctattagttccctcgcagatcttcctttaaaaaacttctacagatttgttcttccatccatggatgattttagcagtacagatcattctgtacacggacctaaagctttctttgcaaatatgccactgtcaaaaacacttacaatgaacatagatgttccagaaccatggcttgttgaatcagttattgccatccatgatttagacaacattcttttagagaatcttggcgatgtcagaactttgcaggcagtatttgaacttgaagctctcctcttgacaggtcattgcatggaaaaggaccgggaccctccccgtggtctgcagtttatccttggtactaaacaaagaccacacttagtagacacacttgtcatggccaacttgggttactggcagatgaaagtctcccctggtgtatggtacctacaattggctcctggtcgtagtgccgatctgtatgagctacctccgaaactcattgccattgatagcttgagaggcaaactaatgcatattgaagtgcaaaagaagaaaggcaaggagcatgaggacttgctaaatgctgccgatgactaccacttccaggaaaagacggataacaaaggctggaataagaaccttttgaaatgggcttctagtcttatcactggtgatgcttcatcaaaaagtaaagctgataaaaccactgaccgtaaggatgcaagacaaggggaaaccataaatatattctctgttgcttctgggcatctgtatgagcgtttcctcaaaataatgattttgagtgttctaaaaaagacacagaggccagtgaagttttggttcattaagaattatctatctccacagttcaaggatgtcataccgcacatggctcgggaatatgaattcgagtatgagctcgtcacatataaatggccaacatggttacacaagcagaaagagaagcaaaggattatatgggcatataagatcttatttctggatgtcatttttccactttcactgaggaaggtgatttttgttgatgctgatcaaattgtgagagcagacatgggagaattgtatgacatgaacctgaagggtcgcccgcttgcatatactccattctgtgataacaacaaggatatggatggttttcgattttggaagcaaggtttttggaaagatcatctgcgaggaagaccgtaccatatcagtgcgctttatgttgttgatttggccaaatttcggcaaactgcttctggggatactcttcgtgtcttctatgaacaactcagcaaggaccccaatagtctctccaatcttgatcaggatctcccgaattatgcccaacatacggtgcctatattctctcttcctcaagaatggctgtggtgtgaatcttggtgtggaaatgccacaaaagcaagagcaaagaccattgatctatgcaacaatccaatgacaaaggagccaaagcttcagggtgctagaagaatagttccggagtggactggtcttgacagtgaagcacggcagttcactgcacgaatcttgggtgatgatgtcgagcctgcagatgccacacctccgccatcggaggcaccgaagcctgaagatgatcaggatgtgaaagatgagctatgatcgcaagatgtttccaggcttggtcttactgaatgaaagtttggtgactcgacagtcatcagttcagaacacaggcacacagctagtggagcgcagagggatagtttaacgcaggtgcaaatttgtcaaaacactacacctggaatcctagactacgttgattcagctggaataattccgggtgcaatccgatgtaaacgaacaaggtctaatagtttcaagacctttaaccaaatcatatggcggggaagctgcgtccagtaataggttaacaaggcagccagctggggtgtagaactctgtctgctctcagctgcatacacatagactgtaatggtcaacaatttaagatctccttgagacattgtaaaatttatcggctgccagtcgaaaggcaacagcgaagctggcagctgaaatgcccgagaattttgtagcactcagcaaacggattttttaaacactcagtaagtcaataatgcctgtcgcatgtaacagcaggctattgtgggcatggcagctaaccgttatactaaaaaaaaaatgccaagtgc

SEQ ID NO: 216105 - DNA, 5604 bp, Zea Mays
cgttctttaaaatccgtgttcaccattctccccctaataaatcacacaggtctccggcgaagtctcctcccgaccgccctccgcatctcgtcgacgacgaaaggaaaacctcacaaatcctctggatgcggggtctagccgcctccgccctgtagcaccagtcggatcgaagaagcacaagcgcttcgggtcggcgcgcacctctccctcatggtggcggcgcgaggggcccgatctgggggctcggttgcggcggcggcgctggtctcggttcttctcgtgggttgcctcgtcgcgggcggccagggggcggagatccgtcgccagaaaaacgtgcaggctgcgctccgggccaagtgggctggcacgccgctgctgctcgaagccagtgaattgctttcgacagaatggaaggatctattttgggattttattgacctctggaaggatctagagaaaggctctgaatgtttaacagcaaaatgctgtgcccagaagattgttgaggatgcccacatactactcaatgaaccgctctcttcaatttttgagttttctcttacccttcgatcagcatcaccaaaattagtgctttaccggcaacttgcaaaggagtcattatcttcgtttcctattgatgattcaccagagaacatttctggtcatggcactggaaaaacttttgatggggctgtggatcctggctcttctggaggaacttgctgctgggtagacactgggaatgttctattgttcaattcagccgatctgcatgaatggcttgggggattgggcaagctagctatggattctactgaacagcctgaactctttgaatttgaccatatatatcgtcgcacaaatattactgctccagttgctatattttatggggctgttgggacaaaatgcttcaaagagctgcatgttcaactagtagaagcatcaaagcagggaaaaatcaggtatgctctgcgtcctgtcctaccatctggatgtgagactacgtccaccttttgtggttcagttggtgctgtagatgcagtcaccttgagtggttatggggtggagcttgccctaaaaaacatggaatacaaagctatggatgacactgctataaagaagggtgttcctctagaagatcctaaaacagaggacctcagtcaagaagtcagagggtttatattttccaagattttggaacgcaagccagagctaaatgctgagataatggccttcagagattatctgttgtcatcggcagtgtctgatacacttgaagtctgggaactcaaagatctgggtcatcagacagcacagcgaatcgttcaagcatcagaccctttacagtcaatgcaggaaatcaatcaaaatttcccaagtatagtttcttcactatcacgaatgaagcttgacgattccatcaaagacgaaattattgcaaatcagcggatggttccacctggcaagtcattgatggctttgaatggtgctttgatcaatatcgaggatcttgatctttacctgttaatggatatggtccatggagaattatccctggctgatcagttcgtccggttaaagttgcctcaaagtgctgtcctcaagatcctgtcagctcctccaccagcagaatctaattctttccgtgtggacttccggtcttctcatgtgcattaccttaataacttggaggaagatgccatgtatagaagatggagaagcaacatccaggagctcttgatgccggtcttccctggtcagatgcggtacatccgtaaaaaatctgtttccactctgtttatgtgcttgatcctgcttcagcctgtggtgcagagaccattgacatgatggtatctctatatcaagatagtgtccctataaggtttggtatcataatgtattcttcaagattcatcaatgttgttgaaggaagtgatggcactcttacaaataatgatggagaagacacttccattttgataacaaggctttttcttgtacatcaaagaaacatactcaacacagttggcattccaatttctcggcaatatacataaatcaaggaatggtgaagatgactacaatgaagagcttgttgaggctcatcatgttgaaggggcatttgttgattcactattatcaactgctaaatctcatccacaagatgtgctgctaaagttgcaaaaagagaacatgtacaagcaggaagctgaagaaagctctcattttgttcacaagcttgggttgtatagactccagtgttgtctgttgatgaacggacttgtccatgaagcaagtgaggaagcgaccatgaatgctatgaatgatgaacttcctaggattcaagaacaagtttattatgggcatatccagtcccatacagatattttagagaagtttttgtcagaaaatagctacaagcggtacaacccatcaattactggcaagaatgcagagaagaaatttgtttcgctctttgcatcgtaccatcaggacagctttatatttaatgacatgaagtacttacagtctcctggaactacagatgatgcaaaacctgttactcatctacttgccattgatctttcatcaaaagttggaacaaaattgctttatgaggccatactttacctgatggacggatctgatagagctcgtgttggtctgctactttatgtccacactggtggttcatcacctattttacttctgaaagatattttcgatagaactatttcttctttcagctataaagaaaaggtattagtcttcctgcatgggctcttgaaattttatgatgcccaacctttgcccgcctcatctgttgctgatgattggactagaactatgatggaaaaggtctataccttagctgctgaaactgctttgcctgttgatgactataaagcgtggtttaaaagtttctctgctgatacagttctcaaagggatggataagttatctgacttcttatttgggcaattggggcttgtgtttggtagtaatgctgtgatcaccaatggacgggtttttattatgaatgaagggaaatcatttctagccaatgatttaggtctccttgagtctatggagtatgatttgagaacgaaatacatatttgaaataattgaagaggttgagtttgccagtgttgaccctgatgacctaacaaaccaattctacagcgacattgccatgttgatctcatcgtcgatgtctgttcgtgaaaggacatctgaaagagcccattttgagattttacatgcggaacatagtgctatcaaattgaataatgcaaattcaagtattcacattgatgctgtcattgatccgctaagtcccactgggcaaaaacttgccccacttctacgcatactctggaaacaaattcagccgagcatgaggattgtacttaatcctattagttccctcgcagatcttcctttaaaaaacttctacagatttgttcttccatccatggatgattttagcagtacagatcattctgtacacggacctaaagctttctttgcaaatatgccactgtcaaaaacacttacaatgaacatagatgttccagaaccatggcttgttgaatcagttattgccatccatgatttagacaacattcttttagagaatcttggcgatgtcagaactttgcaggcagtatttgaacttgaagctctcctcttgacagggtcattgcatggaaaaggaccgggaccctccccgtggtctgcagtttatccttggtactaaacaaagaccacacttagtagacacacttgtcatggccaacttgggttactggcagatgaaagtctcccctggtgtatggtacctacaattggctcctggtcgtagtgccgatctgtatgagctacctccgaaactcattgccattgatagcttgagaggcaaactaatgcatattgaagtgcaaaagaagaaaggcaaggagcatgaggacttgctaaatgctgccgatgactaccacttccaggaaaagacggataacaaaggctggaataagaaccttttgaaatgggcttctagtcttatcactggtgatgcttcatcaaaaagtaaagctgataaaaccactgaccgtaaggatgcaagacaaggggaaaccataaatatattctctgttgcttctgggcatctgtatgagcgtttcctcaaaataatgattttgagtgttctaaaaaagacacagaggccagtgaagttttggttcattaagaattatctatctccacagttcaaggatgtcataccgcacatggctcgggaatatgaattcgagtatgagctcgtcacatataaatggccaacatggttacacaagcagaaagagaagcaaaggattatatgggcatataagatcttatttctggatgtcatttttccactttcactgaggaaggtgatttttgttgatgctgatcaaattgtgagagcagacatgggagaattgtatgacatgaacctgaagggtcgcccgcttgcatatactccattctgtgataacaacaaggatatggatggttttcgattttggaagcaaggtttttggaaagatcatctgcgaggaagaccgtaccatatcagtgcgctttatgttgttgatttggccaaatttcggcaaactgcttctggggatactcttcgtgtcttctatgaacaactcagcaaggaccccaatagtctctccaatcttgatcaggatctcccgaattatgcccaacatacggtgcctatattctctcttcctcaagaatggctgtggtgtgaatcttggtgtggaaatgccacaaaagcaagagcaaagaccattgatctatgcaacaatccaatgacaaaggagccaaagcttcagggtgctagaagaatagttccggagtggactggtcttgacagtgaagcacggcagttcactgcacgaatcttgggtgatgatgtcgagcctgcagatgccacacctccgccatcggaggcaccgaagcctgaagatgatcaggatgtgaaagatgagctatgatcgcaagatgtttccaggcttggtcttactgaatgaaagtttggtgactcgacagtcatcagttcagaacacaggcacacagctagtggagcgcagagggatagtttaacgcaggtgcaaatttgtcaaaacactacacctggaatcctagactacgttgattcagctggaataattccgggtgcaatccgatgtaaacgaacaaggtctaatagtttcaagacctttaaccaaatcatatggcggggaagctgcgtccagtaataggttaacaaggcagccagctggggtgtagaactctgtctgctctcagctgcatacacatagactgtaatggtcaacaatttaagatctccttgagacattgtaaaatttatcggctgccagtcgaaaggcaacagcgaagctggcagctgaaatgcccgagaattttgtagcactcagcaaacggattttttaaacactcagtaagtcaataatgcctgtcgcatgtaacagcaggctattgtgggcatggcagctaaccgttatactaaaaaaaaaatgccaagtgc

SEQ ID NO: 216106 - DNA, 5718 bp, Zea Mays
ctttatttatgaaaaaaaacttgtgaaggaaaaaaggccaacttccatccaaatatgaaacctgaaaactgataaaaataatcggccgttcagagacaatccaacggcttgccctcgttctttaaaatccgtgttcaccattctccccctaataaatcacacaggtctccggcgaagtctcctcccgaccgccctccgcatctcgtcgacgacgaaaggaaaacctcacaaatcctctggatgcggggtctagccgcctccgccctgtagcaccagtcggatcgaagaagcacaagcgcttcgggtcggcgcgcacctctccctcatggtggcggcgcgaggggcccgatctgggggctcggttgcggcggcggcgctggtctcggttcttctcgtgggttgcctcgtcgcgggcggccagggggcggagatccgtcgccagaaaaacgtgcaggctgcgctccgggccaagtgggctggcacgccgctgctgctcgaagccagtgaattgctttcgacagaatggaaggatctattttgggattttattgacctctggaaggatctagagaaaggctctgaatgtttaacagcaaaatgctgtgcccagaagattgttgaggatgcccacatactactcaatgaaccgctctcttcaatttttgagttttctcttacccttcgatcagcatcaccaaaattagtgctttaccggcaacttgcaaaggagtcattatcttcgtttcctattgatgattcaccagagaacatttctggtcatggcactggaaaaacttttgatggggctgtggatcctggctcttctggaggaacttgctgctgggtagacactgggaatgttctattgttcaattcagccgatctgcatgaatggcttgggggattgggcaagctagctatggattctactgaacagcctgaactctttgaatttgaccatatatatcgtcgcacaaatattactgctccagttgctatattttatggggctgttgggacaaaatgcttcaaagagctgcatgttcaactagtagaagcatcaaagcagggaaaaatcaggtatgctctgcgtcctgtcctaccatctggatgtgagactacgtccaccttttgtggttcagttggtgctgtagatgcagtcaccttgagtggttatggggtggagcttgccctaaaaaacatggaatacaaagctatggatgacactgctataaagaagggtgttcctctagaagatcctaaaacagaggacctcagtcaagaagtcagagggtttatattttccaagattttggaacgcaagccagagctaaatgctgagataatggccttcagagattatctgttgtcatcggcagtgtctgatacacttgaagtctgggaactcaaagatctgggtcatcagacagcacagcgaatcgttcaagcatcagaccctttacagtcaatgcaggaaatcaatcaaaatttcccaagtatagtttcttcactatcacgaatgaagcttgacgattccatcaaagacgaaattattgcaaatcagcggatggttccacctggcaagtcattgatggctttgaatggtgctttgatcaatatcgaggatcttgatctttacctgttaatggatatggtccatggagaattatccctggctgatcagttcgtccggttaaagttgcctcaaagtgctgtcctcaagatcctgtcagctcctccaccagcagaatctaattctttccgtgtggacttccggtcttctcatgtgcattaccttaataacttggaggaagatgccatgtatagaagatggagaagcaacatccaggagctcttgatgccggtcttccctggtcagatgcggtacatccgtaaaaaatctgtttccactctgtttatgtgcttgatcctgcttcagcctgtggtgcagagaccattgacatgatggtatctctatatcaagatagtgtccctataaggtttggtatcataatgtattcttcaagattcatcaatgttgttgaaggaagtgatggcactcttacaaataatgatggagaagacacttccattttgataacaaggctttttcttgtacatcaaagaaacatactcaacacagttggcattccaatttctcggcaatatacataaatcaaggaatggtgaagatgactacaatgaagagcttgttgaggctcatcatgttgaaggggcatttgttgattcactattatcaactgctaaatctcatccacaagatgtgctgctaaagttgcaaaaagagaacatgtacaagcaggaagctgaagaaagctctcattttgttcacaagcttgggttgtatagactccagtgttgtctgttgatgaacggacttgtccatgaagcaagtgaggaagcgaccatgaatgctatgaatgatgaacttcctaggattcaagaacaagtttattatgggcatatccagtcccatacagatattttagagaagtttttgtcagaaaatagctacaagcggtacaacccatcaattactggcaagaatgcagagaagaaatttgtttcgctctttgcatcgtaccatcaggacagctttatatttaatgacatgaagtacttacagtctcctggaactacagatgatgcaaaacctgttactcatctacttgccattgatctttcatcaaaagttggaacaaaattgctttatgaggccatactttacctgatggacggatctgatagagctcgtgttggtctgctactttatgtccacactggtggttcatcacctattttacttctgaaagatattttcgatagaactatttcttctttcagctataaagaaaaggtattagtcttcctgcatgggctcttgaaattttatgatgcccaacctttgcccgcctcatctgttgctgatgattggactagaactatgatggaaaaggtctataccttagctgctgaaactgctttgcctgttgatgactataaagcgtggtttaaaagtttctctgctgatacagttctcaaagggatggataagttatctgacttcttatttgggcaattggggcttgtgtttggtagtaatgctgtgatcaccaatggacgggtttttattatgaatgaagggaaatcatttctagccaatgatttaggtctccttgagtctatggagtatgatttgagaacgaaatacatatttgaaataattgaagaggttgagtttgccagtgttgaccctgatgacctaacaaaccaattctacagcgacattgccatgttgatctcatcgtcgatgtctgttcgtgaaaggacatctgaaagagcccattttgagattttacatgcggaacatagtgctatcaaattgaataatgcaaattcaagtattcacattgatgctgtcattgatccgctaagtcccactgggcaaaaacttgccccacttctacgcatactctggaaacaaattcagccgagcatgaggattgtacttaatcctattagttccctcgcagatcttcctttaaaaaacttctacagatttgttcttccatccatggatgattttagcagtacagatcattctgtacacggacctaaagctttctttgcaaatatgccactgtcaaaaacacttacaatgaacatagatgttccagaaccatggcttgttgaatcagttattgccatccatgatttagacaacattcttttagagaatcttggcgatgtcagaactttgcaggcagtatttgaacttgaagctctcctcttgacaggtcattgcatggaaaaggaccgggaccctccccgtggtctgcagtttatccttggtactaaacaaagaccacacttagtagacacacttgtcatggccaacttgggttactggcagatgaaagtctcccctggtgtatggtacctacaattggctcctggtcgtagtgccgatctgtatgagctacctccgaaactcattgccattgatagcttgagaggcaaactaatgcatattgaagtgcaaaagaagaaaggcaaggagcatgaggacttgctaaatgctgccgatgactaccacttccaggaaaagacggataacaaaggctggaataagaaccttttgaaatgggcttctagtcttatcactggtgatgcttcatcaaaaagtaaagctgataaaaccactgaccgtaaggatgcaagacaaggggaaaccataaatatattctctgttgcttctgggcatctgtatgagcgtttcctcaaaataatgattttgagtgttctaaaaaagacacagaggccagtgaagttttggttcattaagaattatctatctccacagttcaaggatgtcataccgcacatggctcgggaatatgaattcgagtatgagctcgtcacatataaatggccaacatggttacacaagcagaaagagaagcaaaggattatatgggcatataagatcttatttctggatgtcatttttccactttcactgaggaaggtgatttttgttgatgctgatcaaattgtgagagcagacatgggagaattgtatgacatgaacctgaagggtcgcccgcttgcatatactccattctgtgataacaacaaggatatggatggttttcgattttggaagcaaggtttttggaaagatcatctgcgaggaagaccgtaccatatcagtgcgctttatgttgttgatttggccaaatttcggcaaactgcttctggggatactcttcgtgtcttctatgaacaactcagcaaggaccccaatagtctctccaatcttgatcaggatctcccgaattatgcccaacatacggtgcctatattctctcttcctcaagaatggctgtggtgtgaatcttggtgtggaaatgccacaaaagcaagagcaaagaccattgatctatgcaacaatccaatgacaaaggagccaaagcttcagggtgctagaagaatagttccggagtggactggtcttgacagtgaagcacggcagttcactgcacgaatcttgggtgatgatgtcgagcctgcagatgccacacctccgccatcggaggcaccgaagcctgaagatgatcaggatgtgaaagatgagctatgatcgcaagatgtttccaggcttggtcttactgaatgaaagtttggtgactcgacagtcatcagttcagaacacaggcacacagctagtggagcgcagagggatagtttaacgcaggtgcaaatttgtcaaaacactacacctggaatcctagactacgttgattcagctggaataattccgggtgcaatccgatgtaaacgaacaaggtctaatagtttcaagacctttaaccaaatcatatggcggggaagctgcgtccagtaataggttaacaaggcagccagctggggtgtagaactctgtctgctctcagctgcatacacatagactgtaatggtcaacaatttaagatctccttgagacattgtaaaatttatcggctgccagtcgaaaggcaacagcgaagctggcagctgaaatgcccgagaattttgtagcactcagcaaacggattttttaaacactcagtaagtcaataatgcctgtcgcatgtaacagcaggctattgtgggcatggcagctaaccgttatactaaaaaaaaaatgccaagtgc

SEQ ID NO: 216107 - DNA, 2551 bp, Zea Mays
tgctcttgttctgactgctcctcgccagaacatgcggcttcttgtctacgcgatggggaaggaggagaagggagcgagggcggcgaagaagggcacgagctcaggcaaagccccgctcctgcagcccaggtattctgtgcgcggcgacgcggcagcatcccagaaaaccgatgtcgtcactgactacgccggcagcaaagagtgcgaggatttccactatgatacaatggagatgcaccagttcttagaaactatcgagggcttgaagggccacccacagtgcgtggactgccggcgtgaggccgttgctgggaatccggctctcctaaaccctcgcttcgtgatgtgctcgggctgcagccagtgtttctgcgccggactggcgagcaatgaggatggaccaatcgggcatgcgcagctccatgccaaatcagcttgccatccagttgcgctgtggatagaccaacccgatgctgcttactgcttccagtgtgcccacagcttgagcctcaaggtgatcgccttagcagcgcgttcccataaccatggctatgctgtcagagggatgccgaacttcagagccaaatgctacgtcaatgcactggtgcagtgcctccttgcgcttgacgatctgtggatgtcgatgctaggacctcgtgctccagcagggcccctcggtgttgcgctgaaggagctctttttggagacgaggtctgggaatgatgcaggagcatttctgaacacacggagactcatggaaagtatatgcctattggatgcggggtacaggaccactgatcaccaagactgccaagaacttctggtccatgtgcgcaatgggttgatcgatgaggaacggaagaagaagcttcctgatgtgagaaaggatgatgttcccacagttgtcgattccattttcaagggcgaggtgtctgttatgtggacctgcagtcgctgcctgaacactgcaggcaaggacgaagaattctatgagctctcactgccattgccacctagtaagaagcatccaagcagaagtgtcccagctataaaacaatgccgacgaattcagaaggaggaagaaaagaaggcagctgtctctctcacatcagttaagcagtgcattaaatattattttagaaaagtgaaggtacaaaaccgctgcgaaatctgtgagaagcctagcaccagccgaagcaaagatggtgggcagatagtggcaaacatcaattcgggtggacatgcatatgtaacactttgtcttagcaagctgccaccagtattaactattcatgtgctcagattcaatatcaatgataagagagtggggcatgtgaagttcgaggaaaatattgatgtaggagaatatctggaccccaggtctacagacaaagatgatgccagatatcgtctagttggtgtcattgagcatctcgggaggaccgtaacgccggggcactttgtcgcttatgtgagaggaagcaggattgtcagtgagaaggagctgagcagcagctcttcctcttggtttcaagcaaatgatataagaatcagaaatatctctctagatgatgttctcaagcacgaggctttccttcttttctatgagaagataaaagcttgagacatctgtcgtattatgccaaagtaatcagacgagcaatcacctggcattggcaagcatgatttggttcgctgaggcattgcaggggcacctggttgacggcagcttctaaccagttggggaaactgttggctgatctgctgactatttctttttgctctttttaggaacgaattaggtcatgcggtattgtcctaacagagtaggaaactgattgtacattcatgccatggcctggttttgttggatgataattgatcttacatgctagtgattcacattttgcaaccacatacagatgtttcttcattttgagacctaggtgtcgatgattttggttggttatggaagtggttccttgttttgtgaatggtggttgacaatgtttttttggttgtgagatatgtgagaagcctagtaccagcctaagcaaagatggtgggcagatggtgtggtgtcgagtattcaacaaaagcacatcagttgacaggggccaaactgaatgtgacaatagcggaaaagtggatgaaaagagtgatctgttgactgcccatgttacccaaaatgccagaacactgaatcaggacaggatgaagcaagtagagctggaaaaaactgcaaaccaagtgggagaaggccaaaataagcagacagatatgggcgtatctgcacataaagcatgttttcttagcaagcacccaaggatccagtcaagtgcgcccatactatcgtagaggctctagttcatgtccatgtatgttccatgttttagggaattttttggctggtgttttcaatcagatgatatgtgatcaaagtacacaggccttggtaaagttttgtagctgatgcttttggctatgttgtagtgtaaacagggttggcattcctttgtcccttcacccttgtcccagaattgttcaggat

SEQ ID NO: 216108 - DNA, 1509 bp, Zea Mays
atacaagaatgatatgccactcatgacctgatcactcgagtcgaccgcagccggccattgctacctctgtggcttactcttctgcaagctttcctcttcctcctcggctttgaacaaccaagaagctcagctctagcacaccgtcgtcgacgttgcaacaaaccccaaccgctaccatgatcacgacgacgaccacgacgatgacagcagctcctgatctctccctccacatcagccctccgtcgccaccggagccgaggctgctgctggggttggaactcgacgacgacacggcggcggaggcggcggccgcgacgaagaaggcggacgacgcggcggcgatgcgggagtacaacaacctccaggtgcagcggcgccagctgcaccagccaagccagacggcgggccacgggttcaagaggggcacgtcgggcagcgccgccgccggcgccggcgggaggagaagttccagggcgccgcggatgcggtggaccaccgcgctgcacgcgcacttcgtgcacgccgtcgagctccttggcggccacgagagagcaacaccaaagtcggtgctggagctgatgaacgtgaaggatcttacactggcacatgtgaagagccacctgcagatgtacagaacagtgaagcagcagggcgcagacagaccatgtgtagcagttgcaggccatgggcatgccagagacatggtcgtccttctcacaaccggtgtcggtgaaggggatgctggctttgttgacgacgtttccaacagcaacagcaacagcaacaactcagtcgtcgtcaacaacaccgtccctgctgccttcaacaacaaccatactgatagcaggacgccacagtctccaggcggacgggagcagcagcagcaaccggcgccggcggtggatcgtcgtcgagacgacgccgccgccgccgcagccgcttgtgcttgggtcgtcggacggcaggtccagcatcagcggagctgcagcgaaggagtgaccaagctgcagggactcaaggtaggagatgagcgcgtcgaccgtcatcacggggacgacgccatcgcggcccatcgtctcgtggaggacgaggctcgcgacgaccacgcaggaagcggcggcggcttccaacaacggcggccgtcgccgaacaacacgagcggcacggtctccagctcggagtggctcaatcagcagcactgtagcggcgtgatgagcgtcagggtgcttggactgccgcctgcgacgccaccgagcctggagatgagcctgggccgccagggctggcagatggatcagcagtgcggcggcgagttcgagttcgacttcgagccctccccgccgtcggcggccaaagagctaactctgctcaggtgcttgtgaaacgacagacgatgcagtggtgttgctttaatctgttgcttcttaatcagactctaatcaagacaacagttagccacaaagccccagacaactaagactgtcctacgtattccttcactttttagtt

SEQ ID NO: 216109 - DNA, 1712 bp, Zea Mays
cgtcgtactgtctccctctcgctgaccactcgagcccgtctgtcggcgtggtcgtttcttcgcgcttcgttagctcgctgacaactcgagacccacctgacagcccgtttctgacctgtgggcgatatgctcatatcccatctaacctcccggcggacccacaaatcagcttctaagtatgtaacgctgtctgtggtcgcagcatttgtggcaccctgacgctccagaaccttctccacaaaccgctaaatccaccagcaattcaatcccccatttacctactcactcactgacaatccgaccgaatcggcgggcccgaagtgccagggactaacccctcccatcttcttgctccgcaaggcgcacgcatttatacgtctccctctccccatcgctccccaaaaccctaccacgtctcaaaaccctcgcgaatcgtcatttccgctctctgccacgccggagcccccactgcccaccacccgttcccgcggcctcgccctttgcgtggttgaagaagcgaaagatgctcggggcctctaggcgatccctcagtgccgccgccgccgcccgcagccgcgtggctgccggcgctgcctccgccgtctccgccgacgccgccgcctcaatcccgccccgacccgcgagcaatggagcgccaggggttcatcagcagcagaagaggctgctctcagtgcttgtagcgcccaaggttgcaggaaccagcaatgttgtgtccctcaagctgatgggtggtgcccttactgggagacgctatgaatcgagtgcggcagcagttgactccacggacccgccagctgagaagcatgagtaccaggctgaggtcaacaggctcatggatttgatcgtacacagcttgtatagtaacaaggaagttttccttcgagaactggtcagcaatgctagtgatgctcttgataagttgcgttacctgagtgttacggatcctgagcttctgaaggatggtccccaacttgatattcgcatccaaactgacaaggataatggaataataacaattactgattctgggattggtatgacgaaacaagagcttattgattctcttgggactattgcaagcagtggaactgccaagttcctgaaggcattgaaggagagtcaagaagcgggcatggacaacaacttgattggccaatttggtgttggtttctattccgcatttcttgtttcagagaaggttgttgtatcgacaaagagcccaaaatctgacaaacaatatgtttgggaaggacaagcagattctggttcttataccattagagaggaaaaagacccggagcagctcattcctaggggaactcgccttactctctatctcaagtgtgatgataagggttttgctcaccctgagaggattcaaaaacttctaaagacttactctcagtttgtttcctttcccatttacacatgggaagagaaaggcttcacaaaagaggtcgaggttgatgaagatccagcggaagcccaaaaaaaaggtgatgattcagcggaaaccaaaactgagcctaagaaaaagaccaaaactgttattgagaagtattgggattgggagctttcaaatgagacacaacctatttgggtaaggttcattttttttctgtttatcgatataatcatgattgtttatgcatgcatttttggaaatgtcaatgtctgagccttatgtggtg

SEQ ID NO: 216110 - DNA, 1140 bp, Zea Mays
ggtccaaagggctcagcatcctacatgccaccgtgtcatgtgcggactccttccacctcgaggctatgggtggggaggtgatctacctatcggtgaagacttcttccagatgagggaaaaggagaagtttgagaaggaagctgagaggcagaaagatcaaggaaatttggaagacaagagccaagtctaggcaaaagagaagaaattattgaaagttccttgcttgctatcaggccctcatcaagtaaagatggttatacggttaaccagaaggttgacccagaaacgccacatataaaggaggccaccatgtcagatgtatcaccaactaaagtaaccaaacacaacaatggggatctgctatatatgaaggctgcatatggcgaggcgatgtctagtcagcacggaccagactatgactggaggacctcacctattgatcctcaggctgtgtatgcaagtggtggaaaagctcatggaaggtacacaatgtttgctaacgtcatcgactcgagccaggtgagggttcagcgtggaggttcgtcgaggtctgctgctcgtagctcccgtcgctccactcaagatctagcagaagtggagcaactgcgagaagaacttaggcgacatcaggattacttgaagcaacaagctgcgcaacatgaatattatgctacacagattcagcaacagcaaacactcatacaacaactagcagatgcccaagggatacacgtcccggtgcccccccccaccacctcccgttcattatccttggtcttcacctccacctatacctacatctccatctaccgaacatcagacccctccagctaccttgccgacgcatgaacaagaggacgggttagactttgtcgaaaccctcttcaacagtggaggtatcgatggtgatcggcgatcgtgagcttccatgttattgcgttctgatacttgagacttttattatgactatgtatgagatattgtcttttattagtattggatgatgatatgtgtgagacttttgtgatgtaattgatgacactatggatgagacttttgtgatgtaattgatgagactatggatttatatattgttatgtgattgtgtgtgagatgttttatgcgaaaatatgttgtgct

SEQ ID NO: 216111 - DNA, 5050 bp, Zea Mays
tgggagcgccgtcccaagcgctagacttgttattagcatcaccgcttggctgacccaggatagatggagatgatcggttctggctccaggagttgtctgtgtcactcttctttcctgcctggtttctttactggtggggaacatgcagaaaaactgagtcacaaaagaactgaaaggtcacaccctcttccatttcttgtaaaggaagaggagcttagtggcgatgagcttgaggaatttatcaagaatcgatacagtaatcgtgtgaaatatgctgctgatcggagctattctagagaagacgatgacattttccccatggattgtgcactcaaggagcctactatttggagagttaaatgcatggttgggcgtgagcgccaaatggccttctgcttcatgcaaaaatttgttgacctgcgaaaaattggtaccaaagtgccaattatcacagcatttgcacttgatcacataagagggtttgtttttgttgaagcggagaaggccggttatgttacagaggcatgcaaagggttttgtagtgtgtacacaagcagaattacttctgttcctgcaactgaagttcctagcttgttatccagccgtacgaaaccatttgaaatctctcgtggtacatggatacgcatgaagaatggtaactataaaggtgatctggcacaggtcgttaacatggattctggacggaaaaaagtgatgataaaaattatacccagagttgacctccatgctatttcgaaaaaatttggtggtgcagtttcactaaaagaagctgcagttcctgccccacggttgatcagctcccaagaacttgagttcttcaggcctcacattgaaataaagcgcgatcgtcagactggcgaagtttttgaagtacttgatggtttgatgttcaaggatggatttctgtataaaaaggttgcacttagttctttgatttattgggggatacaaccgacagaaacagagcttttgaaattctcttctagtccaagcaatagagcttctgctgatgacctggattggctctccggcatgtatggttctaagaaaaggaaccttccagcagaacgagatatgaagtcatcatcttctaaaataaaatcctccaaagcaccagaccttaaagggtcaacttctactgaaaattatgacgacaatgatgaattcaaccttcatgatcttgtactctatgggcgaaaagattttggtgtgatcattgctgttgagaaagatggttttaggatactaaagggtggtcccgaaggatctgcggtgacagtgaggaagcaggatattaagaaaggctgtgtagacaaaatgtttacagctgttgatcatcataaaaagacgatatccattaatgacactgttaatgttgtggaagggccatttcagggtaagcaagggctcgttaaacacttgtacttgggaatactgtttatttttaatgaaagtgaaagtgagaactgtgggtttttctgtgctcaaagtgggtcatgcgaaaagatacggaagggtctgggaagctctactactgaaaattcggactttccaactcccatgttttctgaacctgcttatgagcaaaatgagcataggaacactgaagggccttacaggagcaccagagaacaacttttctctattgggcagatgctgcgcattagaaagggtcctttgaagggctacctctgtcgagtagttaggatatttcggaatgatgtgactgttaagctagactctctactgaaaattgttacagtacaagctgatcttctttcagtcccagctaataggggggataacttgtctggtgctccagctagtaaatttggaagtcaagatacacccttcttcgggtcagaagcaggcaaaacttcatgggacagggggttgccatcatttggcagtgactcatggcaacccttttcaagttccacgctaccagtccagaatgcaggtgcagaatcagaagctgatccatggtgtaagaaaacttctgctgaagatgattctgatccatggggtaagaaaacagacggtgattctgatccgtggggtaaggaagcggtatctgctgctgacggtgattgcaatccatggggtaaggaaacagtaccttctgctgctggtgattctgatccatggggtaagaaagtgttttctgctgatggtgattctgatccatggggtaagaaagcaatatcatcagctgttgaagtttggaacactagtgccacacaaaaggaaggttctagtggcaatgcatgggacaaacaagctggagttggtggatctgatgctgctggcagctcctgggacagagcggttgtcaataaggagagtgaaaagagtgacaactggggagaggcttgcagggttatggacatgggaactggagctgacacagacccttggggaagcaaggtcaaagcagtagatatggaaggaccaaatagctgggaaaaggctacaatgcctccagacaataagctggaggatgtcagccaaggatggaaccaacataagggcaactcaactgaagaccaagcaaaagacaatgtttctaaagatgaggacaacaatagggcttggagcagttctttgcctgtcactgaagatggtacctggggcaaatcaaaagacgacaactgtgatggagcaggtggtgcaggaggttgggatgcttctgttgccaactggaacaaatcatccgttctggctgatgcacaggatgagggttggggaaaaggaaattggtcatctgctaagtctgaagaaacaaacaatgaaattggaaattggaacaaagctggagcttcggaccaagctggaccgaaatcttttggtggtgatggttggaacaagggtggtgatcagaatagcagttggaacagtcctggaaattttggaggtgggcgtggctttgggcgaggacgagggagagttaggggtcgggaatctggagatttcaatggcagaaatgatcaaggaaattggaagaattcatggggtggtgacaatgctgaaaaatcttcttggaggtctgataatcaggtagacaatgaagctggagattctggtggatataggggacggggaagaggaggaagggggcaatatggaggacgaggaagagggagagacaatggttggagaaatggtgatggaccaaaatggggtggtggagataattggaacgctacaaatccaccaagtaatcagccttggagtagcagtggaggcaccaagtcatatggtcaaaatcagccttccacttggaataatccagaggataacaaaccatctgtaggtgaacaaggtgatccttgggcaagcaaggtgtcttctactgaaggtaaaggacaacagaatgattcttggtcaagtaagatgacttctcgtggtgctgaggataccagcggtggctgggacagcaaggagaagggctcttcctgcaatggtgggggtgaaggactacaaaatgatccatgggcaaacaagattggttctaacgaaggtaaagaacaagaagctgatccttgggccagcaagatgtcttctgctgtgggtgctgatgacaagaatggtacctgggacacgacaacaaagggcactctatctaacgaaaaggctgacgacccttggaatagtaagcggggtaatgatgatgacagcaagaaaactgacgcctggggtgctggctcgtcaggtgggaatcaggaatcttcttggagtaaacctattttctctctgggggatcaggaacctacttggaacaacccaaggtttggtgacgatgacaatgtaaataatagaggtgggtttggacgcggaaatcaaggcagagggagaggaaggagttttggtggtggtggtggtggatcatcatggaatgaaagcaacaaaaacggtgaatcaggtgggggaaggtctggagaaccatggaacagaaggggttttgatggcggcagaggaagaggccgctttgggcgaggtgaccgcaatcaaggcaacaacttggggtcaggagatggtggcagctggggctctggcaggggaaatggtggtggccgtggtggttacaggaactggaacgataacaacgaaagaaggcccttcggtcaaggtggtggctggtctcagtcttccgactggaatgccaacaaaggaagtggcgaaggaaatcaagctttctcgaagagcaagcccagctgggacgcgcagaacgcctctggtggagatgaccaggcaggaaagaagagtgacacagacaactcctggagccagaaccgatcatctccatctatcctgggtcagccaagcggtgatgctaataacaagtctagcgcttgggacggcgctcccaacggaggagctggcaggggaggttcaggttcttggggaaagagcgacgaggatggctggaactcgtcgtcgggaggatcagccagagagaagccttcgtggggtggtggggcagaagctcctcccaggaaggaggacgacggcgcatggggcaaaggcggcgaggggagccggagcctaggaggaggaggagagggtggtagcagcagttcctgggataaaccggcagatggtgcatggagcggcaacaacaagggtggcagtggcagtggtgggtggtaactggtaagcttgcgacttattggcgctgactgcatgtaaatattgtgcccgcgctgtgtgaactgttctggtgcgtgtctagttcgtatcagttacttggccatgcgtactctaaactaaaataaaacatggcttgtgactgtgactagttaaatgtagcctgttgctgacagtaattaggtgccttaactttcagaaactcatttgttagcatcctcgattcctagacctacgaattaaaaaaaatccgacgtgctagcagatgcagcaccatttgcttgtgctggataaaattgtctacctaacagaaacaaccgtgtttctcatgtcatggaccgactgagaccgaccattgttccaacttccaagtgggttttcc

SEQ ID NO: 216112 - DNA, 4981 bp, Zea Mays
atggagatgatcggttctggctccaggagttgtctgtgtcactcttctttcctgcctggtttctttactggtggggaacatgcagaaaaactgagtcacaaaagaactgaaaggtcacaccctcttccatttcttgtaaaggaagaggagcttagtggcgatgagcttgaggaatttatcaagaatcgatacagtaatcgtgtgaaatatgctgctgatcggagctattctagagaagacgatgacattttccccatggattgtgcactcaaggagcctactatttggagagttaaatgcatggttgggcgtgagcgccaaatggccttctgcttcatgcaaaaatttgttgacctgcgaaaaattggtaccaaagtgccaattatcacagcatttgcacttgatcacataagagggtttgtttttgttgaagcggagaaggccggttatgttacagaggcatgcaaagggttttgtagtgtgtacacaagcagaattacttctgttcctgcaactgaagttcctagcttgttatccagccgtacgaaaccatttgaaatctctcgtggtacatggatacgcatgaagaatggtaactataaaggtgatctggcacaggtcgttaacatggattctggacggaaaaaagtgatgataaaaattatacccagagttgacctccatgctatttcgaaaaaatttggtggtgcagtttcactaaaagaagctgcagttcctgccccacggttgatcagctcccaagaacttgagttcttcaggcctcacattgaaataaagcgcgatcgtcagactggcgaagtttttgaagtacttgatggtttgatgttcaaggatggatttctgtataaaaaggttgcacttagttctttgatttattgggggatacaaccgacagaaacagagcttttgaaattctcttctagtccaagcaatagagcttctgctgatgacctggattggctctccggcatgtatggttctaagaaaaggaaccttccagcagaacgagatatgaagtcatcatcttctaaaataaaatcctccaaagcaccagaccttaaagggtcaacttctactgaaaattatgacgacaatgatgaattcaaccttcatgatcttgtactctatgggcgaaaagattttggtgtgatcattgctgttgagaaagatggttttaggatactaaagggtggtcccgaaggatctgcggtgacagtgaggaagcaggatattaagaaaggctgtgtagacaaaatgtttacagctgttgatcatcataaaaagacgatatccattaatgacactgttaatgttgtggaagggccatttcagggtaagcaagggctcgttaaacacttgtacttgggaatactgtttatttttaatgaaagtgaaagtgagaactgtgggtttttctgtgctcaaagtgggtcatgcgaaaagatacggaagggtctgggaagctctactactgaaaattcggactttccaactcccatgttttctgaacctgcttatgagcaaaatgagcataggaacactgaagggccttacaggagcaccagagaacaacttttctctattgggcagatgctgcgcattagaaagggtcctttgaagggctacctctgtcgagtagttaggatatttcggaatgatgtgactgttaagctagactctctactgaaaattgttacagtacaagctgatcttctttcagtcccagctaataggggggataacttgtctggtgctccagctagtaaatttggaagtcaagatacacccttcttcgggtcagaagcaggcaaaacttcatgggacagggggttgccatcatttggcagtgactcatggcaacccttttcaagttccacgctaccagtccagaatgcaggtgcagaatcagaagctgatccatggtgtaagaaaacttctgctgaagatgattctgatccatggggtaagaaaacagacggtgattctgatccgtggggtaaggaagcggtatctgctgctgacggtgattgcaatccatggggtaaggaaacagtaccttctgctgctggtgattctgatccatggggtaagaaagtgttttctgctgatggtgattctgatccatggggtaagaaagcaatatcatcagctgttgaagtttggaacactagtgccacacaaaaggaaggttctagtggcaatgcatgggacaaacaagctggagttggtggatctgatgctgctggcagctcctgggacagagcggttgtcaataaggagagtgaaaagagtgacaactggggagaggcttgcagggttatggacatgggaactggagctgacacagacccttggggaagcaaggtcaaagcagtagatatggaaggaccaaatagctgggaaaaggctacaatgcctccagacaataagctggaggatgtcagccaaggatggaaccaacataagggcaactcaactgaagaccaagcaaaagacaatgtttctaaagatgaggacaacaatagggcttggagcagttctttgcctgtcactgaagatggtacctggggcaaatcaaaagacgacaactgtgatggagcaggtggtgcaggaggttgggatgcttctgttgccaactggaacaaatcatccgttctggctgatgcacaggatgagggttggggaaaaggaaattggtcatctgctaagtctgaagaaacaaacaatgaaattggaaattggaacaaagctggagcttcggaccaagctggaccgaaatcttttggtggtgatggttggaacaagggtggtgatcagaatagcagttggaacagtcctggaaattttggaggtgggcgtggctttgggcgaggacgagggagagttaggggtcgggaatctggagatttcaatggcagaaatgatcaaggaaattggaagaattcatggggtggtgacaatgctgaaaaatcttcttggaggtctgataatcaggtagacaatgaagctggagattctggtggatataggggacggggaagaggaggaagggggcaatatggaggacgaggaagagggagagacaatggttggagaaatggtgatggaccaaaatggggtggtggagataattggaacgctacaaatccaccaagtaatcagccttggagtagcagtggaggcaccaagtcatatggtcaaaatcagccttccacttggaataatccagaggataacaaaccatctgtaggtgaacaaggtgatccttgggcaagcaaggtgtcttctactgaaggacaacagaatgattcttggtcaagtaagatgacttctcgtggtgctgaggataccagcggtggctgggacagcaaggagaagggctcttcctgcaatggtgggggtgaaggactacaaaatgatccatgggcaaacaagattggttctaacgaaggtaaagaacaagaagctgatccttgggccagcaagatgtcttctgctgtgggtgctgatgacaagaatggtacctgggacacgacaacaaagggcactctatctaacgaaaaggctgacgacccttggaatagtaagcggggtaatgatgatgacagcaagaaaactgacgcctggggtgctggctcgtcaggtgggaatcaggaatcttcttggagtaaacctattttctctctgggggatcaggaacctacttggaacaacccaaggtttggtgacgatgacaatgtaaataatagaggtgggtttggacgcggaaatcaaggcagagggagaggaaggagttttggtggtggtggtggtggatcatcatggaatgaaagcaacaaaaacggtgaatcaggtgggggaaggtctggagaaccatggaacagaaggggttttgatggcggcagaggaagaggccgctttgggcgaggtgaccgcaatcaaggcaacaacttggggtcaggagatggtggcagctggggctctggcaggggaaatggtggtggccgtggtggttacaggaactggaacgataacaacgaaagaaggcccttcggtcaaggtggtggctggtctcagtcttccgactggaatgccaacaaaggaagtggcgaaggaaatcaagctttctcgaagagcaagcccagctgggacgcgcagaacgcctctggtggagatgaccaggcaggaaagaagagtgacacagacaactcctggagccagaaccgatcatctccatctatcctgggtcagccaagcggtgatgctaataacaagtctagcgcttgggacggcgctcccaacggaggagctggcaggggaggttcaggttcttggggaaagagcgacgaggatggctggaactcgtcgtcgggaggatcagccagagagaagccttcgtggggtggtggggcagaagctcctcccaggaaggaggacgacggcgcatggggcaaaggcggcgaggggagccggagcctaggaggaggaggagagggtggtagcagcagttcctgggataaaccggcagatggtgcatggagcggcaacaacaagggtggcagtggcagtggtgggtggtaactggtaagcttgcgacttattggcgctgactgcatgtaaatattgtgcccgcgctgtgtgaactgttctggtgcgtgtctagttcgtatcagttacttggccatgcgtactctaaactaaaataaaacatggcttgtgactgtgactagttaaatgtagcctgttgctgacagtaattaggtgccttaactttcagaaactcatttgttagcatcctcgattcctagacctacgaattaaaaaaaatccgacgtgctagcagatgcagcaccatttgcttgtgctggataaaattgtctacctaacagaaacaaccgtgtttctcatgtcatggaccgactgagaccgaccattgttccaacttccaagtgggttttcc

SEQ ID NO: 216113 - DNA, 972 bp, Zea Mays
cttgttcctgtagatgcattgatcggtgatgcgtatgaatgagatcattgacaagtacagcacacattctaaaaacctggggaaagcagaacagccttcacttgacttgaacttagaacatagcaaatatgcaaatttgaatgagcaacttgtggaagcaagccttcgactcaggcagatgagaggtgaagaacttgagggattgagtgttgaagaactccagcaattggagaagaatctggaatctggtctgcatagggtccttcaaacaaaggatcaacaattcttggaacagatcagcgacctcgaacaaaagagtacacaactggcagaggagaacaggcaactgaggaatcaagtatcccacatacccccagttggcaagcaatcagttgctgatgctgaaaatgttatcgctgaagatgggcaatcctctgaatcagtcatgactgcgttgcattctgggagttcacaggataatgatgatggctgccttgtgttgcatggaagtgaaaaaacaagatggtctgtgttgatctgggtggagctgcggcttcagcagataggcacttgtgttattgtcttatggacgacccccgactactgcaataatcttgcatcggaagcgagatcagttaacctgatttgtcatccttgtggcttcatgatgcgatgttgcgcttgtaccgtttgctaggatgttaactggactagaatcgtgtctacttttgtactgctcgtgaatcctatctactttgtgctatccaaagttatgacctaccacttgcatcggcatggcgcgccggccgtaagctgtgctcaagcatgcatgcttcgtgttatacgtgtgtacttattgggaagttgagtctgcatacaacctgagcgtagttgttgtcttacagagaccgtttagttttcagaaccgctttccccatgtctcgtttggatccttagaattgaatttcatta

SEQ ID NO: 216114 - DNA, 967 bp, Zea Mays
ccactttatccagcttctgtcgcctaagtatgaatgagatcattgacaagtacagcacacattctaaaaacctggggaaagcagaacagccttcacttgacttgaacttagaacatagcaaatatgcaaatttgaatgagcaacttgtggaagcaagccttcgactcaggcagatgagaggtgaagaacttgagggattgagtgttgaagaactccagcaattggagaagaatctggaatctggtctgcatagggtccttcaaacaaaggatcaacaattcttggaacagatcagcgacctcgaacaaaagagtacacaactggcagaggagaacaggcaactgaggaatcaagtatcccacatacccccagttggcaagcaatcagttgctgatgctgaaaatgttatcgctgaagatgggcaatcctctgaatcagtcatgactgcgttgcattctgggagttcacaggataatgatgatggctgccttgtgttgcatggaagtgaaaaaacaagatggtctgtgttgatctgggtggagctgcggcttcagcagataggcacttgtgttattgtcttatggacgacccccgactactgcaataatcttgcatcggaagcgagatcagttaacctgatttgtcatccttgtggcttcatgatgcgatgttgcgcttgtaccgtttgctaggatgttaactggactagaatcgtgtctacttttgtactgctcgtgaatcctatctactttgtgctatccaaagttatgacctaccacttgcatcggcatggcgcgccggccgtaagctgtgctcaagcatgcatgcttcgtgttatacgtgtgtacttattgggaagttgagtctgcatacaacctgagcgtagttgttgtcttacagagaccgtttagttttcagaaccgctttccccatgtctcgtttggatccttagaattgaatttcatta

SEQ ID NO: 216115 - DNA, 2647 bp, Zea Mays
gttattttgatgatttctcgtggatctcgtctttagttaggttcaacccgtttgctacggcgttcttagatccatctgtgcattgaagtttgtttagcttgatggtgttagttttagttttagattgttccactgatctacgattcagctattgttggagatttgatatatatggtctgaataatagagataattgcatttttagaactccaaacatagcacttaacattattgccatcccaaacatttatttcgtagaaacaggaccatgaacatctactaattgattaacctgccattaaccgtatttgcttcgtttttctaattcatctccatctatttgtggtctacaagacagttttgcccctcacgcaataaacaagcaaagtatgaccggcaactctacagcatgcatacattaatcttcgtcatcgttcggatgctccgtggcattctgaatttgatacattaatcttcgtcatcgttcagatgctccttgacattctgaatatgagattaaccattaacattctcccagattgaataagttcttggcaactcgtatccttccggtctcaatgacagcgcaaactctggtagatcaggaacagattgaagcgcgctgcaccaggaaagtagtgaaagtgattaactcgcccctaaagccaaacaataaatatgaaccatgtaggttgttcatttatttatgttcttgagcctaattgaagcagactaccatttcagtttttaacatgttctgaatattatttttgggcaaaaagcaatcatcatcaaatacaaccctccaactctaaaattttccattttcacatgtagaactcatactgggatctatggatttacctatccttgttttgctcaaagagatggccatacacttggaacttcttctgccgtacacttggaactaatactgggatctatggatttacctatccttcttgatgtctggaatttttttgcatgattttcacgacacccaaggaggaggaaatccaagcaaagaagaaaaggctgcacatgaagaggctcaagaagcagaggcttttggctgaagtcaagttcctgcggaagagatacaaatccatgtctgagaacccttctcagacaattgtctgtagagtgaggaatccagcaatgtcgtctgcatcctggacagctggttcggcaggtgatacctggcaccagtcggttcgtgctgccgggagctccagtagaagccagctggtgcagagaacacacggtggttctccaagggcatctccagtgattgacctcaatgaggcctgtgagccgggttatgaggagatggaaatcgaagggcaacatggttacatgtctcctctaggcgtaaacaagtcaaagaggtaccctatggaaggtgctgctgccagcccaagccagatgagaatgcatgtgttctgggatgtccagaatccagcagggcgatctggaaagaggaagatctcatggcaggatcagttggccctgagagtataggtaaatgacaatgtttagctctagtacagcagtagtattctagtaggatcagtatgtgtcattgctagcctggtaaatgtaaagggatggctgggacaatctcgatggttatctgttcatgtttagtgatgctggaaacataggctgtctcacgatgaagtaaagtaggtgggcgtgtgtgtgatcaatcaccaaaatcttatggttcatactgttatggagtgctaatggttcaatgagagatgtagcttccaaggaagtaatctcctgttcatgtagagttggaaaaaatgtgtgcctgctctcttgacataaagttctagaaggaaacaatttttgcaatcttggtaaggtgttgtgaactatctgttgtcgttattgtacatatagccataatcaacgaacatcattatcacgtttaaatttatagaataaaataacttacttaaatttatagaataaaataacttaaataggaaggagagcaggtggcagagaaactgtaccttcagaaaagttggtggagcacttcagaaaagttggtggagcaggtcattagatgcttcagaaaatcgtgaaactgaagctataaatttttagaagacatttttcattttgataagtcattttgtttattatttagattaaaaatatttttaaaactgttgggggccttcggcttccgaaggtcctcaaaaacatgatttaacaatgtttttggagtataatgtgtgaacaggtatcttcggactcgaatcggtaccacagtgggagaagcccaaagaatacgaaggttgacacagcgccaaagctgtgagcaggaaagcttcggcgtgatagcagaaaaggaaaccgacttaaagatgaaaaggctgttcagacctcggtggattactatagaattactaccaaatgtaaagggcatggatgtaattttacatgagctatgtcccgtgcctataaataggtgaacagtgcccccgtactgttcacgcggactgggcatttacttttgcgtcacgcttgtgtttttaccttctttcaagccgaaggtacatttgtaatttaatatcatttctattttttcataataataatatagaaatgagttgataattatacataa

SEQ ID NO: 216116 - DNA, 2517 bp, Zea Mays
atccttcttcttcttctgctccacgaaatctctctcccctgcctctgctaacaagcagctaggcgacgacgaaggtctagatgacggcattctcctggcgggtgaaggggagctgcggcacctcgcagccgtccagcaggcgcgtccagatgcgagagaggaagaagcccaggagccctgcggggacggtgaggaactggatgtacccccgaggtgagggtgagcttgatggccacgacgctgagcgtggcgcctaggacagcgccgacggccaccgaccgcgccgtgaacatctccgacggtgtcggcaccggctccccctcgaacacctgctccacctatcgcccggcggctgcgtcctgctcctgcagctgatcgtcatcgtcgtcgtaggctccattgtgcttgcgcgcgcgcggcgaccgctagctcacgccgagccagcgcttgctaacgtttgccgcgcgcgttcttctggccgtggccgatcagatgtgcttctgctcccagaaatgaaatgtgagctcgggagggctttttatggaggtggaaggaggagattttcgttcacgattcattgtgttgttgtggcgcctggcgccggccgccggcgaagtgggttgctgtatcgttgcatgcaatggtggaggaggcgacggaaatggttatcttcgaacgtccagttggttttgcagttgagagattgttcttcgtctgaataactcgccggtttggtattaaccgaggagctggcaaaacgatctgaactttttctctgtcttcaaaaagtgtagtacagacgctaatcacattgacgggcgcttctttcagaataattagccgcagatacgtatccgtattcccataccaagttgaaattctcagagctaaactcaagcagattcttctgccgcaacaaaacttaaccattatactgataaaaaatggacaagaaattaagaatgagcaaccatactttacatttgtgccaagacgccaagaaacaatagtgaatagactaaattcttgacgaaatgaaggacgactgctggttttaaacggaggaagtgcataccttcctgaactttcttacagatcgccgcgcaagctctgaatggattgacttggcgcgactgttcctcccgcggcgggacagcaacacacagcagagcgccggatgcgtcggcacgtgtcctcttccggagcttgtaccgcaacgtgtctttggacgtgtcacctcccctcgtctcgtcagctccacctccttggctcctttataaacagcgcacagtctccgcttgcaagctcattgatccctgaaacccatccacaattggtagctcgttgatccaaatccaagacctcacgtcaacgcactgtctcgcctgttaattagtcgtcgacgtcgtcgtctatgtccaggctgatggctgccatgctgctcggaggcgcgcgcgtcgccggcgccgcaaagctcaccggtaacggcaacgctgctggcatgcaggctcttcccatgccggcgtgcttccttccgccgcgcccgcaggcagcgacctggacccgcctctgcttgcaggctgcgccaagatcgtcccaggcatacgacaacgcgccggaagaccggagagaaataggggacaagtacaaggacgcggcggaggaggcgaaggacgccaccggggacgccaaggagcacgccaagaggatggccggggagacgaagagcagggcgcaggacaaggccggccgcgtggcggaccaggcgtcgggcatggccgagcgggccaaggaccaggcgaagggcgtggcggaggacgccgcggacacggcgtcccgggcgacggagcgagcgaagaacgagacgcgtgacgcggcgcgggaggccgcggacagggcggggcacgtgaaggagcgggccaaggaggcgggacacgaggccaaggaccgggccgtggaggggaccgcgtcgtacggggagaaggtggtggagatgaccaaggagggcgcggggaaggtggccgagacggcgcaggccatcggggacatggcgaagcaggcggcgcggagcacctgggacgcggccaaggacaccgcgcacggcgtcaaggagcgcgtggtccccgacgcggaggacgtggacgccgccgtgaaggagcgggaccggatcgcgcgggatgtggacagggtagagcgggagcggaacatgagggaggccagggagaagggctcgggcttgccgtaggcccagctccaattttccctctccagaagacgaattttactcaactagctagctgaataaatgtttggcgatacatcgtgcgcgcgccagtttggttgtgttgaataattagacaaattccaaattaaattccgaatataaatcatgaccaaatcagaagaactgaaataaaagccaaatcagataatgcgtactgattagacttactgattgttggcgcgcgccaggatcagctgagtcgacgatgtcagaagatcacgactagtcgcgtg

SEQ ID NO: 216117 - DNA, 1075 bp, Zea Mays
atgtcgaggcccttcccggccaacagatatcttttcccggagaacaatatttgctcgtggcgcatatatccccgtccctggcctcgcgtattgggagacgccgtgctgctttggaatgggcgaactgcgatcggtgtcgctctcgtgcaacttaccgtgaacgtcggcctcctatcgctcgcggcagtatttatacgcttcgtcccagctgcactcctccaccgccgcccatcgatccaagccggcggtcggcttggacggtggctggaaaatgcttcgcttttggaggacgcagaggagcaccacctcgtcgaacgcgttgtcggtcgtggagatgaacgtgcacatggactgcgacggctgcgagaagcgagagtgagctcggtggagatcgacatggatcggcagaaggtgacagtgacagggtacgtggaccggcgggaggcgctgcgcgcggcgcggcggaccggcagggcggcggagttctggccgtggccgtacgacggcgagtactacccgttcgcgatccagtacctggaggacaacacgtacatggccaccaacaagtactaccgccacggctacaacgaccccacgatcggatcctacccctgccacgccttcacgcatgtcctcgacgacgacgcgctcgccgtcttccacgacgacaatgtccacgcctgcgccgtgatgtgatgtacgtgatgcgaagaagaagaagaagaagaagacagtatgcgcgtagtactcactgctggtatgtggtattcacatgtaaaacctgatttcactacgacctcgaagaaaggagagttaattccatcttctcgcaaaagagagagatcatgcatgttaaaaattatcagctctcgtcaggccgccgttaacaaattgctgctgtgaacaagcagctcaaataaagtcttgctctgaacaccgcacaaaaaattgggtgctgtgatttttttctttttacttgtgctgttgtgcaaaggttgtggccggtcccataatcccattcaacaaggaatctatagctttcgccagaggaatggaatcgttggacgacatggga

SEQ ID NO: 216118 - DNA, 1103 bp, Zea Mays
atgtcgaggcccttcccggccaacagatatcttttcccggagaacaatatttgctcgtggcgcatatatccccgtccctggcctcgcgtattgggagacgccgtgctgctttggaatgggcgaactgcgatcggtgtcgctctcgtgcaacttaccgtgaacgtcggcctcctatcgctcgcggcagtatttatacgcttcgtcccagctgcactcctccaccgccgcccatcgatccaagccggcggtcggcttggacggtggctggaaaatgcttcgcttttggaggacgcagaggagcaccacctcgtcgaacgcgttgtcggtcgtggagatgaacgtgcacatggactgcgacggctgcgagaagcgagtgaggaaggccatgtcccagctggaaggagtgagctcggtggagatcgacatggatcggcagaaggtgacagtgacagggtacgtggaccggcgggaggcgctgcgcgcggcgcggcggaccggcagggcggcggagttctggccgtggccgtacgacggcgagtactacccgttcgcgatccagtacctggaggacaacacgtacatggccaccaacaagtactaccgccacggctacaacgaccccacgatcggatcctacccctgccacgccttcacgcatgtcctcgacgacgacgcgctcgccgtcttccacgacgacaatgtccacgcctgcgccgtgatgtgatgtacgtgatgcgaagaagaagaagaagaagaagacagtatgcgcgtagtactcactgctggtatgtggtattcacatgtaaaacctgatttcactacgacctcgaagaaaggagagttaattccatcttctcgcaaaagagagagatcatgcatgttaaaaattatcagctctcgtcaggccgccgttaacaaattgctgctgtgaacaagcagctcaaataaagtcttgctctgaacaccgcacaaaaaattgggtgctgtgatttttttctttttacttgtgctgttgtgcaaaggttgtggccggtcccataatcccattcaacaaggaatctatagctttcgccagaggaatggaatcgttggacgacatggga

SEQ ID NO: 216119 - DNA, 1421 bp, Zea Mays
tccataggtcaaaaaacatgtctatatacgaatccgtccacggattaaatcgccgtccctacgcctgcctcaccaagccggagcgaggcccttgcgcctcggcatgcagcaaccggtgacggcggccgcttcgtgcggcttgcgcccgtcagtcatctgcctctgccccggaaacaacgcagtcgtggccgcggcagcttcacgaggcttcagctcgccactgctccgggcctcgccctccctcagctcggcaattttccctaaatctcaggagtaatttgatggagccatactgacctcacgtttccaatcccttgagaaggagaagggatagcatttgacatatctgtacatcttctttccaccaacaagtctccttcgttccccttcaaaatggcgcccgcttttccgacgaccctcctccaccaggcgtcgacctccttccgttttccagccggcgccgcagggtgcatccgccctcactgcttggccccactggcggcccccacaacgctctctttggcggccacgccagcggtacctcgccggctcctcctcccagtggcggccggcatttgggacctgatctccggcggagctggcgccgccgccgctgcgtccctcgccgtccggcgaggtatgcagcttttccggcagggagatgtagctggctcgttggcagaatttgacaaggcgatcgagatggacccgcgacagaagcaatatctttggcaacggggcctctcgctgtactacctagacaggtttgaagaaggtgcagagcagttcaggatagacgttgcagctaacccgaacgacaccgaggagtccatatggtgctttctgtgtgaagcgcagctgtacgggactgaagaagcaaggaagcggttcttggaggcaggttggtttggactcgagacctgtaatgcgtgaagcatatgcactgctcagaagtggtgcagatcctgaaaagttagttgcaaagttttcgagtggaactgatggtgaggtcttctattcttcactgtatgctggactatactatgaatctcagaaagatgcagatatggcaaaatctcacattgttgcagcatgcaagtcgccgtatggatcgaggtccggcgattacatggcttcccttgcacttgtccactgccagtgtcgcaactggaaagtagtttgaaagagatcaccaccatattcaagaggacccgacaattctgtttggaaattacttgcaatccttgatatatagactgcaaattacttgcaacaaggacatgggttttcagacaatgacggaccgagttaaggaaaatatgagaggctatcgagtttgggaaaaaaaaacttatcgaagatacctgttctgaagtctttttagtactggattcacatgatattcacgtcaaggagtcaat

SEQ ID NO: 216120 - DNA, 1364 bp, Zea Mays
attaaatcgccgtccctacgcctgcctcaccaagccggagcgaggcccttgcgcctcggcatgcagcaaccggtgacggcggccgcttcgtgcggcttgcgcccgtcagtcatctgcctctgccccggaaacaacgcagtcgtggccgcggcagcttcacgaggcttcagctcgccactgctccgggcctcgccctccctcagctcggcaattttccctaaatctcaggagtaatttgatggagccatactgacctcacgtttccaatcccttgagaaggagaagggatagcatttgacatatctgtacatcttctttccaccaacaagtctccttcgttccccttcaaaatggcgcccgcttttccgacgaccctcctccaccaggcgtcgacctccttccgttttccagccggcgccgcagggtgcatccgccctcactgcttggccccactggcggcccccacaacgctctctttggcggccacgccagcggtacctcgccggctcctcctcccagtggcggccggcatttgggacctgatctccggcggagctggcgccgccgccgctgcgtccctcgccgtccggcgaggtatgcagcttttccggcagggagatgtagctggctcgttggcagaatttgacaaggcgatcgagatggacccgcgacagaagcaatatctttggcaacggggcctctcgctgtactacctagacaggtttgaagaaggtgcagagcagttcaggatagacgttgcagctaacccgaacgacaccgaggagtccatatggtgctttctgtgtgaagcgcagctgtacgggactgaagaagcaaggaagcggttcttggaggttggtttggactcgagacctgtaatgcgtgaagcatatgcactgctcagaagtggtgcagatcctgaaaagttagttgcaaagttttcgagtggaactgatggtgaggtcttctattcttcactgtatgctggactatactatgaatctcagatatggcaaaatctcacattgttgcagcatgcaagtcgccgtatggatcgaggtccggcgattacatggcttcccttgcacttgtccactgccagtgtcgcaactggaaagtagtttgaaagagatcaccaccatattcaagaggacccgacaattctgtttggaaattacttgcaatccttgatatatagactgcaaattacttgcaacaaggacatgggttttcagacaatgacggaccgagttaaggaaaatatgagaggctatcgagtttgggaaaaaaaaacttatcgaagatacctgttctgaagtctttttagtactggattcacatgatattcacgtcaaggagtcaat

SEQ ID NO: 216121 - DNA, 1401 bp, Zea Mays
attaaatcgccgtccctacgcctgcctcaccaagccggagcgaggcccttgcgcctcggcatgcagcaaccggtgacggcggccgcttcgtgcggcttgcgcccgtcagtcatctgcctctgccccggaaacaacgcagtcgtggccgcggcagcttcacgaggcttcagctcgccactgctccgggcctcgccctccctcagctcggcaattttccctaaatctcaggagtaatttgatggagccatactgacctcacgtttccaatcccttgagaaggagaagggatagcatttgacatatctgtacatcttctttccaccaacaagtctccttcgttccccttcaaaatggcgcccgcttttccgacgaccctcctccaccaggcgtcgacctccttccgttttccagccggcgccgcagggtgcatccgccctcactgcttggccccactggcggcccccacaacgctctctttggcggccacgccagcggtacctcgccggctcctcctcccagtggcggccggcatttgggacctgatctccggcggagctggcgccgccgccgctgcgtccctcgccgtccggcgaggtatgcagcttttccggcagggagatgtagctggctcgttggcagaatttgacaaggcgatcgagatggacccgcgacagaagcaatatctttggcaacggggcctctcgctgtactacctagacaggtttgaagaaggtgcagagcagttcaggatagacgttgcagctaacccgaacgacaccgaggagtccatatggtgctttctgtgtgaagcgcagctgtacgggactgaagaagcaaggaagcggttcttggaggttggtttggactcgagacctgtaatgcgtgaagcatatgcactgctcagaagtggtgcagatcctgaaaaggttatttcaccggaagccgatgtctatttagttgcaaagttttcgagtggaactgatggtgaggtcttctattcttcactgtatgctggactatactatgaatctcagaaagatgcagatatggcaaaatctcacattgttgcagcatgcaagtcgccgtatggatcgaggtccggcgattacatggcttcccttgcacttgtccactgccagtgtcgcaactggaaagtagtttgaaagagatcaccaccatattcaagaggacccgacaattctgtttggaaattacttgcaatccttgatatatagactgcaaattacttgcaacaaggacatgggttttcagacaatgacggaccgagttaaggaaaatatgagaggctatcgagtttgggaaaaaaaaacttatcgaagatacctgttctgaagtctttttagtactggattcacatgatattcacgtcaaggagtcaat

SEQ ID NO: 216122 - DNA, 324 bp, Zea Mays
cagattagtcgactggaaagtgaattttctgcatacaaggtccgggcacatgcacttctgcaaaaaaaggatgctgagcttaccgcagctaaaagttcagatttcattaaagaacatgaagaggccataagggaagctgaaaaggaggtggcagctgctttagcagaaagagataaagcaatagatgatctccaaaaggcagaatccagacatggtgatgagattgaggcaagagatatcagagctactggagagcttggacatgatgtcagggccggggtgaccgaggcgacaatgctaaatggtggaggtggtggtagtagc

SEQ ID NO: 216123 - DNA, 1321 bp, Zea Mays
agacgaagaggaagcgagctgggcaagcaatcgacgcgagaagatcagaaggaagcaagggcattgctaggaaggctagaatatcaacggggtcatgtagaggcagcactccgtgtctttgatgggatagacatctgcattagttcctaagatgaaaatctcaattgctagaaaaacaggccgtgggaagactcattcacagtgggattccccaccaatgcccttgcatgctgtcagccttctcatggaggccatatatcttaaagcaagagcacttcatgatcttgggaaagataaaggacccaataaggcaagaaaacggcaaagagcacaatagttctcatatgcctaattattcccttgattcatgattataactttgcctcctgatttaatgaccctttcctatcatttgagatatacaggtcaccctaaggcataaaagaagaaaggccatttcttgtggagatttatgcagatgacataaatccaactacaactataaaagggaagcactacatcggctctggtgtgcttaactatatctttgattcgcgaatatagttttgttattaaattagtgaaaattcaagctatatccttttgtgctctctgacattatgacatttgtttagcaagtactttagtgaaaagatttcaccatatgcatgtccatgtttatgacaaatcatagttatccgttacattacatcgatgtaatcttcacacaaagtctcaacaatatttggttgctcacttacaccccaccctagattaacatgttctgaattttctttgttcactgctgcaattgacacatgctaaatggcaatttctttataatgatccaattgagtttgtaattgcacatgtttttgccaagtttcatcaagtactgctccaacagaacaagcaatcatggaatattgagctaaggcactggagtctcaagaaaaggtctaggaatcctaagaatggatggataacgatgcttaaatatggatgacatcatttatgtcttgataaccatctacatgccggtgataatgttttttgacattcattcatggggctcacctttctaatgtgtaagaaagaaaactacgttgatcttaatctgagttgtgtgttgatggttgatgtagtaaagaaggggcacttagacattgttgttcatggatttatgtactgccaacaaaccttctcttctgattcttataggcggtgcctggctgtaatggcttgcatgtattttatgcattgactacatgataagaaccgtgcacgttgttgatggcccaattattacctctgaatcaag

SEQ ID NO: 216124 - DNA, 1850 bp, Zea Mays
cgaagaggaagcgagctgggcaagcaatcgacgcgagaagatcagaaggtgggggcaccagaaccgcactttatatgatttcttgtggtggtggagattttgacgactttcttgatgcgtttttttttggccttcgctcttttggtacggtaattagcaaatttattaggagatggttaaatgctattatatactagaagtagaaatgatttgtcttatgaatggtttgctgattgggagcttggaggctgtttagagttgtactggcagtgactaacaaccttcttctgcttgtgttgcttaattttgaagaaatggttccttgtggggttttttttccgaaaagatatgggcttagaggcggcaccgcagcgacgtgaagtgggcggccgtgacttacaaacggccacaagaaggttcctgaacgtgttgccgctcagacgctcagctgagcgtgacgccgtcattttccccctttttttccttcttcctattcttgttttttatgtgaaccataatttgttgcggtagaaataggcacagatataacatgactggattaatatgctttaataataaggaaatttgatttggagatggggccggaaatgatagagcaggatggatggtaggaaaaggaaggggaaattcagaaattctctcaggcgtatggctatggagtgcctgtgctctggtgagcagttgaaggcgtcagatgagaccatgcggtcatctgattctacgatcacaaaggatttctcggccagtgggtactcttcttggaatggagagattgagcagtaccttgataatggcaacatagaggaagccgagttgtcgctccgggagggcatttgcctaaattatgagacatctgcattagttcctaagatgaaaatctcaattgctagaaaaacaggccgtgggaagactcattcacagtgggattccccaccaatgcccttgcatgctgtcagccttctcatggaggccatatatcttaaagcaagagcacttcatgatcttgggaaagataaaggcctaatgaaaggcaaaacaattgtcgatgttgtgggaaagttcacctggtattttattttttgctcgagctaacattcaagcttcttctgtgtgtttatccttgatcctttctaatccttttagtgatgcatatgggaacgactaagtcaacaaatatgtgtgcaggacccaataaggcaagaaaacggcaaagagcacaatagttctcatatgcctaattattcccttgattcatgattataactttgcctcctgatttaatgaccctttcctatcatttgagatatacaggtcaccctaaggcataaaagaagaaaggccatttcttgtggagatttatgcagatgacataaatccaactacaactataaaagggaagcactacatcggctctgaacaagcaatcatggaatattgagctaaggcactggagtctcaagaaaaggtctaggaatcctaagaatggatggataacgatgcttaaatatggatgacatcatttatgtcttgataaccatctacatgccggtgataatgttttttgacattcattcatggggctcacctttctaatgtgtaagaaagaaaactacgttgatcttaatctgagttgtgtgttgatggttgatgtagtaaagaaggggcacttagacattgttgttcatggatttatgtactgccaacaaaccttctcttctgattcttataggcggtgcctggctgtaatggcttgcatgtattttatgcattgactacatgataagaaccgtgcacgttgttgatggcccaattattacctctgaatcaag

SEQ ID NO: 216125 - DNA, 1536 bp, Zea Mays
cgaagaggaagcgagctgggcaagcaatcgacgcgagaagatcagaaggtgggggcaccagaaccgcactttatatgatttcttgtggtggtggagattttgacgactttcttgatgcgtttttttttggccttcgctcttttggtacggtaattagcaaatttattaggagatggttaaatgctattatatactagaagtagaaatgatttgtcttatgaatggtttgctgattgggagcttggaggctgtttagagttgtactggcagtgactaacaaccttcttctgcttgtgttgcttaattttgaagaaatggttccttgtggggttttttttccgaaaagatatgggcttagaggcggcaccgcagcgacgtgaagtgggcggccgtgacttacaaacggccacaagaaggttcctgaacgtgttgccgctcagacgctcagctgagcgtgacgccgtcattttccccctttttttccttcttcctattcttgttttttatgtgaaccataatttgttgcggtagaaataggcacagatataacatgactggattaatatgctttaataataaggaaatttgatttggagatggggccggaaatgatagagcaggatggatggtaggaaaaggaaggggaaattcagaaattctctcaggcgtatggctatggagtgcctgtgctctggtgagcagttgaaggcgtcagatgagaccatgcggtcatctgattctacgatcacaaaggatttctcggccagtgggtactcttcttggaatggagagattgagcagtaccttgataatggcaacatagaggaagccgagttgtcgctccgggagggcatttgcctaaattatgagacatctgcattagttcctaagatgaaaatctcaattgctagaaaaacaggccgtgggaagactcattcacagtgggattccccaccaatgcccttgcatgctgtcagccttctcatggaggccatatatcttaaagcaagagcacttcatgatcttgggaaagataaaggcctaatgaaaggcaaaacaattgtcgatgttgtgggaaagttcacctggtattttattttttgctcgagctaacattcaagcttcttctgtgtgtttatccttgatcctttctaatccttttagtgatgcatatgggaacgactaagtcaacaaatatgtgtgcaggacccaataaggcaagaaaacggcaaagagcacaatagttctcatatgcctaattattcccttgattcatgattataactttgcctcctgatttaatgaccctttcctatcatttgagatatacaggtcaccctaaggcataaaagaagaaaggccatttcttgtggagatttatgcagatgacataaatccaactacaactataaaagggaagcactacatcggctctggcggtgcctggctgtaatggcttgcatgtattttatgcattgactacatgataagaaccgtgcacgttgttgatggcccaattattacctctgaatcaag

SEQ ID NO: 216126 - DNA, 2498 bp, Zea Mays
cgaagaggaagcgagctgggcaagcaatcgacgcgagaagatcagaaggtgggggcaccagaaccgcactttatatgatttcttgtggtggtggagattttgacgactttcttgatgcgtttttttttggccttcgctcttttggtacggtaattagcaaatttattaggagatggttaaatgctattatatactagaagtagaaatgatttgtcttatgaatggtttgctgattgggagcttggaggctgtttagagttgtactggcagtgactaacaaccttcttctgcttgtgttgcttaattttgaagaaatggttccttgtggggttttttttccgaaaagatatgggcttagaggcggcaccgcagcgacgtgaagtgggcggccgtgacttacaaacggccacaagaaggttcctgaacgtgttgccgctcagacgctcagctgagcgtgacgccgtcattttccccctttttttccttcttcctattcttgttttttatgtgaaccataatttgttgcggtagaaataggcacagatataacatgactggattaatatgctttaataataaggaaatttgatttggagatggggccggaaatgatagagcaggatggatggtaggaaaaggaaggggaaattcagaaattctctcaggcgtatggctatggagtgcctgtgctctggtgagcagttgaaggcgtcagatgagaccatgcggtcatctgattctacgatcacaaaggatttctcggccagtgggtactcttcttggaatggagagattgagcagtaccttgataatggcaacatagaggaagccgagttgtcgctccgggagggcatttgcctaaattatgaggtaagttgttttcttttgtgaaacagattttgttatggcaccaagaacagctgaaatatatgctgaatgtgactaggaaatgccaccaattcagctagtatgattcctagttaagtcaatcttgggtttcttttgtcaattttacttccttgtgaagatttttgtacgtaactaaaatcaacctgcatgctgaatgtatttttttttctgcagttagttgaataaatatatggttattatctttttcttcactaaaattagttcactacctcctacctaggagtttatccaagctagccttttctgtaccagtataagtatttcaagggaaattctttcttatttcaagagaagacttaccatttttattactgccattctctttcttcgatttcgttagatgccagaatgtcatctgtttaagttctatatttcagcattacatttggacctagctgtttctagctcgactgacagcacatgctaaacaggaagcaagggcattgctaggaaggctagaatatcaacggggtcatgtagaggcagcactccgtgtctttgatgggatagacatctgcattagttcctaagatgaaaatctcaattgctagaaaaacaggccgtgggaagactcattcacagtgggattccccaccaatgcccttgcatgctgtcagccttctcatggaggccatatatcttaaagcaagagcacttcatgatcttgggaaagataaaggacccaataaggcaagaaaacggcaaagagcacaatagttctcatatgcctaattattcccttgattcatgattataactttgcctcctgatttaatgaccctttcctatcatttgagatatacaggtcaccctaaggcataaaagaagaaaggccatttcttgtggagatttatgcagatgacataaatccaactacaactataaaagggaagcactacatcggctctggtgtgcttaactatatctttgattcgcgaatatagttttgttattaaattagtgaaaattcaagctatatccttttgtgctctctgacattatgacatttgtttagcaagtactttagtgaaaagatttcaccatatgcatgtccatgtttatgacaaatcatagttatccgttacattacatcgatgtaatcttcacacaaagtctcaacaatatttggttgctcacttacaccccaccctagattaacatgttctgaattttctttgttcactgctgcaattgacacatgctaaatggcaatttctttataatgatccaattgagtttgtaattgcacatgtttttgccaagtttcatcaagtactgctccaacagaacaagcaatcatggaatattgagctaaggcactggagtctcaagaaaaggtctaggaatcctaagaatggatggataacgatgcttaaatatggatgacatcatttatgtcttgataaccatctacatgccggtgataatgttttttgacattcattcatggggctcacctttctaatgtgcggtgcctggctgtaatggcttgcatgtattttatgcattgactacatgataagaaccgtgcacgttgttgatggcccaattattacctctgaatcaag

SEQ ID NO: 216127 - DNA, 1833 bp, Zea Mays
cgaagaggaagcgagctgggcaagcaatcgacgcgagaagatcagaagaaatggttccttgtggggttttttttccgaaaagatatgggcttagaggcggcaccgcagcgacgtgaagtgggcggccgtgacttacaaacggccacaagaaggttcctgaacgtgttgccgctcagacgctcagctgagcgtgacgccgtcattttccccctttttttccttcttcctattcttgttttttatgtgaaccataatttgttgcggtagaaataggcacagatataacatgactggattaatatgctttaataataaggaaatttgatttggagatggggccggaaatgatagagcaggatggatggtaggaaaaggaaggggaaattcagaaattctctcaggcgtatggctatggagtgcctgtgctctggtgagcagttgaaggcgtcagatgagaccatgcggtcatctgattctacgatcacaaaggatttctcggccagtgggtactcttcttggaatggagagattgagcagtaccttgataatggcaacatagaggaagccgagttgtcgctccgggagggcatttgcctaaattatgagacatctgcattagttcctaagatgaaaatctcaattgctagaaaaacaggccgtgggaagactcattcacagtgggattccccaccaatgcccttgcatgctgtcagccttctcatggaggccatatatcttaaagcaagagcacttcatgatcttgggaaagataaaggtaagcagcaccttgctatcatgttgcacacattaacagacttgcattgtgggttagtaattaattctaaaaaaacaatggactaagtacaaatttaactaaaatttgttttgttgttttgcatttgctttaggcctaatgaaaggcaaaacaattgtcgatgttgtgggaaagttcacctggtattttattttttgctcgagctaacattcaagcttcttctgtgtgtttatccttgatcctttctaatccttttagtgatgcatatgggaacgactaagtcaacaaatatgtgtgcaggacccaataaggcaagaaaacggcaaagagcacaatagttctcatatgcctaattattcccttgattcatgattataactttgcctcctgatttaatgaccctttcctatcatttgagatatacaggtcaccctaaggtaagagaggtatttcctttattggagattacaattttgcctcctgttccattggaaagtaaagcgactacgaccttgaattctttttttgctgtcatcatatatttttagcaggcataaaagaagaaaggccatttcttgtggagatttatgcagatgacataaatccaactacaactataaaagggaagcactacatcggctctgaacaagcaatcatggaatattgagctaaggcactggagtctcaagaaaaggtctaggaatcctaagaatggatggataacgatgcttaaatatggatgacatcatttatgtcttgataaccatctacatgccggtgataatgttttttgacattcattcatggggctcacctttctaatgtgtaagaaagaaaactacgttgatcttaatctgagttgtgtgttgatggttgatgtagtaaagaaggggcacttagacattgttgttcatggatttatgtactgccaacaaaccttctcttctgattcttataggcggtgcctggctgtaatggcttgcatgtattttatgcattgactacatgataagaaccgtgcacgttgttgatggcccaattattacctctgaatcaag

SEQ ID NO: 216128 - DNA, 1756 bp, Zea Mays
cgaagaggaagcgagctgggcaagcaatcgacgcgagaagatcagaaggtgggggcaccagaaccgcactttatatgatttcttgtggtggtggagattttgacgactttcttgatgcgtttttttttggccttcgctcttttggtacggtaattagcaaatttattaggagatggttaaatgctattatatactagaagtagaaatgatttgtcttatgaatggtttgctgattgggagcttggaggctgtttagagttgtactggcagtgactaacaaccttcttctgcttgtgttgcttaattttgaagaaatggttccttgtggggttttttttccgaaaagatatgggcttagaggcggcaccgcagcgacgtgaagtgggcggccgtgacttacaaacggccacaagaaggttcctgaacgtgttgccgctcagacgctcagctgagcgtgacgccgtcattttccccctttttttccttcttcctattcttgttttttatgtgaaccataatttgttgcggtagaaataggcacagatataacatgactggattaatatgctttaataataaggaaatttgatttggagatggggccggaaatgatagagcaggatggatggtaggaaaaggaaggggaaattcagaaattctctcaggcgtatggctatggagtgcctgtgctctggtgagcagttgaaggcgtcagatgagaccatgcggtcatctgattctacgatcacaaaggatttctcggccagtgggtactcttcttggaatggagagattgagcagtaccttgataatggcaacatagaggaagccgagttgtcgctccgggagggcatttgcctaaattatgagacatctgcattagttcctaagatgaaaatctcaattgctagaaaaacaggccgtgggaagactcattcacagtgggattccccaccaatgcccttgcatgctgtcagccttctcatggaggccatatatcttaaagcaagagcacttcatgatcttgggaaagataaaggcctaatgaaaggcaaaacaattgtcgatgttgtgggaaagttcacctggacccaataaggcaagaaaacggcaaagagcacaatagttctcatatgcctaattattcccttgattcatgattataactttgcctcctgatttaatgaccctttcctatcatttgagatatacaggtcaccctaaggcataaaagaagaaaggccatttcttgtggagatttatgcagatgacataaatccaactacaactataaaagggaagcactacatcggctctgtttcatcaagtactgctccaacagaacaagcaatcatggaatattgagctaaggcactggagtctcaagaaaaggtctaggaatcctaagaatggatggataacgatgcttaaatatggatgacatcatttatgtcttgataaccatctacatgccggtgataatgttttttgacattcattcatggggctcacctttctaatgtgtaagaaagaaaactacgttgatcttaatctgagttgtgtgttgatggttgatgtagtaaagaaggggcacttagacattgttgttcatggatttatgtactgccaacaaaccttctcttctgattcttataggcggtgcctggctgtaatggcttgcatgtattttatgcattgactacatgataagaaccgtgcacgttgttgatggcccaattattacctctgaatcaag

SEQ ID NO: 216129 - DNA, 2366 bp, Zea Mays
gaagaggaagcgagctgggcaagcaatcgacgcgagaagatcagaagaaatggttccttgtggggttttttttccgaaaagatatgggcttagaggcggcaccgcagcgacgtgaagtgggcggccgtgacttacaaacggccacaagaaggttcctgaacgtgttgccgctcagacgctcagctgagcgtgacgccgtcattttccccctttttttccttcttcctattcttgttttttatgtgaaccataatttgttgcggtagaaataggcacagatataacatgactggattaatatgctttaataataaggaaatttgatttggagatggggccggaaatgatagagcaggatggatggtaggaaaaggaaggggaaattcagaaattctctcaggcgtatggctatggagtgcctgtgctctggtgagcagttgaaggcgtcagatgagaccatgcggtcatctgattctacgatcacaaaggatttctcggccagtgggtactcttcttggaatggagagattgagcagtaccttgataatggcaacatagaggaagccgagttgtcgctccgggagggcatttgcctaaattatgaggtaagttgttttcttttgtgaaacagattttgttatggcaccaagaacagctgaaatatatgctgaatgtgactaggaaatgccaccaattcagctagtatgattcctagttaagtcaatcttgggtttcttttgtcaattttacttccttgtgaagatttttgtacgtaactaaaatcaacctgcatgctgaatgtatttttttttctgcagttagttgaataaatatatggttattatctttttcttcactaaaattagttcactacctcctacctaggagtttatccaagctagccttttctgtaccagtataagtatttcaagggaaattctttcttatttcaagagaagacttaccatttttattactgccattctctttcttcgatttcgttagatgccagaatgtcatctgtttaagttctatatttcagcattacatttggacctagctgtttctagctcgactgacagcacatgctaaacaggaagcaagggcattgctaggaaggctagaatatcaacggggtcatgtagaggcagcactccgtgtctttgatgggatagacatctgcattagttcctaagatgaaaatctcaattgctagaaaaacaggccgtgggaagactcattcacagtgggattccccaccaatgcccttgcatgctgtcagccttctcatggaggccatatatcttaaagcaagagcacttcatgatcttgggaaagataaaggacccaataaggcaagaaaacggcaaagagcacaatagttctcatatgcctaattattcccttgattcatgattataactttgcctcctgatttaatgaccctttcctatcatttgagatatacaggtcaccctaaggcataaaagaagaaaggccatttcttgtggagatttatgcagatgacataaatccaactacaactataaaagggaagcactacatcggctctggtgtgcttaactatatctttgattcgcgaatatagttttgttattaaattagtgaaaattcaagctatatccttttgtgctctctgacattatgacatttgtttagcaagtactttagtgaaaagatttcaccatatgcatgtccatgtttatgacaaatcatagttatccgttacattacatcgatgtaatcttcacacaaagtctcaacaatatttggttgctcacttacaccccaccctagattaacatgttctgaattttctttgttcactgctgcaattgacacatgctaaatggcaatttctttataatgatccaattgagtttgtaattgcacatgtttttgccaagtttcatcaagtactgctccaacagaacaagcaatcatggaatattgagctaaggcactggagtctcaagaaaaggtctaggaatcctaagaatggatggataacgatgcttaaatatggatgacatcatttatgtcttgataaccatctacatgccggtgataatgttttttgacattcattcatggggctcacctttctaatgtgtaagaaagaaaactacgttgatcttaatctgagttgtgtgttgatggttgatgtagtaaagaaggggcacttagacattgttgttcatggatttatgtactgccaacaaaccttctcttctgattcttataggcggtgcctggctgtaatggcttgcatgtattttatgcattgactacatgataagaaccgtgcacgttgttgatggcccaattattacctctgaatcaag

SEQ ID NO: 216130 - DNA, 1350 bp, Zea Mays
ggagcacgttgccacgttgcggcggtgcggcgcacatctcccagggacaggctcgtaatttttccactggccatcgcacccattcataaaaccctaaacccaggacccaggtttatcggtgaggcgagccgcgagtggaactgtggaagcgttgagcttttttcttctttgtcttgctgcgcaagaagaagggaaacgagaggcgggcggcgatggcgaagaggctgctcccgtcgctgaaccgggtgctggtggagaagctggtgcagcccaagaagaccgccggcggcatcctcgtcccggaaacatccaagcagctcccacctcctgcattcgtgaagaacgactgaaccagccgccactcgcccgtccgactccggctccggccagctgcctctgtccctccgccgagctgcccgtccgccttcgtccctccggcccaggcgagcagaactccgcccccacccgccccgagccgagcagcagccagcagagccgcatcgccgccggggaacgctgagttgccggtccgccgccctgagaagatttccgtcccagcagcatagccgcagcgccgctgcccgtcgcctcaaggcaagtccgagcgccctgtcacaggccccagattaggttgatgtctttcctgagactgttgcctcaaaggctaccccaacttatcaggcaggtggagcaagatgttgagactgtaatccacgttctccagccgggtccaataggaattgtggagcacaaattcacagacgcggagatcttagaggccagggctacagtgaaaagagcagtggataattggcgaagaaattggacccttgagagaaatgttagcagataaatggaaaaaatatacccctggtgtcttctatcaacagtaattgaaataaatagggtgccatggctggatgcagttgttgccattagttagatttgagcacgatctgcttatcgggagttatgttaactgttctaaatgatcagtctgtttctctttgtttcatggttcgactccgattcattccttgtttggaaatgatctttttttcatcatactactatatgggacattttttttttgttcattgcattgtcggtagccggctggcatattggatgtgatcctttcttttgatgcttcagtactttaactgtagtatctgaagagatacttgaagatcagtaacttcatgatccttgaccattgtgtcataatgccatactattttcactaactatcttcacctgctcatgtacaatcctggccctctgaatcggtttttgaagacaagaaggtttttgaagacaataaaaatctaaaagactgcatgatataat

SEQ ID NO: 216131 - DNA, 2610 bp, Zea Mays
ggaagtttcattttatatgccaaagtacgattgggtgcccgtttggcgagggatgtcattttctgcactttgtccctggtggttacccggcagttgcaaaaatgctgaatctaagtagctctgctgtatctgcgccatcaagaactcatgtggatcatgccgctcttaccggtgcctctcatccagcttctacggtcaagacacgcatgtgcaccaagtacaacactacagaaggctgcaagttcggtgataagtgccatttcgctcatagcgaaagagagcttgcgaagccagcctacatgtctcaagaaggacctcctatgggtggtcgatatggacgagctgaacctatgcaaccagctgccatgggccctccagcaggaaactttggtgcctcggcgactgccaagatcagtgtggacgcctctctggccggtggcataatcggcaagggtggggtcaacactaagcagataagtagaattacaggcgtcaagctctccatccgcgaccacgagtctaaccccaacctaaagaacatcgagctggaaggcaattttgaccagatcaagcaagccagcgacttggtgcgtgatctcatcgcaaccatcagcgcaagcatgccagcgaaaaatccatctgctgccgcggcaccagcaggaggaggccgaggcggtggtccagggggcaagagcagcaactacaagacgaagctgtgcgagaacttcttgaagggtgcctgtacttttggtgaccggtgccacttcgcccatggcgagacggagcagcggagaggtgctgcatgagagtcgagtttaaagatgctgggggtttcgaggccttagtcagcgggaagaccactgagatgcagaggatcgatgtcaatgagcgaatcgttggacttgaacgcctgaatcccacaccgcgccccacaacatcgccgtttctggagggtcgatggaactttgaatggtttggtgatagtagtcctggagcatttgcagcccgtcttttgtttgagaggtcacctacggctgttgcacactttatgggacttgatgtgctgatcaaggatggatactccaagctctcatcaaacctcaagtttgtaaacacgatacaaagcaagtttttactgactactcaattgtctgttgagggccccatcaggatgaaagaggaatatgttgagggccttatagagattcccagaatcaatgaagaatcattgcctgaacagttaaagggcttgcttggccaaactgcaggagctctacaacaacttcctagccctataagggatgctgtttcagaggggcttaaattgccacttagtggatcatttcaacgcttattcatgatctcttacttggatgaagaaatattgattatcagagatgctgctggagcacctgacgtcttaaccagacttgaggggccgcaaccgaatccaggtgacggcacagcagatgcagtgatatcggaatatgaaagctaatgcctcagtgctgactgtagctccgcacctagctcctgtttatggctcctttctcctctttggtcattttctcagtctcgcgcgtatataaagctttctagttctagtgttgtcaacgatgatgaccactcgagtgtttttacttaatacataccatttgtctattctgaatatgagcaacaatatctaaatattcaaatgtccatcaccagtttatatgaaacacggtaaaacaaaaaaaaaaggtactggttgtttaaagttaaaaactgaccagtaagttccaagatacgtacgggctggtaaccgctcgatgcgtgcagagaaccagtgacagacagcaacctctatcaaaaacaaaagagactagaagagttctattcaaacactgatgaagttcattgttctattgggctcatggaactatcaaaaagaggacagacatggaaccatgaaacatgtccggtgatttatgtttatggttgcaaaacgattaaagttgagatcgttcatctcataatgtaaatgcttgcagagaaactgaccaggagacttggggggtaaacattcccatgcaccatctgatcataacttaaagccggccaccccgtctgtgtcgcaggagctgaggagaaaatcatagaagccatcgttgtagccatccggatcgagatcgtacagtaaccctcccccttctccagacgatgtttcggcctccactttcatcggcgacgacatcgcagtcggctgccacgacgatagcgatgatggcgaagcatcctcgtccgtgagtgccgacgccgcgcaggagcccttttgggacgatggcattccggtgagccgctggacgaccttacgaaagtcccgagcctctgttttgataacctccggcgccaagacgtgaacgatcctgatcttacgcggcggcgtcttcgggatagcgtgggagagccggtgctgtgacgacgatgcaccgcgggacgggagcttcgcggcgtgtttcatggcgtcgccgttcgtgtgtgtgagtgtgagggggagagagaccgaacgagatggagccaccgccgccagtggagaaggagctgagaacactggaggttatacgtcct

SEQ ID NO: 216132 - DNA, 1764 bp, Zea Mays
aaatcttttttatttctttactaaggcgtgcacacatcgcgttctgccatcgctccccgccccgcagccagccgccccgcagccagccgtcccgccccgcaatccccgccccgccccgcaatccccgcccgcaatccgctggtaggtgctcgccgatggaaggttatcaggtccgctgccgctggaaggtgcccgccccgcagcagagaatggaaggtcctcacgcccgcacgctcgctggaaggtccttgattgagctgataatggaaggtcaccatacacggatggaggacgcggatggaaggtccgtggccaaatccgatttgccccctcgcccgcgagatgccgccgcccaccgtgcccgcgattccgccccaatcacctctggttctcaagtatggggaggaagggaaggtggtggagcgagtgaacctcgccactcggcagctgcgcctactgccgaagcccgttgtccggatctgcggtctcctcgcgctcgacgtctcccgcgaccagctaaaggcgatagtcgagcgcgccggagcaggcagcaggccaacaacccagcagatgggggaagcatcaaggagggtcgtgcaccgtcgtcgacgacccgcttcttccccgatgcggaggctgcggggcaactacgaccccgtggagatggcgcgcatggccgccagcgctgcggcagccgtgcgccactcggccaagaagcgccccaaaatgagccagatcgtgagggcactcgagggggacatctcgctggaggacctcaacgacaacgagggggtgcggcctgggcagagcatggcgttcgtccatgtgctgcttagtaccagactatagaaggataccaccctttatgagagagcgtctctcgtccatacaaggaaacaattcgtgcctttttggtctactttcatagttttcctttgttattccaagttgtgtatcgatgtcgctataggccacagccgcctccagcgcacaaagagaccacgtctcctcccctcccttagccttacccccacccaatccctcaacctctcctacaacaccttctccggcccgctccccgacgacattgcgcgcctcgctttcacagcggcgagacagggaagatggacattaattttaccttaatgtttttaatacacgatttagacttttcatgaatataatcttcattttccttgcagacagcaagtgtggagtaatctatagtttattttctggtatactggttccattgaagaaagatccccgtgctccatttcaccatatccagatgccatcttccaaacatggtccaataaactccctggatcagaatacaatgttgtatggtccttgatgaacaaacaatacctggggtcatagattgtctgcatgcatgctagatgagaaaaaaatagccagccgggggtgtttggattcacagcagatggttgagaagcgcaatgcgcaaaaactgacataaagcaagcagatgtttggattcacaccctgatcaggcctgatggaaagaagaaggcttacgtgaagcttctcctgtaagcatgcttcagatctcccctccctcccttctatgtctctttcaccagctggatccaaccgtccattcctcactcccctgacccctcaccctctgagagcacctagagggggggtgaataggtgatcctgtaaaacttcaaaacttaagccacaaaaacttgttaaatgttagcacaagtatggccaagtggctagagagaattc

SEQ ID NO: 216133 - DNA, 1669 bp, Zea Mays
aaatcttttttatttctttactaaggcgtgcacacatcgcgttctgccatcgctccccgccccgcagccagccgccccgcagccagccgtcccgccccgcaatccccgccccgccccgcaatccccgcccgcaatccgctggtaggtgctcgccgatggaaggttatcaggtccgctgccgctggaaggtgcccgccccgcagcagagaatggaaggtcctcacgcccgcacgctcgctggaaggtccttgattgagctgataatggaaggtcaccatacacggatggaggacgcggatggaaggtccgtggccaaatccgatttgccccctcgcccgcgagatgccgccgcccaccgtgcccgcgattccgccccaatcacctctggttctcaagtatggggaggaagggaaggtggtggagcgagtgaacctcgccactcggcagctgcgcctactgccgaagcccgttgtccggatctgcggtctcctcgcgctcgacgtctcccgcgaccagctaaaggcgatagtcgagcgcgccggagcaggcagcaggccaacaacccagcagatgggggaagcatcaaggagggtcgtgcaccgtcgtcgacgacccgcttcttccccgatgcggaggctgcggggcaactacgaccccgtggagatggcgcgcatggccgccagcgctgcggcagccgtgcgccactcggccaagaagcgccccaaaatgagccagatcgtgagggcactcgagggggacatctcgctggaggacctcaacgacaacgagggggtgcggcctgggcagagcatggcgttcgtccatgtgctgcttagtaccagactatagaaggataccaccctttatgagagagcgtctctcgtccatacaaggaaacaattcgtgcctttttggtctactttcataccttacccccacccaatccctcaacctctcctacaacaccttctccggcccgctccccgacgacattgcgcgcctcgctttcacagcggcgagacagggaagatggacattaattttaccttaatgtttttaatacacgatttagacttttcatgaatataatcttcattttccttgcagacagcaagtgtggagtaatctatagtttattttctggtatactggttccattgaagaaagatccccgtgctccatttcaccatatccagatgccatcttccaaacatggtccaataaactccctggatcagaatacaatgttgtatggtccttgatgaacaaacaatacctggggtcatagattgtctgcatgcatgctagatgagaaaaaaatagccagccgggggtgtttggattcacagcagatggttgagaagcgcaatgcgcaaaaactgacataaagcaagcagatgtttggattcacaccctgatcaggcctgatggaaagaagaaggcttacgtgaagcttctcctgtaagcatgcttcagatctcccctccctcccttctatgtctctttcaccagctggatccaaccgtccattcctcactcccctgacccctcaccctctgagagcacctagagggggggtgaataggtgatcctgtaaaacttcaaaacttaagccacaaaaacttgttaaatgttagcacaagtatggccaagtggctagagagaattc

SEQ ID NO: 216134 - DNA, 1806 bp, Zea Mays
aaatcttttttatttctttactaaggcgtgcacacatcgcgttctgccatcgctccccgccccgcagccagccgccccgcagccagccgtcccgccccgcaatccccgccccgccccgcaatccccgcccgcaatccgctggtaggtgctcgccgatggaaggttatcaggtccgctgccgctggaaggtgcccgccccgcagcagagaatggaaggtcctcacgcccgcacgctcgctggaaggtccttgattgagctgataatggaaggtcaccatacacggatggaggacgcggatggaaggtccgtggccaaatccgatttgccccctcgcccgcgagatgccgccgcccaccgtgcccgcgattccgccccaatcacctctggttctcaagtatggggaggaagggaaggtggtggagcgagtgaacctcgccactcggcagctgcgcctactgccgaagcccgttgtccggatctgcggtctcctcgcgctcgacgtctcccgcgaccagctaaaggcgatagtcgagcgcgccggagcaggcagcaggccaacaacccagcagatgggggaagcatcaaggagggtcgtgcaccgtcgtcgacgacccgcttcttccccgatgcggaggctgcggggcaactacgaccccgtggagatggcgcgcatggccgccagcgctgcggcagccgtgcgccactcggccaagaagcgccccaaaatgagccagatcgtgagggcactcgagggggacatctcgctggaggacctcaacgacaacgagggggtgcggcctgggcagagcatggcgttcgtccatgtgctgcttagtaccagactatagaaggataccaccctttatgagagagcgtctctcgtccatacaaggaaacaattcgtgcctttttggtctactttcatacctgtaaatgcttgtgtttgtttgggtttcttcacgtgcaaggttttcctttgttattccaagttgtgtatcgatgtcgctataggccacagccgcctccagcgcacaaagagaccacgtctcctcccctcccttagccttacccccacccaatccctcaacctctcctacaacaccttctccggcccgctccccgacgacattgcgcgcctcgctttcacagcggcgagacagggaagatggacattaattttaccttaatgtttttaatacacgatttagacttttcatgaatataatcttcattttccttgcagacagcaagtgtggagtaatctatagtttattttctggtatactggttccattgaagaaagatccccgtgctccatttcaccatatccagatgccatcttccaaacatggtccaataaactccctggatcagaatacaatgttgtatggtccttgatgaacaaacaatacctggggtcatagattgtctgcatgcatgctagatgagaaaaaaatagccagccgggggtgtttggattcacagcagatggttgagaagcgcaatgcgcaaaaactgacataaagcaagcagatgtttggattcacaccctgatcaggcctgatggaaagaagaaggcttacgtgaagcttctcctgtaagcatgcttcagatctcccctccctcccttctatgtctctttcaccagctggatccaaccgtccattcctcactcccctgacccctcaccctctgagagcacctagagggggggtgaataggtgatcctgtaaaacttcaaaacttaagccacaaaaacttgttaaatgttagcacaagtatggccaagtggctagagagaattc

SEQ ID NO: 216135 - DNA, 6043 bp, Zea Mays
cgctctgcaccgcgcgcctccttctctgctgcggcaaccgggaactgcggctgcggcggcggcgacttaaaccctcgagctcgctccaaggccgtcgctggtcgatcgggcggaagaggcagaagccagccagccagccaatggcccccaaggccggccgtggcaagggcaggggcggcaaaggcgacaagaggaagaaggaagagaaagtggtgcccagcgtggtagacgtcacggtggtcacccccgacgagtcccaggtgacactcaaggggatatccacggaccgcgtgctggacgtgcggaagctgctggggtcgaacgtggaaacgtgtcacctgacaaactattcactctcccatgtggcgcgcgggcaccggctggaggacggcgcggaggtggtggcgctcaagccctgcgctctccggatcgtcgaagaggagtacgcgacggcggagcaggcggaggcgcacgtccgccggctgctggacatcctcgcctgcaccaccgcgttcgccaggccccgggacggcgccgccaagcacagggcgtccaggcacggccgccccgcgacaccgccctcctctcccacgcccgcctcgaccggggcccatggcgtcgccagcggcgaggccgcgccgccgatatcggaggcgcacgacatggccgccatccggccgccgcccaagctgggggagttctacgacttcttctccttcgcccatctcaccccgcccgtccactttatcaggaggaaggaggcgaatggcgcttctcaggaaggcgatcacttcgaaatcgaggtgaaggtttgcaacgggaagcttctgcacgttgttgcttcagtaaagggtttctacttgtcagggaagccacacaacgttagccactccctggtggacctgctgcaacagctcagcaatgcgtttgctaatgcatatgaggcgttgatgaaagctttcgtggatcacaacaagtttgggaatttgccttacggattccgtgcaaacacatggcttatccctccaatatatgttgactctgccacaaggtgcccagcactgccagtcgaggatgagaattggggtggaaatgggggtggctgtggacgtgatggaaagtatgatcgcagacggtggtcaaaagagttttctgttttggctagaatgccttgcaaaactgaggaagaacgggtgatcagagaccggaaagcttttcttttacacaatctgtttgtagatacagcaatttttagagctgcgtcaacaataaggcgactcattgatcagtctatgaactcagttggttcacatagtggtacacatggttcaaacgtatttgaggaacgtataggggacatgaatataactgtgaagaaggatggtgctgatgctagtttaaaggtggaggacaaggttgatggtgttgccttctgtcaaacgggtgctatggatattgcacaaaggaatcttctgaaaggtttaacctctgatgaaaatgttgttgctaaggattcttcaacactcggggtggtgattgtcaagcattgtggatatacggcaactgtgaaggtttctggacgtgcaaaggacagtaatgatgttaaacaaacaaatgacatctctggtaaatttgatggaatgctgaccattgatgtacatgaccatccagatggaggttctaatgccttgaatgttaacagtctaaggataccactcccgagagttatccatccagaaactgttgttggtaaccagcaccatagcccaaagtctcatgctagtaatcctgcaaagaaattggcacgtaaaatactcaaggacagcttggtaaagctggatagcatgcctagcataaattctagaattattagatgggaactggggtcctcctggctgcaacaattgcagaaaaaggatactccagcgtctgagaatggtaaggggaatgcgatgaagactgacaaagaaccagctgtcagaggtcttggaaagcattttgaacaattaaggaaacttaaaaagaaagaatgcaacaatgaaggttccagttctgagaaggaagaatgtagcaataactattcatcaatgaatggtacacaagtatcagatatgatagctgctgatgaagcaaataacggggctgatattagcaagttaatgtcagaggatgctttccttagcttaaagagtttgggagctggccttcatgaaaagtccctcgaagagctcacaaagatggcccataatttctatgatgatactgcactcccaaagctggtagctgattttgcgtcccttgagctttctcctgtggatggaagaaccatgacagatttcatgcatgcaaggggacttaatatgtcctctttaggcagggtggtagagctagcagagaagctcccacacatccagtctatatgcattcatgaaatggttattagatcctttaagcacatcatccgagctgttattgctgctgttgatgacatgcaaaatatgtctgcagctatagctgaaactctaaacatattactaggatctcccagacttgaaaatggtgctgacacggatgcccatattgacaataatttgcgactgaaatgggtagagagcttcctttcaaaaagattctgctggaaactgaaagatgaatttgcacatttacggaaatgtatcattctgagagggctttgcagcaaggttggactggagttagctgcaagagattatgatatgaatagccctaacccattcgacaaatctgacattgtcagcattgttcctgtgtgcaagcatgtggtctactcatctattgatggtcgaaacttgcttgaatcatcaaagatggcattggataaaggaaaattagatgatgctgtgagctatggaacaaaggcactgtccaaaattatagctgtttgtggtccataccatcgactggcagctaatgcatacagccttcttgctgtggtgctttatcatactggagattttaatcaggcaactatatatcaacagaaggcacttgatatcaatgaaagggagctgggtcttgatcatccggaaactatgaagagttatggggatttatctgtcttctactaccgccttcaacacattgaaatggctctaaagtatgtcaaccgtgcgctatatctgcttcagttttcatgtgggctttcacacccaaattcagctgccacctacataaacgtagctatgatggaagaaggcatgggaaatgttcatgttgctcttcgatacttgcatgaagccctgaagtgcaataagaggttgctaggagctgatcacatccagactgctgcaagctaccatgctatagccatagccctttcaatgatggatgcgtactccctaagtgtgcaacatgaacaaacaaccatgcagatacttcaggagaaactaggggaagatgacctccgaactcaggatgctgctgcatggctagaatattttgagtcaaaagcattagaacaacaagaggctgcccgaagaggcatgccaaaacctgattcatctattgcaagtaaaggacatcttagatcttcttgacttcataagcccagtccaggaaagaaaagaaagcaatgtgcaaaggaagtgtcggcgtgcaaagaataataccagagctcatcatggtgaatcagttgaagaaaaggagaatttccagcatgactcaggatctcttggagcaagtaaagacggttttgaagaagaaaaacctgatgtgcatcctcctgctgtattagaagaaaattatgctgcccatgaagagcagaagcaatgtgatgttttatcaccagaagaatattctgatgaagggtggcaagcagctaatatgagaggaaggtccgcaaatgtaaggaagaaaagtagtcgcaggaaacccgctcttatgaaattaatggttgatcgtttcgaagatgatcatacaggttctgtgtataggactggtttacagcctcgaacaaaaggggagaaagatgattctgcaactgctcctagccagatttcatttggtagctttttaaaaactgacaagttgaatggggatcccagcattgctgaagataagtctttgaatggtactgctaaaccagaacaatttacaaatccaacaggaattaacaggccaaccagcattgcttccaagtttatatcatacaaagatgtggctgtttcgccccctggcacagtattgaaaccaattttggagaagaaggaagcaaaggagaagggtagtggacatgatatttatctaacactgtcatccgaggaagaagatccacagtttacagaaaatgagaaggaaaagccaagtgaggacagtagcaaagaggttctttcaagtcagcaagacttagagagtcatgtagaaacacctgacagcaacagtgatgaaaacccatctgcacctaagaaggcatctggaagcaaactgtcagcttcagcgcctccattcaatccaggatcactcttatcaatgtcccacccatacagcacggtggcaatatatgatgctagtgctgttattcaggcagtaccaaaccaagcaatggagattctccctcatgccattgacactagagtgcctcgtggccctcggtccaccttgtactatcgtactgggcattccttccaaaggaagcaaggttacacgcacagccagagcactattgtaaggggtagttactcccccacaaccatgaacccccatgctgctgaatttgtgcctggaaaaacttcgcagcaatctgatgtggctgacagagaacccagtcctgctaatcatgtggccaattctgatctggatgttgtatcacagaccacagatgaagtgaaggctgaaacacctgccactgaaaaggcaggtcaagttgagaaagtcgtttcaggtaaaggaaaggaaaacagagggaaagacatcgtgagaaactcatacaaaacagaacttgcaaggcaaattttgctcagtttcattgtgaagtcagtgcatgacagtttaggttccgcccaagctgaaccagagaggaagccaagtggatcagatgaagctagtaataaacagagcagcaacttagtcaagaatgcttctggtcgcaaagattcagataaacaagagaaatccatggaggttcccaagggcctgaaggatacagagggatttacagtcgtttcaaaacgtcgaaggcggccccagccattcatgaaccccataaacggcctctgttctcagccgtctatttgcacctctgtcagttaaggtctcattgcattttcaaagacctgcaatagtttggaagatggaccattgcttttgcttaggggttggtagaagaattttgccgtatccaagcgagcagcgagcatgtagtcaaactgtacaaaattttccaggataccctttgtaataataataaaaaaaaactgctgtaatctgcagtagctgtagcgctgaataaagtattcctttgtatgttagatatgacagaatcagaggaaatagcaagcagatgtttaggttaatccaatatcccagtagtgcttctcttatgccctagtgtttctgcagtttctcaagatgtcgtggggatttatcgttgcaatctgcaaatgctgtcagagcagaagaaactgaatctgctaggcgccaagagtttgttcatgaaggcatgtcttttattgcttctttcccctgtgcccagactgctcagtgtggtcattggatgccttgtcagaggacggagcagcgtttcaccgtgaagcaattgcagctgcagaccagatcaccagaccactgaggccaggcgtgaactgggccggcagttttaaagctgttggcagctacgtatactgtacgagtctaaggagtagcctgcagctaagcgtagctgcagagaccacacaaatgtgaatcaaatcagttcagttccaaactgtcattgctgggagccaacatccgagactgaaaaatatgttgtgcatacgtatttttcttttgcatttaaatttgaaaccgg

SEQ ID NO: 216136 - DNA, 2732 bp, Zea Mays
ttgcggttgcggttgctgctgggtgtggtgcccagcgtggtagacgtcacggtggtcacccccgacgagtcccaggtgacactcaaggggatatccacggaccgcgtgctggacgtgcggaagctgctggggtcgaacgtggaaacgtgtcacctgacaaactattcactctcccatgtggcgcgcgggcaccggctggaggacggcgcggaggtggtggcgctcaagccctgcgctctccggatcgtcgaagaggagtacgcgacggcggagcaggcggaggcgcacgtccgccggctgctggacatcctcgcctgcaccaccgcgttcgccaggccccgggacggcgccgccaagcacagggcgtccaggcacggccgccccgcgacaccgccctcctctcccacgcccgcctcgaccggggcccatggcgtcgccagcggcgaggccgcgccgccgatatcggaggcgcacgacatggccgccatccggccgccgcccaagctgggggagttctacgacttcttctccttcgcccatctcaccccgcccgtccactttatcaggaggaaggaggcgaatggcgcttctcaggaaggcgatcacttcgaaatcgaggtgaaggtttgcaacgggaagcttctgcacgttgttgcttcagtaaagggtttctacttgtcagggaagccacacaacgttagccactccctggtggacctgctgcaacagctcagcaatgcgtttgctaatgcatatgaggcgttgatgaaagctttcgtggatcacaacaagtttgggaatttgccttacggattccgtgcaaacacatggcttatccctccaatatatgttgactctgccacaaggtgcccagcactgccagtcgaggatgagaattggggtggaaatgggggtggctgtggacgtgatggaaagtatgatcgcagacggtggtcaaaagagttttctgttttggctagaatgccttgcaaaactgaggaagaacgggtgatcagagaccggaaagcttttcttttacacaatctgtttgtagatacagcaatttttagagctgcgtcaacaataaggcgactcattgatcagtctatgaactcagttggttcacatagtggtacacatggttcaaacgtatttgaggaacgtataggggacatgaatataactgtgaagaaggatggtgctgatgctagtttaaaggtggaggacaaggttgatggtgttgccttctgtcaaacgggtgctatggatattgcacaaaggaatcttctgaaaggtttaacctctgatgaaaatgttgttgctaaggattcttcaacactcggggtggtgattgtcaagcattgtggatatacggcaactgtgaaggtttctggacgtgcaaaggacagtaatgatgttaaacaaacaaatgacatctctggtaaatttgatggaatgctgaccattgatgtacatgaccatccagatggaggttctaatgccttgaatgttaacagtctaaggataccactcccgagagttatccatccagaaactgttgttggtaaccagcaccatagcccaaagtctcatgctagtaatcctgcaaagaaattggcacgtaaaatactcaaggacagcttggtaaagctggatagcatgcctagcataaattctagaattattagatgggaactggggtcctcctggctgcaacaattgcagaaaaaggatactccagcgtctgagaatggtaaggggaatgcgatgaagactgacaaagaaccagctgtcagaggtcttggaaagcattttgaacaattaaggaaacttaaaaagaaagaatgcaacaatgaaggttccagttctgagaaggaagaatgtagcaataactattcatcaatgaatggtacacaagtatcagatatgatagctgctgatgaagcaaataacggggctgatattagcaagttaatgtcagaggatgctttccttagcttaaagagtttgggagctggccttcatgaaaagtccctcgaagagctcacaaagatggcccataatttctatgatgatactgcactcccaaagctggtagctgattttgcgtcccttgagctttctcctgtggatggaagaaccatgacagatttcatgcatgcaaggggacttaatatgtcctctttaggcagggtggtagagctagcagagaagctcccacacatccagtctatatgcattcatgaaatgctatagctgaaactctaaacatattactaggatctcccagacttgaaaatggtgctgacacggatgcccatattgacaataatttgcgactgaaatgggtagagagcttcctttcaaaaagattctgctggaaactgaaagatgaatttgcacatttacggaaatgtatcattctgagagggctttgcagcaaggttggactggagttagctgcaagagattatgatatgaatagccctaacccattcgacaaatctgacattgtcagcattgttcctgtgtgcaagcatgtggtctactcatctattgatggtcgaaacttgcttgaatcatcaaagatggcattggataaaggaaaattagatgatgctgtgagctatggaacaaaggcactgtccaaaattatagctgtttgtggtccataccatcgactggcagctaatgcatacagccttcttgctgtggtgctttatcatactgga

SEQ ID NO: 216137 - DNA, 1427 bp, Zea Mays
ctctggtgctcgcgtgatttctcgtcggtcgacggggagggggccgtgccgcgcatcgtcgcagaccgcaccgcgtccatcggcattgttgattcgaaaaagtataatctgtggcgcccaacggtactcatactcagcgcccccagaccgcgaggagttgtcggcggcggccacgagtggcgtgcatattgcagtgacgtcccgaaggattcatcactccacaaccgttgtgtccgaggcttcgacagcggaggccgtaacgatgcaatcggaagcgccgatatcggactattgtgttctccagttcgacctcgaagattcggagacaaagaacatcgccatcgggcactctatcagctacgatgatatctccttagggggacacctctgggggattaactgctaccctcgtggggatagggaagaggaaaagggcgagtacttttccttattcctctaccttattggcgactcaaaaggcaaaggcgtcaatgtcatcttccatgttttttgtctggaaagagaaggcgaagcatctgccttctccagtttctccgatgataagaggctagccaaagtgttctcaagtaaatgccccgaataccctgaaggccaccgaagccatgggtggcataagtttatgaagcgaagcgttcttgagtcattctttatagtaaatggtagggtgacgcttatatgtaccatcatggttctgggtgccggcaccattccagtgccaccctccaacataagttctgatcttggttgtctgctcaaatccaatgtcggtacagatgtttcattcattcttaaaggcaagatgatccaggctcaccgtgctgttctcgctgcccgctcgccagtcttcaaagctcagctatttggcaacatggccgacgccacagcgtcatccatcacactgcaggacatggagccagcaacttttgaagctatgcttgccttcatgtacacagatgagatgcctgaagataacgagcttggaggctctcccactcaaatggtgcagcatctgcttgctgcggctgaccgctatgcattggacagactgaaactgatgtgtgctcggaagctatgggacattatttcgatggatacatttgcttctactctagcctgcgcctatatgcacagctgtgcagagctgaagagcaagtgcattggcttctttgccgtggagaataatttcaagaagatagtgttcacagctggtttcatatggttggtgcaggaatttcccgatcttgctgatgagctgaaagagacaattgggatatagtacaacatgctgaaacctctacgtgtatatagtctacgtattcaaccgtggattcactgtgtgccattttggaactatgtatggttgatcttgttaccatatttcttgaattgctgatcttgtagatttc

SEQ ID NO: 216138 - DNA, 3602 bp, Zea Mays
cgacggcccgccctcaaaaacaccacccgccctctccgtctctcgagctccaccgccacaataccatttcgtgcgcaagaataagggagagagctccaggaagagctcccctccaccggcttccccgcccctcctcccagtgatcgcgcctcctcccgagcgtcccagccgcggtcgggtcgtcgggttcggcgctggtcctggtcctggtccggaccctcccatggcgtcgacggagcaggaggcggcggtcgaagcggccgccgtcgtggaggaagtgacgcggcagcagggcaaagggtgcggcgtcgcaggaggaggggataccgttgggtcctggaggaacatcgacattgcctggcgcaaggcggatgaagctgcaataagaaggtatgaggcagccaactggttgcgaaggatagttggggtagtgtgtgcgaaggaccttgcagaagagccttccgaggaggaattccgtattggcctgagaaatggcattattctctgcaatgcactcaataagattcaacctggtgcggtacccaaggttgtggaggttccatcggattctactgctcctgtcgatggtacagctctctgtgcatatcagtactttgagaatgtgaggaattttctcactggcatgcaagatctaggtcttacaacatttgaggcatcagacctggaaaagggtggacaaggtgttcgagttgtagactgtgttcttgctatgaagtcgttttgtgatgctaagcacgtgggaaaacgatctccattcaaatatggtggcattgtaaagcctttgtctggaaagtatgtcattcgcaagaataatgaaccttatatgaaggtgatgatgaggagtcactcagctgaattactccgggatggcatatcactggagcaaataggtcttgatttttctctagaacccactgaaacaactgctactccagactccatcaggatgcttgttcaaacagttctcgcagataagaaaccagaagaaattccatcagttgtggaatcactcttgagcaaagtaattaatgaatatgattgtcgtattgctagccagagtgaagtggtgaaagacactatggaacaggtgaaagacactatggaacaggtgaaagacactatggataccaatgactgtaactcagttttgagaatggattctccgtttgacaccaatgatactaagtcattatccagagtggactctccacaagtggagtctactacccccagcgatctggacaaggccactgaaaatattaagatggacgaagatgagcagaatgcatcgagtctgacagaagatgtaagcacattagtacctctaccagtaccagtaccactaagcaatgatattgtaattaatatcccaaagatagtgagaaattttgatcaagaagagaaacagatccaggatttgaaaagtaacatgtccactgttaagtctttcatggagcagttaaaactgctgtactctgaagaccttaaaaagcttggtgatcatttgcgtattatttctcatgcggcttctgggtaccgcaaggttgttgaggaaaaccgcaagctttacaaccaaatacaagaccttagaggaaatatcagagtttattgtcgagtaagacctttccatcctggaaaagaatttccctcgagcagtgttgctggaatagaagatagaaccatcacagttatggtaccatcaaaacatggaaaagatggaaagaagtcctttactttcaacagtgtctttgggcctctggccacacaagcggatgtctttacagacatgcaacctttggtccgttctgttcttgatggcttcaacgtatgtatatttgcatatggtcaaactggatcgggaaagacctttacaatgagtggtcccaaaattttgacagaagaagggctcggtgtcaactacagagcactaaatgatctatttggtatccaggagcagaggaaagatacaatttgttatgaaattgctgtacagatgatggagatatacaacgagcaagtgagagatctccttcagactggcggaaacaaaaaattggaaattcgaaataattctcaaaacggaattgcagttccagatgcaaatgtggtgccagtcagatcgaccgctgatgtaattgacttgatgaatctgggccaaaagaatcgaacagtttgctcaactgccatgaatgaccgaagtagtcgctcccatagctgtctgactgttcatgttcaaggacgagatttaacatctggaacagtcctaagaggttgcatgcatcttgtggatctagctggcagtgaaagagtcgataaatctgaagtggtaggaataggattaaaggaggcacagcacataaacaagtcactggctgcactgggagatgtgattgcagctctagcccagaaaagcacacatgttccttacagaaacagcaaacttactcaactattgcaagactctcttggaggaggaggaggaggaggagaagccagagagctcaaagaacagattgcttgcctcagggcagcattagctaggaaagatggagatcatgagagcatacgaagcactcaatcgagcccagacatatatagaatgggaacgggtaatgcatcacctgcgtccaggcacccaatagaagatgggatcatagagaacgactcagcattgggagatttggctgaacactcacagttcgggagcagcaattccctaccagagttgggacctgatgccacacaagatctagccttctaccaaagaagcaactccgaacagcaatggagctggtctgggtctgttgcaacggaggattccgatgatttcgaggttgcaactaattgctcgttagagctggactgcgtgaggccatctagtgccccaaaagcttcaggtttatcaaatggagggggcacagctgtaaaaaagatccaagtcaagggttcaaaaggttcagacgttaggggagtgaatcctggaaaaaggtcatcgccattacagaagaagccgagtggaccctcaccgacgctaatcaagaagggcggaggtgaaggaaggaagactccaaatggtaaaacaggaaccaagaagtaagcaacccagatgaaacttggttttgctgtgaccaacttcaccttggttagggacagataaacatgttgatactatcgggtgatacattgatatttgccacacgaatacgtcagtcctcttaagggaggaggtcgctagatcttcgggcatctgctgtaaatcactcgttgatttgttgtagtacgaacagaaaacggaccacaaaaaactcgaggatgggaggaagatcatcatcacaaggacgtttttgttagatgtatatgttgcttagcttatttttctcgctgtgtgtaagggcttctatgccctgcccatgtacatgtttggcttcttgccccatggaatatacaaagctcatttcgctctaacatggtatcaaagccattttctaaggttaggatttacctcgctctttccatcacacgttcgtccacgtgctactgatgccctatgcatggttggatgaagatgttcatgctgggac

SEQ ID NO: 216139 - DNA, 3652 bp, Zea Mays
ctcaaaaacaccacccgccctctccgtctctcgagctccaccgccacaataccatttcgtgcgcaagaataagggagagagctccaggaagagctcccctccaccggcttccccgcccctcctcccagtgatcgcgcctcctcccgagcgtcccagccgcggtcgggtcgtcgggttcggcgctggtcctggtcctggtccggaccctcccatggcgtcgacggagcaggaggcggcggtcgaagcggccgccgtcgtggaggaagtgacgcggcagcagggcaaagggtgcggcgtcgcaggaggaggggataccgttgggtcctggaggaacatcgacattgcctggcgcaaggcggatgaagctgcaataagaaggtatgaggcagccaactggttgcgaaggatagttggggtagtgtgtgcgaaggaccttgcagaagagccttccgaggaggaattccgtattggcctgagaaatggcattattctctgcaatgcactcaataagattcaacctggtgcggtacccaaggttgtggaggttccatcggattctactgctcctgtcgatggtacagctctctgtgcatatcagtactttgagaatgtgaggaattttctcactggcatgcaagatctaggtcttacaacatttgaggcatcagacctggaaaagggtggacaaggtgttcgagttgtagactgtgttcttgctatgaagtcgttttgtgatgctaagcacgtgggaaaacgatctccattcaaatatggtggcattgtaaagcctttgtctggaaagtatgtcattcgcaagaataatgaaccttatatgaaggtgatgatgaggagtcactcagctgaattactccgggatggcatatcactggagcaaataggtcttgatttttctctagaacccactgaaacaactgctactccagactccatcaggatgcttgttcaaacagttctcgcagataagaaaccagaagaaattccatcagttgtggaatcactcttgagcaaagtaattaatgaatatgattgtcgtattgctagccagagtgaagtggtgaaagacactatggaacaggtgaaagacactatggaacaggtgaaagacactatggataccaatgactgtaactcagttttgagaatggattctccgtttgacaccaatgatactaagtcattatccagagtggactctccacaagtggagtctactacccccagcgatctggacaaggccactgaaaatattaagatggacgaagatgagcagaatgcatcgagtctgacagaagatgtaagcacattagtacctctaccagtaccagtaccactaagcaatgatattgtaattaatatcccaaagatagtgagaaattttgatcaagaagagaaacagatccaggatttgaaaagtaacatgtccactgttaagtctttcatggagcagttaaaactgctgtactctgaagaccttaaaaagcttggtgatcatttgcgtattatttctcatgcggcttctgggtaccgcaaggttgttgaggaaaaccgcaagctttacaaccaaatacaagaccttagaggaaatatcagagtttattgtcgagtaagacctttccatcctggaaaagaatttccctcgagcagtgttgctggaatagaagatagaaccatcacagttatggtaccatcaaaacatggaaaagatggaaagaagtcctttactttcaacagtgtctttgggcctctggccacacaagcggatgtctttacagacatgcaacctttggtccgttctgttcttgatggcttcaacgtatgtatatttgcatatggtcaaactggatcgggaaagacctttacaatgagtggtcccaaaattttgacagaagaagggctcggtgtcaactacagagcactaaatgatctatttggtatccaggagcagaggaaagatacaatttgttatgaaattgctgtacagatgatggagatatacaacgagcaattccagatgcaaatgtggtgccagtcagatcgaccgctgatgtaattgacttgatgaatctgggccaaaagaatcgaacagtttgctcaactgccatgaatgaccgaagtagtcgctcccatagctgtctgactgttcatgttcaaggacgagatttaacatctggaacagtcctaagaggttgcatgcatcttgtggatctagctggcagtgaaagagtcgataaatctgaagtggtaggaataggattaaaggaggcacagcacataaacaagtcactggctgcactgggagatgtgattgcagctctagcccagaaaagcacacatgttccttacagaaacagcaaacttactcaactattgcaagactctcttggaggacaagcgaaaacattgatgtttattcacatagccccagaaccagatgctattagtgagtccataagtactttgaagttcgccgagcgtgtttccactattgagcttggagcagccaagtcaagcaaggaaggaggaggaggaggaggaggagaagccagagagctcaaagaacagattgcttgcctcagggcagcattagctaggaaagatggagatcatgagagcatacgaagcactcaatcgagcccagacatatatagaatgggaacgggtaatgcatcacctgcgtccaggcacccaatagaagatgggatcatagagaacgactcagcattgggagatttggctgaacactcacagttcgggagcagcaattccctaccagagttgggacctgatgccacacaagatctagccttctaccaaagaagcaactccgaacagcaatggagctggtctgggtctgttgcaacggaggattccgatgatttcgaggttgcaactaattgctcgttagagctggactgcgtgaggccatctagtgccccaaaagcttcaggtttatcaaatggagggggcacagctgtaaaaaagatccaagtcaagggttcaaaaggttcagacgttaggggagtgaatcctggaaaaaggtcatcgccattacagaagaagccgagtggaccctcaccgacgctaatcaagaagggcggaggtgaaggaaggaagactccaaatggtaaaacaggaaccaagaagtaagcaacccagatgaaacttggttttgctgtgaccaacttcaccttggttagggacagataaacatgttgatactatcgggtgatacattgatatttgccacacgaatacgtcagtcctcttaagggaggaggtcgctagatcttcgggcatctgctgtaaatcactcgttgatttgttgtagtacgaacagaaaacggaccacaaaaaactcgaggatgggaggaagatcatcatcacaaggacgtttttgttagatgtatatgttgcttagcttatttttctcgctgtgtgtaagggcttctatgccctgcccatgtacatgtttggcttcttgccccatggaatatacaaagctcatttcgctctaacatggtatcaaagccattttctaaggttaggatttacctcgctctttccatcacacgttcgtccacgtgctactgatgccctatgcatggttggatgaagatgttcatgctgggac

SEQ ID NO: 216140 - DNA, 3535 bp, Zea Mays
ctctcgagctccaccgccacaataccatttcgtgcgcaagaataagggagagagctccaggaagagctcccctccaccggcttccccgcccctcctcccagtgatcgcgcctcctcccgagcgtcccagccgcggtcgggtcgtcgggttcggcgctggtcctggtcctggtccggaccctcccatggcgtcgacggagcaggaggcggcggtcgaagcggccgccgtcgtggaggaagtgacgcggcagcagggcaaagggtgcggcgtcgcaggaggaggggataccgttgggtcctggaggaacatcgacattgcctggcgcaaggcggatgaagctgcaataagaaggtatgaggcagccaactggttgcgaaggatagttggggtagtgtgtgcgaaggaccttgcagaagagccttccgaggaggaattccgtattggcctgagaaatggcattattctctgcaatgcactcaataagattcaacctggtgcggtacccaaggttgtggaggttccatcggattctactgctcctgtcgatggtacagctctctgtgcatatcagtactttgagaatgtgaggaattttctcactggcatgcaagatctaggtcttacaacatttgaggcatcagacctggaaaagggtggacaaggtgttcgagttgtagactgtgttcttgctatgaagtcgttttgtgatgctaagcacgtgggaaaacgatctccattcaaatatggtggcattgtaaagcctttgtctggaaagtatgtcattcgcaagaataatgaaccttatatgaaggtgatgatgaggagtcactcagctgaattactccgggatggcatatcactggagcaaataggtcttgatttttctctagaacccactgaaacaactgctactccagactccatcaggatgcttgttcaaacagttctcgcagataagaaaccagaagaaattccatcagttgtggaatcactcttgagcaaagtaattaatgaatatgattgtcgtattgctagccagagtgaagtggtgaaagacactatggaacaggtgaaagacactatggaacaggtgaaagacactatggataccaatgactgtaactcagttttgagaatggattctccgtttgacaccaatgatactaagtcattatccagagtggactctccacaagtggagtctactacccccagcgatctggacaaggtgatcatttgcgtattatttctcatgcggcttctgggtaccgcaaggttgttgaggaaaaccgcaagctttacaaccaaatacaagaccttagaggaaatatcagagtttattgtcgagtaagacctttccatcctggaaaagaatttccctcgagcagtgttgctggaatagaagatagaaccatcacagttatggtaccatcaaaacatggaaaagatggaaagaagtcctttactttcaacagtgtctttgggcctctggccacacaagcggatgtctttacagacatgcaacctttggtccgttctgttcttgatggcttcaacgtatgtatatttgcatatggtcaaactggatcgggaaagacctttacaatgagtggtcccaaaattttgacagaagaagggctcggtgtcaactacagagcactaaatgatctatttggtatccaggagcagaggaaagatacaatttgttatgaaattgctgtacagatgatggagatatacaacgagcaagtgagagatctccttcagactggcggaaacaaaaaattggaaattcgaaataattctcaaaacggaattgcagttccagatgcaaatgtggtgccagtcagatcgaccgctgatgtaattgacttgatgaatctgggccaaaagaatcgaacagtttgctcaactgccatgaatgaccgaagtagtcgctcccatagctgtctgactgttcatgttcaaggacgagatttaacatctggaacagtcctaagaggttgcatgcatcttgtggatctagctggcagtgaaagagtcgataaatctgaagtggtaggaataggattaaaggaggcacagcacataaacaagtcactggctgcactgggagatgtgattgcagctctagcccagaaaagcacacatgttccttacagaaacagcaaacttactcaactattgcaagactctcttggtaacccccaaagttcgaaatccttggtttgcaacttgccagcaccaaagatatgcgctgtgagtattttgtttccccttttttcaggaggacaagcgaaaacattgatgtttattcacatagccccagaaccagatgctattagtgagtccataagtactttgaagttcgccgagcgtgtttccactattgagcttggagcagccaagtcaagcaaggaaggaggaggaggaggaggaggagaagccagagagctcaaagaacagattgcttgcctcagggcagcattagctaggaaagatggagatcatgagagcatacgaagcactcaatcgagcccagacatatatagaatgggaacgggtaatgcatcacctgcgtccaggcacccaatagaagatgggatcatagagaacgactcagcattgggagatttggctgaacactcacagttcgggagcagcaattccctaccagagttgggacctgatgccacacaagatctagccttctaccaaagaagcaactccgaacagcaatggagctggtctgggtctgttgcaacggaggattccgatgatttcgaggttgcaactaattgctcgttagagctggactgcgtgaggccatctagtgccccaaaagcttcaggtttatcaaatggagggggcacagctgtaaaaaagatccaagtcaagggttcaaaaggttcagacgttaggggagtgaatcctggaaaaaggtcatcgccattacagaagaagccgagtggaccctcaccgacgctaatcaagaagggcggaggtgaaggaaggaagactccaaatggtaaaacaggaaccaagaagtaagcaacccagatgaaacttggttttgctgtgaccaacttcaccttggttagggacagataaacatgttgatactatcgggtgatacattgatatttgccacacgaatacgtcagtcctcttaagggaggaggtcgctagatcttcgggcatctgctgtaaatcactcgttgatttgttgtagtacgaacagaaaacggaccacaaaaaactcgaggatgggaggaagatcatcatcacaaggacgtttttgttagatgtatatgttgcttagcttatttttctcgctgtgtgtaagggcttctatgccctgcccatgtacatgtttggcttcttgccccatggaatatacaaagctcatttcgctctaacatggtatcaaagccattttctaaggttaggatttacctcgctctttccatcacacgttcgtccacgtgctactgatgccctatgcatggttggatgaagatgttcatgctgggac

SEQ ID NO: 216141 - DNA, 3268 bp, Zea Mays
cccagcgttagcattgggtcgggacggtagggccgcatgtgggccgcccagccgataaggccacactgctgcagcagagaggcccgtttggtccttttcttccggattttatttatttatagattcatctccaagcagaggtttggattctgcttatcccctcagattcttgaacagatctggagttagttcctaccacgaaaatatctagggcggtttcctatcctataaatatgcaacttggattctatggtgcccaccgtcagaggagcacatgtttgcggtgctagggttttgttttgtcatctgccacaagcgattgacatatcggaggattggtcatataaaaatcccttaaaagccttggggttggttgatgtgatccatatcaaaagtaggatctgcagttggaaggcaagaagaaaaacgatctgttcataccaagaccattcaaagtcttggagccttttcttttatacgatttatctacagcactgcagttgaaaggcaactagggaaaaaaagattgaactgcattctagaggtttgcaaaattgcaaccgcccccaccacatgtgcacgtcctcactaatcgttcccaccgcttgtcacttaacatcaaccgcctcgaggaactgtcgacggactacatggacgcggagagagacatcaagcccttcgtctcccctatcatggccaccaccatccagcataggcggagcctccatggccccaacgcttctcagccaactgcattggcatcggagcacgatggcactccagtgttaccgcaaactcagcctcaagcagcatgcgtcttgaacaaggccgcttcagaggtgtcaggtgacgtcagcgaccagtccattagtgcctacgagacactcgagggtacctcgactcgtcggccttgctctgcaccacgattgagcaggaaattctggggcgccggcgattatgacgcggcggcggggaggtccacgccacaacctctaagtctacagaatcgcatgtgcgtccaccccgaatttctccactctaatgcgacttcacataagtggccgtttggagccttggcagagttgttggacaatgcagtcgatgagatagaaactggtggtgctacaacaatattgttggacaaagtcaccgacaaacggaatggatcaccagctatactaattcaagatgatggtggaggcatggatcctgattctttgaggcggtgtatgagctttggattttcagagaaacaatcaggatcttcgattggacaatatggaaatggttttaagactagcacaatgcggcttggggcagatgttattgttttcagtcgctgcactaagagcagtgggcctacacaatccattggtctcctctcttacactttcttggtggaaactggacatacagatgttgtagttcctgtggtggattataaatgcaatctaatgaaaggacaaactcaacgactggagcgtcatggttcggaacaattcttctcaaatttgtcagcattgttgaaatggtccccttttgcaacagaagaagagctgatgcagaatttctgtgacattggtccacatggcaccaagattatagtgttcaatctgtggtccaacgacgatggtaatttggagctcgactttgacacagatccggaggatattatgattagtggagcgccaaatccagaagaaattagaaattctgtaaaaagggctaatgagaaccatttggcaaatcgactacgctattctcttagggtctatgcttctgtgttgtatctgcagctaccagattactttaggatcatacttcgagggcaagaagttaagcgtcatcgcattgccgctgacctaatatatcctgaatgcatcagttataaaccacatagttgtggaataaaagaggctacggttcttacaaccattggattcttaaagggtgccccaactattagcgtgcacggatttaatatctatcataaaaatcgccttattttgccatttcatagagttctgaatacttcaagcagcaaaggtagaagcgtctctggggtgttggaggtagacttcatcaagcccactcatgacaaacaggactttgagaagtcacagctgttccagaagctgatcaaccgcctgaaggagatgactaacgagtactgggaactttacagtgacaagattggatacatgaaaaagccacgcgtgagtgcagctcctcttcctcctccagtaatgctgccgatagcaaatggcactgctgaaccatcagataggagcgcacctgctccgacgcaacccttgaggtcgcacagcaactacttgaatgcagttccaatcgcctcagcgccccctggttttcactcagcacctgtcaaagcagagagcgttgcaccaggagcgcatatgggctactccccgtcctcgctaaacgcgcagaccatgcaagtcaacgggataaaatcgccttccatggtgcctgccaccgattcggtagacacaagaaaaaggaggaacgacgacactactactatgacggtcgcgtttaaaaggaaggctacgcaggatttggctggcagcagctgtgctactgatgagacaaaacaggtatccgggtatatggggatgggagagcgagagacgaaggaattttgcttcctgaagatggaaaaccggatgctccgtgaagagtgctcggattttgttatggcagagaaggcactacgactcaaggaacagaatttacggctcgagattgagaaggcgcgggagcaattcaagagcctactgaacgaatacgtttcgttgtcagctacgccgacacagaaacgggcgacactcccagcccaagatctgtgtttgcgcttcaatgacgactcctcgcatgacgatgaggggtattccctccccgtcgtccatggtggcgctcgacgacagggacatgttaacacactggagaaggtagaggggatttcgggaaggaagaagagaaaacaggggaaactggagacatgagggacgacctgttctctgagttctgtttagtactccctccaatttttttatttatcgcgttttagtttaaaaataaactagtggacaaatattcaaacacggagatagtattataatagattcattgtatacatgccattcaacttttctaaaattagatgcctagtttattttgatgttatggagtagcatgaaaaatgatctagccatctaattttcaaaattttgagcggcatgttttc

SEQ ID NO: 216142 - DNA, 3807 bp, Zea Mays
attttatttatttatagattcatctccaagcagaggtttggattctgcttatcccctcagattcttgaacagatctggagttagttcctaccacgaaaatatctagggcggtttcctatcctataaatatgcaacttggattctatggtgcccaccgtcagaggagcacatgtttgcggtgctagggttttgttttgtcatctgccacaagcgattgacatatcggaggattggtcatataaaaatcccttaaaagccttggggttggttgatgtgatccatatcaaaagtaggatctgcagttggaaggcaagaagaaaaacgatctgttcataccaagaccattcaaagtcttggagccttttcttttatacgatttatctacagcactgcagttgaaaggcaactagggaaaaaaagattgaactgcattctagaggtttgcaaaattgcaaccgcccccaccacatgtgcacgtcctcactaatcgttcccaccgcttgtcacttaacatcaaccgcctcgaggaactgtcgacggactacatggacgcggagagagacatcaagcccttcgtctcccctatcatggccaccaccatccagcataggcggagcctccatggccccaacgcttctcagccaactgcattggcatcggagcacgatggcactccagtgttaccgcaaactcagcctcaagcagcatgcgtcttgaacaaggccgcttcagaggtgtcaggtgacgtcagcgaccagtccattagtgcctacgagacactcgagggtacctcgactcgtcggccttgctctgcaccacgattgagcaggaaattctggggcgccggcgattatgacgcggcggcggggaggtccacgccacaacctctaagtctacagaatcgcatgtgcgtccaccccgaatttctccactctaatgcgacttcacataagtggccgtttggagccttggcagagttgttggacaatgcagtcgatgagatagaaactggtggtgctacaacaatattgttggacaaagtcaccgacaaacggaatggatcaccagctatactaattcaagatgatggtggaggcatggatcctgattctttgaggcggtgtatgagctttggattttcagagaaacaatcaggatcttcgattggacaatatggaaatggttttaagactagcacaatgcggcttggggcagatgttattgttttcagtcgctgcactaagagcagtgggcctacacaatccattggtctcctctcttacactttcttggtggaaactggacatacagatgttgtagttcctgtggtggattataaatgcaatctaatgaaaggacaaactcaacgactggagcgtcatggttcggaacaattcttctcaaatttgtcagcattgttgaaatggtccccttttgcaacagaagaagagctgatgcagaatttctgtgacattggtccacatggcaccaagattatagtgttcaatctgtggtccaacgacgatggtaatttggagctcgactttgacacagatccggaggatattatgattagtggagcgccaaatccagaagaaattagaaattctgtaaaaagggctaatgagaaccatttggcaaatcgactacgctattctcttagggtctatgcttctgtgttgtatctgcagctaccagattactttaggatcatacttcgagggcaagaagttaagcgtcatcgcattgccgctgacctaatatatcctgaatgcatcagttataaaccacatagttgtggaataaaagaggctacggttcttacaaccattggattcttaaagggtgccccaactattagcgtgcacggatttaatatctatcataaaaatcgccttattttgccatttcatagagttctgaatacttcaagcagcaaaggtagaagcgtctctggggtgttggaggtagacttcatcaagcccactcatgacaaacaggactttgagaagtcacagctgttccagaagctgatcaaccgcctgaaggagatgactaacgagtactgggaactttacagtgacaagattggatacatgaaaaagccacgcgtgagtgcagctcctcttcctcctccagtaatgctgccgatagcaaatggcactgctgaaccatcagataggagcgcacctgctccgacgcaacccttgaggtcgcacagcaactacttgaatgcagttccaatcgcctcagcgccccctggttttcactcagcacctgtcaaagcagagagcgttgcaccaggagcgcatatgggctactccccgtcctcgctaaacgcgcagaccatgcaagtcaacgggataaaatcgccttccatggtgcctgccaccgattcggtagacacaagaaaaaggaggaacgacgacactactactatgacggtcgcgtttaaaaggaaggctacgcaggatttggctggcagcagctgtgctactgatgagacaaaacaggtatccgggtatatggggatgggagagcgagagacgaaggaattttgcttcctgaagatggaaaaccggatgctccgtgaagagtgctcggattttgttatggcagagaaggcactacgactcaaggaacagaatttacggctcgagattgagaaggcgcgggagcaattcaagagcctactgaacgaatacgtttcgttgtcagctacgccgacacagaaacggtaggcatcgtcccgaagccaccggccgtggccggcggcttgtgcactcgtgctagctcttcacgacatgtgggtatgttcagaatgccagagaaccgaatgctagcaaggaagcggtgatgcttctggacggctttgccggtggcggtgtagacatagcgcgaaaggcgtgtgtaccaagctctcagaaactcgactttggtttattctccagtgtcgagtgattagatactgtacatacttgtaaaacaagaggtcaccttttctgtgtgacgaaaaaatatatatatttcgaaaattgagaacctgagacgtaaaatggaaaacagtgtactgtttcagttttctgtgagatcttggttcagggcagagctatgcgtgagtgtgaccgttgggtgagccggtgaggtgagcctcccccgcgccggtggtggccactctggccccggcgtccacccaccaggccgccggcgacctctacggtcctggcgccctcgctgcttgacctgcttctcttgccactccgtgtcgggcccaaatcgtgtccgtgctgcctccggcgatgagagtggtagcggctccttccggggttcccgctctggtctcaaaccggatgcctctcctttcgtctgtgcctctcgcagggcgacactcccagcccaagatctgtgtttgcgcttcaatgacgactcctcgcatgacgatgaggggtattccctccccgtcgtccatggtggcgctcgacgacagggacatgttaacacactggagaaggtagaggggatttcgggaaggaagaagagaaaacaggggaaactggagacatgagggacgacctgttctctgagttctgtttagtactccctccaatttttttatttatcgcgttttagtttaaaaataaactagtggacaaatattcaaacacggagatagtattataatagattcattgtatacatgccattcaacttttctaaaattagatgcctagtttattttgatgttatggagtagcatgaaaaatgatctagccatctaattttcaaaattttgagcggcatgttttc

SEQ ID NO: 216143 - DNA, 291 bp, Zea Mays
tgcagttggcaagttgttgtttctatgcctgaacacggagaagaagaaaaggaacatttagacctccctcactcacttaggcgtcttggagagtgtacattttatgatgatggcactgctaagggagagttgcctgaaacagtttattgctttgatggtgtcttctataattacttcagcataggaatggatgctcaagtggcttatgggtttcaccaattacgtgatgaaaagccatttcttgcaagtggacctttatccaataagggttcttactcatttttcacttaa

SEQ ID NO: 216144 - DNA, 4198 bp, Zea Mays
cataggaatcccagcgtttttttttctccctatgcaaatgtttagaaacctgaacattttgtccccacgcctatgcctatgtttagaaacctgaaacagcccagcccatgctgcacgaaccacagcgggggaggaagcaatagctcaaaaccgtccaacctctctcccgctctttcttgatcgattcgctctatcaccgtcgctcttccttgaccgatccgttcatcaccgccgccggccgggaccctcgcatcgcatgcatgaccaagtcggcggcgaggagcgcgtcgacggtgtcggaggcggcggccgccgccgcggcgatgtcgctcccgtccatgacgaaaccggggaggaacagcactacgtccgtggaggcggcgacggagagcgcgctgcgggttacgccgatgaagctgctggtgcgcgtggtggaggcgcgtggcctccccgccgtgcacctcaacggctccagcgaccccttcgtgaagctcaagctgggcaagcggcgcgccaagacggccgtggtgaagcgcagcctgtcgcccgcctgggacgaggagttcagcttcctcgtgggcaacgtcgccgaggagctggtcgtgtccgtgctcaacgaggacaagtactttagcaacgacctgctgggtcaggtccgcctgccgctgtcccaggtcatggagaccgacgacctctccctcggcacccagtggtaccagctccagcccaagagcaaaaagtccaagaagaaatgccgcggagaagtttgtctgcacgtatcgttgtccacaagaacccacgtatccgaagaatcacagagcgttccccatcctgcatcagacgacctggcgtccagttcagacagcaccatcgagcacaaaacgctgtcgacaacatatagctgcatcgacctatcagccgtccccagcatcgaacgagcgtctcgcagcagcttcgagcgattcccttccagcattctggagcagccagaccggagcagcgtggaggacttagcagcccctgaccctggtggaccagcagcagccgcagacaccgacgcgatgccaaccccgtcgtcagtggtggaggtcctgtcccgctacttcttcaggaaacccgagaacgccaccgtgcagcaggtgcagcattctgtcgcatcggacaccaccgaccatccagtcgtcgaccgtcagctgcaagagccaaacgcgagctcatcagaagaccgtgagatccccgagagagtcacggtacctgagccaagcctcgacgagctgctcaaagtcatggagtcaaaagaccaaggcagcgaaatgccggccgccttgcctggtggcacgctggtcgacgagtcctacgtcgccgctcccaccgagctcaactctctcctgttctcggcgagctcagacttctggccagcagtggcggagctccaaggaacgagcgggttccagatcgagccgtggaagctcgacagcagcgagagcttcgtgcagaggacactgagctacacgaaggccgcaagcaagctggtgaaggccgtgaaagccacggaagagcagaagtacctgaaagcggccgggaactcgtacgcggtgttctccgtcgtcagcactcccgacgtcccctgcgggaactgcttcaaggtggagatactgtactgcgtcacgccgggtccccagctcccgtccgaagagcagacgtgccacctcaccgtgagctggagggtgaacttcgtccagagcacgatgatcaaagggatgatcgagagtggcgccaagcaaggcatggccgaaggtttcgcccagttctccgaggtgctgtcccagaagctcaagacggccgagcttgacgacgccaactccaacaaggagaagattctggcttcgctgcacgcgcagaaggaatcgtgctggcggctggtcgtccgcttcctcgggaacttcacgttcattttctccgtcgccatagcgctctacgtcatagcgcaccttcatctgtccaagcccgacgtgatgcacgggctcgagtattttggcctcgaccttccggactccatcggggaggttgtggtctgcgcggttttgatccttcagggacagaacatcgtcaaggtaacacggcgcttcttgagtgcgtggaaacagagaggcagtgatcatggggtcaaagctcacggggacggttggctgttgaccgtagcgcttatagaaggcactggcatcatagctactggctcatctgacctctttgatatctacgttgttttcacatgcaatgccaagaggaaaacgagctcgattaagtttcagacgtccgatccaaaatggaacgagatattcgagtttgatgccatggacgatcctccgtcaaggatggacgttgcgatctatgactcgagcggacagtgcgtcattggccacacagaagtcaactttctgaagaacaatctgtcagaactgactgacatatggcttcctgtcagtgggaagtgtgaccaagcgagcaaccctaggctgcacttgagaatattcttgaacaactcgaggggcaccgaagtcgtcatgaactacctagcaaagatggggaaagaagtcggcaagaagataaatttgcggtcagcccaaacaaacgttgcattccggaagctgttcgccctccctctggaagagttcctcatcgacgatttcacctgccatctcaaacggaagatgccgcttcagggccgcctctttttctccccgagaatagttgggttttattccaacatatttgggcacaagaccaagttcttctttctgtgggaggacgtcgacgacatccaggtcatccctgctacactgtccatcggtagcccgtctctgatgatcatccttcggaaggatagagggttggaggcaaagcatggtgccaagggaacagatcatcatggaaggctcaagtttgttttccaatctttcgtttccttcaacgatgcttacaggataatcacagcaatctggaaaatccgagcgctcagccccgaacagaagggggaggcgactgaaaaagacgaagtgaaagaactgctgcctgaagaagccggaaccttgttcactaacgcggacgttaaaatgtctgaaatattctcatcagttctttctgttgatgtcgagtccttgatggagatgttttcaggaggccccctggagcacaagatgatgcagaaggccggctgcatagactacactgccacgcagtgggagctcgtagggtgcaacatacagcagcggcagacgagctacaagctcgacaagaacctatctcggcacggaggagaagcggccaccaccgagcagaagtacagcttggtgaaccaggatggctgggccatcgagaaggtgatgaccctccaaggtgttctgctcgcagaccacttcaatctccagatgaagtactgtatcacgaacgtaccttcgaagccaaacacctgtagtgtgctggttttgctggggattgcctggttaaagagcaccaagcagcagaagaaggtcaccaagagcattatttccaatacctcgaatggattgaaggaactgtttgctgaagtcgagaaggagctcacatcaagcagcagtagccatcctaatgtagcagctggtcccactactgcttaaatgttatcagtatcacatacaaacaattattacaggattcacatcaaagcaattcaggtacaaggctaacatcagtacaacaccaaaagatagattgggcattgcatgaatcacatgcgtatgaagaagccagaagagtggatagctgtttgtgatctcttcctgttctcttctgttcacggtgtcacctgcttcagcgctcttgcactgccggtagaaagtcttacagagatgagagctaaaagggtttcaaagtaaacaggttgtttcagaaacgcttcacagaaagtggcgcgcagagtagtgtatgtgcagctgacatgtatgtatagttaaaaggaacctaactttcgctcataaatgtaaaatagaaaaaaagcgggggaactatatatgcaagatcaaattcaggatatgctttgcccgttctttctgtcaatttcctcgatgcatgagtatgtacagataagcaggaaatgttggtttaggagaataatgcactagcttttgaaggaacatgtcgcgatggacttgacaaagaa

SEQ ID NO: 216145 - DNA, 3543 bp, Zea Mays
cctgcctcctccgaccaccgcattgcgttcgaaatattgaaaacaccacaattccccgtattccgaaactcgggggagggtccccaaattttcagccccgcgtcggcgcgttgcctccgcctccgccttccacccgcagccccgcatatctccaaatccccaaccccctgctcgcggccccgaactcccccactgagcttgcttaaaatcccgacgcggcgctcgcggaggaggcggaaccctaaggcctggatccctccccgtccccgcgcccgaattgcacgcccgattccaggttctagtgtttcccatgccctagccaccagcgcccgtggtgccggtgccatgcccgcgtcccgcatccctttcaagcgctgcaccgccgccgtcccgggcgtggggaagcccggccccgctgccagcatgccgcccgccaagcgccgccgcgaccgcgtcgtcccgtcgcggtccagggactcgatgccgccgcccgcgccgcacgtggaggaaggtgacaacaggcacggggaggtgtacaacgtagagttgctcatggccgagcccaaagtcgactcatttggtcccgtggagaccgcgttgtggacgcaagcgcggacggcgcccacggatgccgacctgtaccgagcgtgtcgtaacataaacaagaggggcagctgtgggggagctgccagcggtagtgtgctcacgtctgtgagcaatgccgcctcggacgcttgtgctggtggcaatggcaccattgtccgagtgagcaatgctgccttggaaggtggtgctggtagcaatggtggtctggaggggagacctgcggtggtggagtgcaagcccaagagggagggcagcgacaagaaagaggatttctactggccggaggattttgtgcttggggatgtcgtgtgggcgaggtccggcaagaaatccccaatgtggcctgcactggtgattgaccccctgcagcatgcgccggaagtcgtgctcaactcctgtgttcctggcgctctctgcgtcatgttcttcggttattccgctaatgggcatggcagggactatggatgggttaagcaaggaatgatctttccctttgtggactacctagacaggtttcaaggacagcctctgtataagctcagaccaaccaaattccgtgcagcaatcgaggaggctttcctagctgaacgtggtttttttgatctcgacatggatggggcatgctcaccgcgaaagtttgtagataagcagtctgatcctaatggctttcaggaagaggccgcttcaaataacgagcaggagtgccaatctgagtctcaggttgttggcaaatcggcactgtgttgtgatagctgtggtaatcgcctaccatccaaggtttcaaagaaaaggaagcaagggggtgagcaggtgctttgtaggcactgtgaaaagttattgcagtcgaaacaatactgtggcatatgcaagaaaatttggcaccacacagatggtgggaactgggatttggaaaatgcagattatttttgtccggattgcaaatcaaaatgcaaaacagttccagcaactgaaaaaatgaatacttcccacagttcagaatgtgctagcacttcaaagggaaaatcaaccccaatgatagctgttttctgcaacggcgaggaggcattgtatgtacctgagaagcacatgatactatgtcaatgtaaggcttgcaaggaaaggatgatgagtctgaatgagtgggagaagcatactggctcaaggaaaaagaattggaagatgagtattagacagaagagcacaggggagccactcattaatttgctggatgatattccttgtgggacatcgaagtcttctaagccaggcattaagaaaggagagctgctacaattgcaagctaatgcttacagtcctgtctgtgctaaatggacaacggaacgctgtgctgtttgtcgatgggttgaggattgggactacaacaaaattataatttgcaacaggtgccaaatagctgttcaccaagagtgctatggagcacgagctgtacaagatcttacaatatggctttgtcgagcatgtgaattctcccaacagaaaagagaatgctgcctatgtcctgtcaaagggggtgctctcaagccaacagatgttgatggactgtgggttcatgttacatgtgcctggtttcagcctaaagtctcttttccggttgaggagaccatggagccagctatgggaataatgagcatccctgcagagtactttaagaagacttgcgtcatatgcaagcaaatgcatggtgcctgcacacaatgctacaagtgctctacgtattatcatgcaatgtgtgcatcaagagctggatatcgcatggagttgcaacactatgaacgaagtggcaggcacattacaaaaatggtttcctactgtgattttcacagtactcctgacccagacaatgtgttgatagtgaagacacctgaaggtgttttctctacgaaattttttgtccaaaatggtgagaaacagacagctgcaagactcgccaggaaggaaaattaccaggagaaagtgcttcctcctatagtttctgactgtctagtcgcaaagtgcctgacctatgaaatgttgaaatacaagaaagaaccaggagaggctattgcccaccggattatgggacctcgacaccactcccaggattttattgatggccttaacgcatacatgggtcataaggacgaccaatccttttcaacgtttaaagagcgacttgggtatttacagaaaactgaaaatttgagggtctcttgtggtcgatctggaattcatggatgggggctctttgctgcaaggaatattcaggaggggcaaatggttattgagtatcgtggtgaacaagttagacagcgtgttgctgatttgagggaagcacggtaccatagagaaaaaaaggattgctatttgttcaagataagtgaagatgttgtcatcgatgctaccggcaaaggaaacatagcgcgcctgattaatcactcgtgtatgccaagctgctatgctaggatcgtgaccgtcagtggtgacaggagccagatcattcttattgcgaagagagacgtctctgccggagaagagctgacgtataactacctgtttgaccctgacgagtccgaagactgcaaggttccatgcctgtgcaaagctcctaactgccgtggatacatgaactagggtgctgctagaagagtaaaaaccaatctaacaaacaaggactgaggctaactccttacagaagccaaaagccggccatttttttttcctggaattctttcggtagtttctcgttttcttatattactcaccagaagcttacaattcgtgggctgcacaaggtttggaccattttgttcagaaattgcgatttagggcagccgtaggcagtcatccatttgtatattcttccattgctgtgataagatggtaagaatgctcaaatttttttttggttaaatgaaaataagaaaaactcagtttgat

SEQ ID NO: 216146 - DNA, 3622 bp, Zea Mays
cctgcctcctccgaccaccgcattgcgttcgaaatattgaaaacaccacaattccccgtattccgaaactcgggggagggtccccaaattttcagccccgcgtcggcgcgttgcctccgcctccgccttccacccgcagccccgcatatctccaaatccccaaccccctgctcgcggccccgaactcccccactgagcttgcttaaaatcccgacgcggcgctcgcggaggaggcggaaccctaaggcctggatccctccccgtccccgcgcccgaattgcacgcccgattccaggttctagtgtttcccatgccctagccaccagcgcccgtggtgccggtgccatgcccgcgtcccgcatccctttcaagcgctgcaccgccgccgtcccgggcgtggggaagcccggccccgctgccagcatgccgcccgccaagcgccgccgcgaccgcgtcgtcccgtcgcggtccagggactcgatgccgccgcccgcgccgcacgtggaggaaggtgacaacaggcacggggaggtgtacaacgtagagttgctcatggccgagcccaaagtcgactcatttggtcccgtggagaccgcgttgtggacgcaagcgcggacggcgcccacggatgccgacctgtaccgagcgtgtcgtaacataaacaagaggggcagctgtgggggagctgccagcggtagtgtgctcacgtctgtgagcaatgccgcctcggacgcttgtgctggtggcaatggcaccattgtccgagtgagcaatgctgccttggaaggtggtgctggtagcaatggtggtctggaggggagacctgcggtggtggagtgcaagcccaagagggagggcagcgacaagaaagaggatttctactggccggaggattttgtgcttggggatgtcgtgtgggcgaggtccggcaagaaatccccaatgtggcctgcactggtgattgaccccctgcagcatgcgccggaagtcgtgctcaactcctgtgttcctggcgctctctgcgtcatgttcttcggttattccgctaatgggcatggcagggactatggatgggttaagcaaggaatgatctttccctttgtggactacctagacaggtttcaaggacagcctctgtataagctcagaccaaccaaattccgtgcagcaatcgaggaggctttcctagctgaacgtggtttttttgatctcgacatggatggggcatgctcaccgcgaaagtttgtagataagcagtctgatcctaatggctttcaggaagaggccgcttcaaataacgagcaggagtgccaatctgagtctcaggttgttggcaaatcggcactgtgttgtgatagctgtggtaatcgcctaccatccaaggtttcaaagaaaaggaagcaagggggtgagcaggtgctttgtaggcactgtgaaaagcattactctgcagttattgcagtcgaaacaatactgtggcatatgcaagaaaatttggcaccacacagatggtgggaactgggtttgttgtgatgagtgccagatttgggttcacgtagaatgtgacctgacatgcaacaacatggaggatttggaaaatgcagattatttttgtccggattgcaaatcaaaatgcaaaacagttccagcaactgaaaaaatgaatacttcccacagttcagaatgtgctagcacttcaaagggaaaatcaaccccaatgatagctgttttctgcaacggcgaggaggcattgtatgtacctgagaagcacatgatactatgtcaatgtaaggcttgcaaggaaaggatgatgagtctgaatgagtgggagaagcatactggctcaaggaaaaagaattggaagatgagtattagacagaagagcacaggggagccactcattaatttgctggatgatattccttgtgggacatcgaagtcttctaagccaggcattaagaaaggagagctgctacaattgcaagctaatgcttacagtcctgtctgtgctaaatggacaacggaacgctgtgctgtttgtcgatgggttgaggattgggactacaacaaaattataatttgcaacaggtgccaaatagctgttcaccaagagtgctatggagcacgagctgtacaagatcttacaatatggctttgtcgagcatgtgaattctcccaacagaaaagagaatgctgcctatgtcctgtcaaagggggtgctctcaagccaacagatgttgatggactgtgggttcatgttacatgtgcctggtttcagcctaaagtctcttttccggttgaggagaccatggagccagctatgggaataatgagcatccctgcagagtactttaagaagacttgcgtcatatgcaagcaaatgcatggtgcctgcacacaatgctacaagtgctctacgtattatcatgcaatgtgtgcatcaagagctggatatcgcatggagttgcaacactatgaacgaagtggcaggcacattacaaaaatggtttcctactgtgattttcacagtactcctgacccagacaatgtgttgatagtgaagacacctgaaggtgttttctctacgaaattttttgtccaaaatggtgagaaacagacagctgcaagactcgccaggaaggaaaattaccaggagaaagtgcttcctcctatagtttctgactgtctagtcgcaaagtgcctgacctatgaaatgttgaaatacaagaaagaaccaggagaggctattgcccaccggattatgggacctcgacaccactcccaggattttattgatggccttaacgcatacatgggtcataaggacgaccaatccttttcaacgtttaaagagcgacttgggtatttacagaaaactgaaaatttgagggtctcttgtggtcgatctggaattcatggatgggggctctttgctgcaaggaatattcaggaggggcaaatggttattgagtatcgtggtgaacaagttagacagcgtgttgctgatttgagggaagcacggtaccatagagaaaaaaaggattgctatttgttcaagataagtgaagatgttgtcatcgatgctaccggcaaaggaaacatagcgcgcctgattaatcactcgtgtatgccaagctgctatgctaggatcgtgaccgtcagtggtgacaggagccagatcattcttattgcgaagagagacgtctctgccggagaagagctgacgtataactacctgtttgaccctgacgagtccgaagactgcaaggttccatgcctgtgcaaagctcctaactgccgtggatacatgaactagggtgctgctagaagagtaaaaaccaatctaacaaacaaggactgaggctaactccttacagaagccaaaagccggccatttttttttcctggaattctttcggtagtttctcgttttcttatattactcaccagaagcttacaattcgtgggctgcacaaggtttggaccattttgttcagaaattgcgatttagggcagccgtaggcagtcatccatttgtatattcttccattgctgtgataagatggtaagaatgctcaaatttttttttggttaaatgaaaataagaaaaactcagtttgat

SEQ ID NO: 216147 - DNA, 1085 bp, Zea Mays
atggctgagaactacgcgtccacgctgtcggagaggccgtcaagaacgacatccttgagcaaacggtctccggcctcgagaagctggagaagcctcgcctctttcacccctgccccgcagtcgccgtgtagtgagaggtttagcaaattacatgataaatcagtaactacagtaaaagttattcaggattctagacctatacatgacaaacttgttgattctttcttgaacaaatttttcccatcaggttatccatacagtgtgaatgaaggttacttaacttataccaaattccgtgtgctacagcatttctcgagtgctatgctacatgtgctatcaacacagtccttgctgtttgctgtaggtttgcgacctaccccgacgcaagcaactgctgtaagttgggtaagcatatgatgacagagatgctaaagtccaagcagattctaaaagatggaatgcagcacacaagaaagctcatttgtagcagcatgggtgcaagaatggattctgaaccaaagagttggaggatacttgctgatgttctctacgatctcggtactgcattggaagttgtttcgccgctgtgcccacaacttttccttgaagtagcaggcttgggaaattttgcgaagggaatggtcgttgttgcagcaagagcaacgaggcttccaatttactcttcttttgccaaagaaggcaatcttagtgatttatttgctaaaggggaagccatatcaacacttttcaatgtcatgggaattggagctggaattggattggcatctactgtttgttcaacaactcaagggaaggaggtaccattgctggagaaatataaatgtcgctcggttaatgagtttgttgatgcctgcaagaaggcaactggggtcaacatcaaaattgagtacctcaacagaaggccaggagattatgcagaagtatacagcgacccaagaaagatcaacaaggagctcaactggacagctcaatataccgatctcaaagagagccaatcagtcgcatggaggtggcaaaagtcgcatccgcggggctacgaggccaaactaaatatagcctgctga

SEQ ID NO: 216148 - DNA, 3476 bp, Zea Mays
atccaatccggcttgcgagtttgcgacttctttctattctctctatcgccgctgcctctctctccctccttccttttcctggtcgcgacagcgccgcgctaatcgatcccttttgcccacgccgccgttgcctccaactccaaccagccgtcgggtgtgatccatggagaacggcggtggcgtcggtgaagggcgctcggagaatcgggcgggcgagaacggcggagtcgccgaggcagccactgcggcggatgagggagattgtgatgtggtggtggagggcggagatgaaggggacatgccgcccggtgcggtggcggcgggcgatcaccagccaatggtgacgccgaacaccagagcggtgctggaaacaggacagcttgcggcagacaagtgggacgaggacgatactccccgtttcattgacgtggaggaaagctttgccgatgatgtgaatcaagatcacgtcgctgcacaatctgggagcgagtatgaagatgtaaaagatggtactttggtgtatcaaagcaaagagcagccagggacgagcacggaagatattgcttcctcacatagcaggccagggacagtcacacattctgcagctgagcctgctgttgccattgaggaattggatgactcaagctcctcagctgatgagaataccgccacctctgctcctcctgcacaattctcaagcggtagttctacacctgcgcaatccagcagtgctgcttctgctcgttctactaatggtccctctttgccatctcgtcctgctggccttggatcatcgtcttccctgtcacagcctcctgctcgttctgttcaacaggtccatgccaacaggccagccattgtggaaaggggaacccagggggctactgaggatgatggagacgagaatgatgaaatccatgaaaagcttcaaatgatccgggttaagtttcttcgccttgctaacaggtttgggcaaacatatcataatatggtcgtttcacaggttctgtaccggcttgggctggcagaacaacttagaagaactacttctaatgggtcatttagcattgaccgtgcaagagacatggcagaacgccttgaagctgctggaaatgcgccccttgatttttcatgcaccatcttggttcttggtaaaactggggtcggtaagagtgctaccattaattcagtttttgatgataccaggttggatacaaacgcttttgattctagtactaggaaggttcaagaagtagttggtatggttgagggaatcaaagtgaaagtgattgatacacctggactttcctgctcatctttagaacaacaccgcaaccagaaggttctcaactctgtcaagagacttattagcaaaaaccctccagatattgttctttattttgataggttggatatgcagagcagggacaattgtgacgtccctctgctgcaaaccatcacaaaagtgtttggagcatcggtttggtttaatgccattgtcgtgttaactcatgctgcatctgcgccaccagatgggcagaatggaattcctctgagctatgagatgtttgtcacccagagatctcatgtagtgcaacaagctataaggcaagctgctggtgatgtacgccttatgaatccagtatccctcgtggaaaaccactcagcatgcaggacaaatagggctggccagagggtattgccaaatggacaagtctggaagccacagttactgctgctttgttttgcttcaaaggtgttagcagaagccaatgtgctccttaagttgcaggatagtcccattggtaaactttctcgtacaaggattcctccactgcctttcctcctctcttcccttcttcagtctcgtgccccactgaagttaccagaggagcaatttggtggtgatgatgatgatcttgaagatgatttggcagatgattctgattcagatgatggttcagattatgatgatttacctccatttaagcgtctcacaaaagctcagcttgccaagctgaacagggagcagaggaaggcctatcttgaggagctagattacagagagaagttgttctatcaaaaacagctgaaagaggaaagaaaacgtcgtaaattgatgaagaaaatggcagcagaagccagtgctcgtgcaaatgatttcagcaacagcaacctagaagatgatgctactactccaactaatgtttcagtgcctatgcctgacatggtactgccctcatcttttgattctgactaccctagccatcgctatcgtttcctggatacaccaagtgaatggcttgtcagacctgtattggaaacacagggctgggaccatgatgttggttacgagggacttaatgttgaaagattgtttgccgtaaaaggtaaagttcctctatcagtgtctggccagcttacaaaagacaagaaggattgctccctgcaaatggaggttgcaagttcaattaagcatgctgaaggtaagactacttcacttgggcttgatttgcagtctgtcggcagggatatggcatacacaatccgtggcgaatcgagatttaagaacttcaggcgcaacaatacatctgctgggatatctgctacgcttcttggggattcagtatcagctggtatgaagattgaggacaaactgatagtgaacaagcagcttagggtcctggttagcagcggggccatgagtgggaggggagacatggcctatggaggccgccttgaagcaacgatgagagacaaagattacccgattgggcggatgctttccactgttgcattatctgttgtggattggcacggggatctggcaattggctgcaacatccagtctcagatccccgctggaagagctagcaacttggttggccacgctaatctaagcaacaaggggactggccaagtcgggattcgcctcaacagctcggagcatcttgagatcgcactcgtggccctcgtgccgatattccagaacatcatgaagctgttacagaattactcggaatctggctagtccctcgtgccgatgttccagaacatcatgaagctgttacagaattactgagaatccggctagtactttttttttcatgtaagcctgagaaaacagagcatcataggttaaaatctagcttaagctagaactttacttccaattattattttgttcttttgttgccaactttgtaactatgctctcctctgggcttttttttttttaagttggagtagcattcttagggctagtttgggagctacaaaaccgaataggattggagtgactaaaatccccttattcaaatttaaataagaagtggattttagcccctctaatccattttggttttgtagctcctagactagaccttataatgtaagattccccctgagctctttctgatgaagctggattggagaattcatcgtgtcagatttctgggcatgctactgagtttttc

SEQ ID NO: 216149 - DNA, 2287 bp, Zea Mays
tgcaaagcaacgttatttctgcttcattcatgaagagagaccaaagtatcaagtggaacaacagaattttaggtactgccgtgccgctcaacaagggaagagcaagagctccagtctctgtctcacttattatgatcctctatgaaccataccctgcaacagatttcattccaaacggggcataatcattgaagaccagttaaggggggcagtgagaagggatggcggtggagttggccaagcaattgcttgcggttattggaagctatacaccacctctctgggctaccctcatcgccggggtttttgttatcatctccgtctcgctgtccctgtacttgctgttcaatcatctgtcagcctacaaaaacccagaggaacagaagtttcttgtcggcgtcattctcatggtgccgtgctatgcagtcgagtcgtacatatcactggtaaatccatcaataagtgttgatatcgaaatcatgcgagatggctatgaggcatttgctatgtactgttttgggcgctatctagttgcttgcttaggtggtgaagataggacaattgaatttttgaatagggaaggtggttcaggttctgctgcaccacttttaggacaagcatctgaacaacgatacgtaaaccatccttttccaatgaactacgtgcttaaaccgtggccgctaggcgaatggttctacttggtcatcaaatttgggctagttcagtatatgataataaaatcaatatgtgctattcttgcggtgattcttgaatcctttggagtgtattgtgaaggagagtttaagttgaactgtgggtactcttacacggccgtggttctcaatttcagtcagtcatgggccttatactgtctcgtccagttctacaccgtgataaaggatgagttagctcatataaagcctcttgcgaagtttctgacattcaagtccattgtgttcttaacatggtggcaaggtatagcaatcgcattgctcttcaactggggtttgttgagaggtcctatcgctcaagaactgcagttcaagtcaagtatccaagacttcattatctgcatagagatgggtgttgctgccgttgcccacctgtatgtcttccctgcgaagccgtacgagctgatcggtgatcgtcttgttggagatgtttctgttcttggagactacgcttctgtcgactgccctctagatccagacgaggtcaaggatagcgagcgcccaaccaagttcaggcttccccagccagatgatcatgtccggtgttccactgccataaaagaaagcgttcgcgatgtcgtacttggaggcggtgaatatatcgtgaatgacttgaagttcactgtgaaccacgcggtggaacccatcaatgagaagctgcacatgatatccgagaacataaaaaagcgcgagaagggaaagaagaaaacaaatgacgatagctgcatcggttcacccacatccttgaccagggtcatcagtgggattgatgatcccctcctgaacgggagcctgagtgacaacagtggcccaaagaaagcgcgaaggcagcacaggaaatcaggctatgcaggcgcggagagcggcggagagagcagcgaccatggcctaggtgggtttgagatccgagggaacagatggattactagctagggagtgacaactaagagcaacctgtggagatgctatacaaatgtcacaggagttagcctagccagtgggttcaagtgtaggatgaggtatctggcatgatgttgtagcatgggcaaatcgagatgagtgagcaatcaggttgttgtctgttgattcttttagctgagcgcctgagctgctgaggccttgatcctgtatttaagatgtcaggccttgattctttcagcaagcgttggaaggaaggaagcaatgtgcctgttctgagctcccgtcagcatcacttgtaaagttcttataagtacagactagaactagtcatgcatacaagagaatagacagtcgatgtttctatctgtttttgtttcattctaaggcccttgtcacacgagcaccagaattttttttctttccttttggtaccatgatggtgatggacgtgagagttccttgagatgatcaaagcatctatctttccaattccatgtgtatcctgataactgaagatgatcgtttggttttccttttggtacgcaacatgccaagtgcaggatgaactctgccctgcaagaaaaaccacaggcaagtttgtccgattaacaactatctgcacaggtcataaaaag

SEQ ID NO: 216150 - DNA, 2426 bp, Zea Mays
ccacgctccccatggttctcttccaaccccaattaatcctaggcaggcaaagctcgttttttcttgtgcgccggttgattgggctctctgtttgcggagtcttgctctccctctggtcggttttcgttgatccctcctgcattggtttgctccggctcagatccgattctctaggaagagagaccaaagtatcaagtggaacaacagaattttaggtactgccgtgccgctcaacaagggaagagcaagagctccagtctctgtctcacttattatgatcctctatgaaccataccctgcaacagatttcattccaaacggggcataatcattgaagaccagttaaggggggcagtgagaagggatggcggtggagttggccaagcaattgcttgcggttattggaagctatacaccacctctctgggctaccctcatcgccggggtttttgttatcatctccgtctcgctgtccctgtacttgctgttcaatcatctgtcagcctacaaaaacccagaggaacagaagtttcttgtcggcgtcattctcatggtgccgtgctatgcagtcgagtcgtacatatcactggtaaatccatcaataagtgttgatatcgaaatcatgcgagatggctatgaggcatttgctatgtactgttttgggcgctatctagttgcttgcttaggtggtgaagataggacaattgaatttttgaatagggaaggtggttcaggttctgctgcaccacttttaggacaagcatctgaacaacgatacgtaaaccatccttttccaatgaactacgtgcttaaaccgtggccgctaggcgaatggttctacttggtcatcaaatttgggctagttcaatgataataaaatcaatatgtgctattcttgcggtgattcttgaatcctttggagtgtattgtgaaggagagtttaagttgaactgtgggtactcttacacggccgtggttctcaatttcagtcagtcatgggccttatactgtctcgtccagttctacaccgtgataaaggatgagttagctcatataaagcctcttgcgaagtttctgacattcaagtccattgtgttcttaacatggtggcaaggtatagcaatcgcattgctcttcaactggggtttgttgagaggtcctatcgctcaagaactgcagttcaagtcaagtatccaagacttcattatctgcatagagatgggtgttgctgccgttgcccacctgtatgtcttccctgcgaagccgtacgagctgatcggtgatcgtcttgttggagatgtttctgttcttggagactacgcttctgtcgactgccctctagatccagacgaggtcaaggatagcgagcgcccaaccaagttcaggcttccccagccagatgatcatgtccggtgttccactgccataaaagaaagcgttcgcgatgtcgtacttggaggcggtgaatatatcgtgaatgacttgaagttcactgtgaaccacgcggtggaacccatcaatgagaagctgcacatgatatccgagaacataaaaaagcgcgagaagggaaagaagaaaacaaatgacgatagctgcatcggttcacccacatccttgaccagggtcatcagtgggattgatgatcccctcctgaacgggagcctgagtgacaacagtggcccaaagaaagcgcgaaggcagcacaggaaatcaggctatgcaggcgcggagagcggcggagagagcagcgaccatggcctaggtgggtttgagatccgagggaacagatggattactagctagggagtgacaactaagagcaacctgtggagatgctatacaaatgtcacaggagttagcctagccagtgggttcaagtgtaggatgaggtatctggcatgatgttgtagcatgggcaaatcgagatgagtgagcaatcaggttgttgtctgttgattcttttagctgagcgcctgagctgctgaggccttgatcctgtatttaagatgtcaggccttgattctttcagcaagcgttggaaggaaggaagcaatgtgcctgttctgagctcccgtcagcatcacttgtaaagttcttataagtacagactagaactagtcatgcatacaagagaatagacagtcgatgtttctatctgtttttgtttcattctaaggcccttgtcacacgagcaccagaattttttttctttccttttggtaccatgatggtgatggacgtgagagttccttgagatgatcaaagcatctatctttccaattccatgtgtatcctgataactgaagatgatcgtttggttttccttttggtacgcaacatgccaagtgcaggatgaactctgccctgcaagaaaaaccacaggcaagtttgtccgattaacaactatctgcacaggtcataaaaag

SEQ ID NO: 216151 - DNA, 2490 bp, Zea Mays
gtctccctgacaagtacgattccgccacctaatcctctgtatgtaaatgtaatcaagccccacgctccccatggttctcttccaaccccaattaatcctaggcaggcaaagctcgttttttcttgtgcgccggttgattgggctctctgtttgcggagtcttgctctccctctggtcggttttcgttgatccctcctgcattggtttgctccggctcagatccgattctctaggaagagagaccaaagtatcaagtggaacaacagaattttaggtactgccgtgccgctcaacaagggaagagcaagagctccagtctctgtctcacttattatgatcctctatgaaccataccctgcaacagatttcattccaaacggggcataatcattgaagaccagttaaggggggcagtgagaagggatggcggtggagttggccaagcaattgcttgcggttattggaagctatacaccacctctctgggctaccctcatcgccggggtttttgttatcatctccgtctcgctgtccctgtacttgctgttcaatcatctgtcagcctacaaaaacccagaggaacagaagtttcttgtcggcgtcattctcatggtgccgtgctatgcagtcgagtcggtaagtacatatcactggtaaatccatcaataagtgttgatatcgaaatcatgcgagatggctatgaggcatttgctatgtactgttttgggcgctatctagttgcttgcttaggtggtgaagataggacaattgaatttttgaatagggaaggtggttcaggttctgctgcaccacttttaggacaagcatctgaacaacgatacgtaaaccatccttttccaatgaactacgtgcttaaaccgtggccgctaggcgaatggttctacttggtcatcaaatttgggctagttcaatgataataaaatcaatatgtgctattcttgcggtgattcttgaatcctttggagtgtattgtgaaggagagtttaagttgaactgtgggtactcttacacggccgtggttctcaatttcagtcagtcatgggccttatactgtctcgtccagttctacaccgtgataaaggatgagttagctcatataaagcctcttgcgaagtttctgacattcaagtccattgtgttcttaacatggtggcaaggtatagcaatcgcattgctcttcaactggggtttgttgagaggtcctatcgctcaagaactgcagttcaagtcaagtatccaagacttcattatctgcatagagatgggtgttgctgccgttgcccacctgtatgtcttccctgcgaagccgtacgagctgatcggtgatcgtcttgttggagatgtttctgttcttggagactacgcttctgtcgactgccctctagatccagacgaggtcaaggatagcgagcgcccaaccaagttcaggcttccccagccagatgatcatgtccggtgttccactgccataaaagaaagcgttcgcgatgtcgtacttggaggcggtgaatatatcgtgaatgacttgaagttcactgtgaaccacgcggtggaacccatcaatgagaagctgcacatgatatccgagaacataaaaaagcgcgagaagggaaagaagaaaacaaatgacgatagctgcatcggttcacccacatccttgaccagggtcatcagtgggattgatgatcccctcctgaacgggagcctgagtgacaacagtggcccaaagaaagcgcgaaggcagcacaggaaatcaggctatgcaggcgcggagagcggcggagagagcagcgaccatggcctaggtgggtttgagatccgagggaacagatggattactagctagggagtgacaactaagagcaacctgtggagatgctatacaaatgtcacaggagttagcctagccagtgggttcaagtgtaggatgaggtatctggcatgatgttgtagcatgggcaaatcgagatgagtgagcaatcaggttgttgtctgttgattcttttagctgagcgcctgagctgctgaggccttgatcctgtatttaagatgtcaggccttgattctttcagcaagcgttggaaggaaggaagcaatgtgcctgttctgagctcccgtcagcatcacttgtaaagttcttataagtacagactagaactagtcatgcatacaagagaatagacagtcgatgtttctatctgtttttgtttcattctaaggcccttgtcacacgagcaccagaattttttttctttccttttggtaccatgatggtgatggacgtgagagttccttgagatgatcaaagcatctatctttccaattccatgtgtatcctgataactgaagatgatcgtttggttttccttttggtacgcaacatgccaagtgcaggatgaactctgccctgcaagaaaaaccacaggcaagtttgtccgattaacaactatctgcacaggtcataaaaag

SEQ ID NO: 216152 - DNA, 2415 bp, Zea Mays
ccgccgtccctgtctccctgacaagtacgattccgccacctaatcctctgtatgtaaatgtaatcaagccccacgctccccatggttctcttccaaccccaattaatcctaggcaggcaaagctcgttttttcttgtgcgccggttgattgggctctctgtttgcggagtcttgctctccctctggtcggttttcgttgatccctcctgcattggtttgctccggctcagatccgattctctaggaagagagaccaaagtatcaagtggaacaacagaattttagatttcattccaaacggggcataatcattgaagaccagttaaggggggcagtgagaagggatggcggtggagttggccaagcaattgcttgcggttattggaagctatacaccacctctctgggctaccctcatcgccggggtttttgttatcatctccgtctcgctgtccctgtacttgctgttcaatcatctgtcagcctacaaaaacccagaggaacagaagtttcttgtcggcgtcattctcatggtgccgtgctatgcagtcgagtcggtaagtacatatcactggtaaatccatcaataagtgttgatatcgaaatcatgcgagatggctatgaggcatttgctatgtactgttttgggcgctatctagttgcttgcttaggtggtgaagataggacaattgaatttttgaatagggaaggtggttcaggttctgctgcaccacttttaggacaagcatctgaacaacgatacgtaaaccatccttttccaatgaactacgtgcttaaaccgtggccgctaggcgaatggttctacttggtcatcaaatttgggctagttcagtatatgataataaaatcaatatgtgctattcttgcggtgattcttgaatcctttggagtgtattgtgaaggagagtttaagttgaactgtgggtactcttacacggccgtggttctcaatttcagtcagtcatgggccttatactgtctcgtccagttctacaccgtgataaaggatgagttagctcatataaagcctcttgcgaagtttctgacattcaagtccattgtgttcttaacatggtggcaaggtatagcaatcgcattgctcttcaactggggtttgttgagaggtcctatcgctcaagaactgcagttcaagtcaagtatccaagacttcattatctgcatagagatgggtgttgctgccgttgcccacctgtatgtcttccctgcgaagccgtacgagctgatcggtgatcgtcttgttggagatgtttctgttcttggagactacgcttctgtcgactgccctctagatccagacgaggtcaaggatagcgagcgcccaaccaagttcaggcttccccagccagatgatcatgtccggtgttccactgccataaaagaaagcgttcgcgatgtcgtacttggaggcggtgaatatatcgtgaatgacttgaagttcactgtgaaccacgcggtggaacccatcaatgagaagctgcacatgatatccgagaacataaaaaagcgcgagaagggaaagaagaaaacaaatgacgatagctgcatcggttcacccacatccttgaccagggtcatcagtgggattgatgatcccctcctgaacgggagcctgagtgacaacagtggcccaaagaaagcgcgaaggcagcacaggaaatcaggctatgcaggcgcggagagcggcggagagagcagcgaccatggcctaggtgggtttgagatccgagggaacagatggattactagctagggagtgacaactaagagcaacctgtggagatgctatacaaatgtcacaggagttagcctagccagtgggttcaagtgtaggatgaggtatctggcatgatgttgtagcatgggcaaatcgagatgagtgagcaatcaggttgttgtctgttgattcttttagctgagcgcctgagctgctgaggccttgatcctgtatttaagatgtcaggccttgattctttcagcaagcgttggaaggaaggaagcaatgtgcctgttctgagctcccgtcagcatcacttgtaaagttcttataagtacagactagaactagtcatgcatacaagagaatagacagtcgatgtttctatctgtttttgtttcattctaaggcccttgtcacacgagcaccagaattttttttctttccttttggtaccatgatggtgatggacgtgagagttccttgagatgatcaaagcatctatctttccaattccatgtgtatcctgataactgaagatgatcgtttggttttccttttggtacgcaacatgccaagtgcaggatgaactctgccctgcaagaaaaaccacaggcaagtttgtccgattaacaactatctgcacaggtcataaaaag

SEQ ID NO: 216153 - DNA, 2427 bp, Zea Mays
ggagaaacaatttctctccccgccgtccctgtctccctgacaagcaaagctcgttttttcttgtgcgccggttgattgggctctctgtttgcggagtcttgctctccctctggtcggttttcgttgatccctcctgcattggtttgctccggctcagatccgattctctaggaagagagaccaaagtatcaagtggaacaacagaattttaggtactgccgtgccgctcaacaagggaagagcaagagctccagtctctgtctcacttattatgatcctctatgaaccataccctgcaacagatttcattccaaacggggcataatcattgaagaccagttaaggggggcagtgagaagggatggcggtggagttggccaagcaattgcttgcggttattggaagctatacaccacctctctgggctaccctcatcgccggggtttttgttatcatctccgtctcgctgtccctgtacttgctgttcaatcatctgtcagcctacaaaaacccagaggaacagaagtttcttgtcggcgtcattctcatggtgccgtgctatgcagtcgagtcgtacatatcactggtaaatccatcaataagtgttgatatcgaaatcatgcgagatggctatgaggcatttgctatgtactgttttgggcgctatctagttgcttgcttaggtggtgaagataggacaattgaatttttgaatagggaaggtggttcaggttctgctgcaccacttttaggacaagcatctgaacaacgatacgtaaaccatccttttccaatgaactacgtgcttaaaccgtggccgctaggcgaatggttctacttggtcatcaaatttgggctagttcagtatatgataataaaatcaatatgtgctattcttgcggtgattcttgaatcctttggagtgtattgtgaaggagagtttaagttgaactgtgggtactcttacacggccgtggttctcaatttcagtcagtcatgggccttatactgtctcgtccagttctacaccgtgataaaggatgagttagctcatataaagcctcttgcgaagtttctgacattcaagtccattgtgttcttaacatggtggcaaggtatagcaatcgcattgctcttcaactggggtttgttgagaggtcctatcgctcaagaactgcagttcaagtcaagtatccaagacttcattatctgcatagagatgggtgttgctgccgttgcccacctgtatgtcttccctgcgaagccgtacgagctgatcggtgatcgtcttgttggagatgtttctgttcttggagactacgcttctgtcgactgccctctagatccagacgaggtcaaggatagcgagcgcccaaccaagttcaggcttccccagccagatgatcatgtccggtgttccactgccataaaagaaagcgttcgcgatgtcgtacttggaggcggtgaatatatcgtgaatgacttgaagttcactgtgaaccacgcggtggaacccatcaatgagaagctgcacatgatatccgagaacataaaaaagcgcgagaagggaaagaagaaaacaaatgacgatagctgcatcggttcacccacatccttgaccagggtcatcagtgggattgatgatcccctcctgaacgggagcctgagtgacaacagtggcccaaagaaagcgcgaaggcagcacaggaaatcaggctatgcaggcgcggagagcggcggagagagcagcgaccatggcctaggtgggtttgagatccgagggaacagatggattactagctagggagtgacaactaagagcaacctgtggagatgctatacaaatgtcacaggagttagcctagccagtgggttcaagtgtaggatgaggtatctggcatgatgttgtagcatgggcaaatcgagatgagtgagcaatcaggttgttgtctgttgattcttttagctgagcgcctgagctgctgaggccttgatcctgtatttaagatgtcaggccttgattctttcagcaagcgttggaaggaaggaagcaatgtgcctgttctgagctcccgtcagcatcacttgtaaagttcttataagtacagactagaactagtcatgcatacaagagaatagacagtcgatgtttctatctgtttttgtttcattctaaggcccttgtcacacgagcaccagaattttttttctttccttttggtaccatgatggtgatggacgtgagagttccttgagatgatcaaagcatctatctttccaattccatgtgtatcctgataactgaagatgatcgtttggttttccttttggtacgcaacatgccaagtgcaggatgaactctgccctgcaagaaaaaccacaggcaagtttgtccgattaacaactatctgcacaggtcataaaaag

SEQ ID NO: 216154 - DNA, 1553 bp, Zea Mays
ctgacaagtacgattccgccacctaatcctctgtatgtaaatgtaatcaagccccacgctccccatggttctcttccaaccccaattaatcctaggcaggcaaagctcgttttttcttgtgcgccggttgattgggctctctgtttgcggagtcttgctctccctctggtcggttttcgttgatccctcctgcattggtttgctccggctcagatccgattctctaggaagagagaccaaagtatcaagtggaacaacagaattttaggtactgccgtgccgctcaacaagggaagagcaagagctccagtctctgtctcacttattatgatcctctatgaaccataccctgcaacagatttcattccaaacggggcataatcattgaagaccagttaaggggggcagtgagaagggatggcggtggagttggccaagcaattgcttgcggttattggaagctatacaccacctctctgggctaccctcatcgccggggtttttgttatcatctccgtctcgctgtccctgtacttgctgttcaatcatctgtcagcctacaaaaacccagaggaacagaagtttcttgtcggcgtcattctcatggtgccgtgctatgcagtcgagtcgtacatatcactggtaaatccatcaataagtgttgatatcgaaatcatgcgagatggctatgaggcatttgctatgtactgttttgggcgctatctagttgcttgcttaggtggtgaagataggacaattgaatttttgaatagggaaggtggttcaggttctgctgcaccacttttaggacaagcatctgaacaacgatacgtaaaccatccttttccaatgaactacgtgcttaaaccgtggccgctaggcgaatggttctacttggtcatcaaatttgggctagttcagtatatgataataaaatcaatatgtgctattcttgcggtgattcttgaatcctttggagtgtattgtgaaggagagtttaagttgaactgtgggtactcttacacggccgtggttctcaatttcagtcagtcatgggccttatactgtctcgtccagttctacaccgtgataaaggatgagttagctcatataaagcctcttgcgaagtttctgacattcaagtccattgtgttcttaacatggtggcaaggtatagcaatcgcattgctcttcaactggggtttgttgagaggtcctatcgctcaagaactgcagttcaagtcaagtatccaagacttcattatctgcatagagatgggtgttgctgccgttgcccacctgtatgtcttccctgcgaagccgtacgagctgatcggtgatcgtcttgttggagatgtttctgttcttggagactacgcttctgtcgactgccctctagatccagacgaggtcaaggatagcgagcgcccaaccaagttcaggcttccccagccagatgatcatgtccggtgttccactgccataaaagaaagcgttcgcgatgtcgtacttggaggcggtgaatatctaaagtgaaatctcatctgtccaat

SEQ ID NO: 216155 - DNA, 3866 bp, Zea Mays
tttcaggcttcaaaatgggactctaacagggttcaggagagccgaaagccaatcatatcggccagagtttcaagaatcatgagcacatatatacatataaatgttaggggaagcatagctctaccaataaattacaagccgacaattgctcatacatctaacagtatgtctgtgcctgtgatggggcaatgtactgataaagacgacacatttgaggaatataacatgtacaggcagagcagtgaagttaagaactgcctggcaggctagagtcactagcaaacgtcgcttccattgaagtgatgaaattagcaggagggatactataatcggtggttaagtcactggaccacattatcttggctcgcagagccccagtccaattcagagaaacctgcgatttatcacaatcgcaggatttaacatcacaatcgcagaaatcgttggtttggcaccccatggtcagccttgtggagtggataattggcaaagccaatattcagcactagaaccagcttatctgaactcttcagggacgtgcatgccaaaaccacgcttcaacttctcaatcctattcaataacaagtaggtgaccatattgtaataaccaaacctagaaaagcatgaatgcgccggaagttaaatagtaagatgcatgccctcagaaaaatgatggcacaaccgcttcatggtcctgggctggtcacagctacatggcgcacagatgctagaccaatagactaatagagatagaaagatattggctttgaagaacaggccacttgcgtgaaaattggcaaagtagggcagatgcacatctacagttgatttgatatttcacttgttgtgtcgactttggtaatttgtaaattcgatatttcacatctacattggttgttttttgaggaaggggggggggcatggtttaaatatgaatcagcatgccctttgtggtccaacaattctaacctgcaaagaattgttttaagggcggtcgaagactggaaggataggttaagtggattgtttttctagcgatgttgaaatggagattgaagtattgaacatggaagcttatggaagggtaacattgggagcttgttactagatctgacaattctaggttagagtgcaacaccaaaattagaacataatttttgaaacagcatgcataaaatgtaaagaaacttacgtaggagcaagttttccaagactgcgcagttttttcccagttgcttcatcgattacattgcctgacatctcaatagaatatgacatgccagatgtccgtggtagtcctcttcctacaagtaaatctaaatctctttgatgcagttctctgccattgacaaaaacacctgtatccccaccggcacaatttttggccatcggataattaaattctctaataaatggctggacaatgccaatacattcccgtcccatgacaccccaaaaaccagcatgaaacacttaccaatatgtacctgggtcaacaggaccagctttcttctctgccttcttaagggctttttcagagattggatgaccattaattgaaaccttaacattgtccatggacttatttaataaagaaaggtccttaaaacccttcttcagaaaaccagcaaaaaatgatgaatccccactcttaccggtagaggactgatcttcatccaacccagcctctgatgaaccacgagaaaacccagaatttgtccgctcattaactgatgaaccactccctgtttgagaattggcatcttcaataaatggctgctgcaatttctcattatcttcttcgattttcagcccatcatgtctctcacttatgcttccagtttccatgacatctgcattattttcatcacagttttttctaatgctctcagctccaagaacataattttcatctctttttacctttgactcatatttattgcatgtgtcctcgcctccggggctgctatcttcatctttaatattcatacactggtacttttcacttccatttactagactactagtgtcatcttctccactattctgctcatatgttttgctactatcttcaatgttgcatgagttatcttccttgctcttctgttcataacttctgcatgagatttcatcttcagtggcatctttgtcatcttcattgctctcctgtttgcttcttgtactaatgcccccatcatactgatcattaacatcatattctcctttgcaagttaggtctgatttgtaagccatggccatgccttgatcatcctcgtcgttacatttttcttgggcacacaatgggtcaacaagtttgtcctctaaagctggagaccgtgggctaactggaccacctacagaaggctccaccttgcagtctgtgtccctctcgcacaatatatcctttgggcttccattgtctacagacctacttggagagaaagggagatcctcagcttttgactgaatgcttctagttgaaccacaatctttgccaatcctgtcattactcatggtcgaagaaagtgaattatcatcagtggaatccatgttgttttgcatgttgctatgatcatttgaattgtagaacatagaattaaaatcctcatgatgttgatggacagtatctcgcctcatctggtcacttgagctttgctctgtttcaggcgcatataaggataatgacggtgcaaagggaataccattttcttcatcatgcttcagactaactatctgacaacaagacccgcattgaaatcggttctgcttccgccctatgcatttttctgtaggcatctgcagtagtttataacatgaactgcacacagagaaaggtgcagcaccatccactggacggcagatatgttccgccttcttcctgaagtactctgctctcctcttcgatacagaccggtgcgagtaaagtgatgacgccacagacctccgatcataatcggatgaaacagatggtgacctctcgaaccggtacgattcatgctgcctggcgaagtacctcgccatcgggatgttctcctcttgcggcgaagtcctctgcccatgcagacagtgtggacaggcacacccgtagtgatggaagctcccaggccccatcccaccgttctcccactgcctcccagggtactggcggtagtgcccgctagactgcctcacatacctttccccatgttcagggcgcggcggtgcgtatgggcctggaggcggcaagcccggcccaaaccgcccgccatggcgggagcggtggtaccccggcagaggcggtggctcctccagatgctcggcggggagcatggagaccgcgcggcggctggccctgcggggctcccgccgctgggcgacgacgttgcaggagcgcgcgatctggtccctcagctcgtccagcttgcgcagcagctcgacggggtcctgctgcagcgcggcccagcccgcgccgcccctccggtcgctgcattgcggccgctcctccgccccgatcctccgcctgtacttcatctccttgagatcactccccatggcgggggcggcgaggccgctccgcgctcccgctttctcccaccggatcggcaagcactggcgttatccttgagacggagctcgctgcggcgcgggggcgtggcggcggctccggttctccattagggtttcgtcccgcagctcgaggagtacgccatgagagagagagagagagagagagagagagagagagagagagagagagcagagtaggagtagagagtaaactctgggagcggcggcagtgtctgcgttgccacggacacgacgagggagccaagtgaaagaacatttttatatagctgcgggtgaatcctcagggaccttggttcggg

SEQ ID NO: 216156 - DNA, 1093 bp, Zea Mays
tccgtggcaacgcagacactgccgccgctcccagagtttactctctactcctactctgctctctctctctctctctctctctctctctctctctctctctctctcatggcgtactcctcgagctgcgggacgaaaccctaatggagaaccggagccgccgccacgcccccgcgccgcagcgagctccgtctcaaggtacgactaccatgctggtttttggggtgtcatgggacgggaatgtattggcattgtccctccatttattagagaatttaattatccgatggccaaaaattgtgccggtggggatacaggtgtttttgtcaatggcagagaactgcatcaaagagatttagatttacttgtaggaagaggactaccacggacatctggcatgtcatattctattgagatgtcaggcaatgtaatcgatgaagcaactgggaaaaaactgcgcagtcttggaaaacttgctcctacgattgagaagttgaagcgtggttttggcatgcacgtccctgaagagttcagataagctggttctagtgctgaatattggctttgccaattatccactccacaaggctgaccatggggtgccaaaccaacgatttctgcgattgtgatgttaaatcctgcgattgtgataaatcgcaggtttctctgaattggactggggctctgcgagccaagataatgtggtccagtgacttaaccaccgattatagtatccctcctgctaatttcatcacttcaatggaagcgacgtttgctagtgactctagcctgccaggcagttcttaacttcactgctctgcctgtacatgttatattcctcaaatgtgtcgtctttatcagtacattgccccatcacaggcacagacatactgttagatgtatgagcaattgtcggcttgtaatttattggtagagctatgcttcccctaacatttatatgtatatatgtgctcatgattcttgaaactctggccgatatgattggctttcggctctcctgaaccctgttagagtcccattttgaagcctgaaacgcccctggccaccatactgtattgtgtatccaagcctgatg

SEQ ID NO: 216157 - DNA, 487 bp, Zea Mays
tggtgaagtcatcttgctgaagcaaagtgctagcataccttctgatatcgtcgtcgtcgtccgcaaccgctcgagtgagcgacctgatcgacaactgggggagcgaccctttcccgacgatggcgaacggctccatcgccatatccttcatggcgttcgcggtgttcggcatctgctccctcatctccgcgtacaacctgttccgccgagacatgtagccgccagccgctctcgtcaacctcttgttgcccttccattgtatttgtggacacgagttttcggcgcggacttcacattgtgctgtacgtgtgtgtatatgtgtgtgtgtgatgggaactctgaactgctagcaaataatatatctctacacggtgaagggcagctcacttgtatggtgaaccgaatgtgggaaaaagaagttctagtggctctgaatcgaagtagttttgctgcatggcatcaagaccaaaggtaatcgattggtggc

SEQ ID NO: 216158 - DNA, 2853 bp, Zea Mays
tctcttcattgttaattaatatatacccatattttttggacagctttacccctcttatttctcttcccatttcactttccccttcctctacccactctctcgatctctagcgccgcttcgtcgttcgttgatactcttcactccgtcgttcgttgacaatacctttgtgggcttggtgcgtggacttccactggatcccaatcagcttatcacctcacctttggtgcggactaaatcgtttccacttaagcatgcgacggaagtaatcttatcaatttatcatgtaattcaatacattccatacatagttcaaatctagtattccctcataattctatatctagatctatttagatctaagttaaactgctttcttcaatctagctgtactgtgctgatgtttccttgtggccttgtgtttcatcatcgacttttaaatctcatctttcctcttccttccttttttgcactgattatgcagtatgcaggccgcacacttttcttttcttttcttacagaagtcgtgctatgtgtactgataattttgtaaaatatgtaccatctgctatgaatgttttttcttcagcttttatgattcagtagttggcagaggttattcactgcgttttttcttcatcatggcatccttgtaattgttaaatgctcatatatctcctagttgatttgtttctttattactagattcatcacttggtagtttcttaggtacaacagtctgatgttacatgagatatatcagtagttctatttctaatgctatgcctttcaaattcatgaacttgcttgtcattggtgcttcgaaatatccttctttgtgcttccttgacctcatgtctgtcgtatgtacactttttttgtaccactatggtttgtgcgattcagcagattcttgttttgtcttgtatagttatttcttcagcctagtatgctctctttatatgttttcaacttattgcagattcatttttagacataaaaacctagtacaaattatgatgtttacagaacactggacatggacttcttcacggaatatggggaggcgagtcagtatcaaatccaagaggtcattggtaagggaagttatggagtagttgctgctgcaattgatagtcacactggggagcgggttgcgatcaagaagataaatgatatttttggtaatgtctcggatgctgctcgcattttgcgggaaatcaagcttcttcgtctgcttcgtcacccaaacatagtccagattaagcacattatgttgccccctacccgaagggagttcaaagatatctatgttgtttttgagctcatggagtctgacctgcatcaagtgatcaaagcaaatgataacctgactccagagcatcaccgctttttcctgtatcaacttattcgtgctctcaagtacatgcattcagcccatgtatttcatcgtgatttaaagcccaggaacatactggccaattcagacagcaaactaaagatctgcgactttggacttgcacgtgcatcatttaacgactctctttcagctatctattggacagattatgtcgcaacaaggtggtaccgggctcctgaattatgtggctcctttttctccagttacacccctgcaattgatatttggagtatagggtgcatttttgctgaagttctcaccggaacgccattgtttcctgggaggaatgttgtgcaccaattagacttaataacagatctccttggaacaccatcgtttagatccttatcccagattcacagtgataaggccagggaatatttgcttggcatgccgaggaagcgccctattccattttctcataagttccgtaatgccgatcctctggctctccggttgctagagcgtttacttgcatttgacccgaaagatcgacctactgctgaagaggctttagctgatccatacttcagtggcctttctaaattggaacttgagccttcagcacaaccaatttcgaaggttgactttgaattcgagggaaggaaactaacaaaggctggtgtgagagaaatgatatatcgggagattttggagtaccatccccagatgcttcaggagtacatcgaaggtggagatcagattcacttcctatacccaagtggggtcgatcgcttccagcgacagtttgctcatctcgaggagaactacaggagaggagtagctagcaccccgccgcgaaggcagcccacatctctgccgagggagcgagtctgctcatcagaagatggccacagtcaggactctgacagcgaagagcagagagcagcatcctacgttgcccgaacaaccataagccctccaagatcacaagaggagggcggcaagctccagcctgcctaccagagcgccgccgccgccgcagactcctgcgccaagagctatctgaagggtgccgctagtatcagtggtgcttccaggcgtggcatcaagggggataatggccgaaaggagaaggaatctccgaggctgtgaaagaggtggcgcaggctcgtcacctgttaggcaaaagaggtagcaatggcgccaatgcgactgcaacgtgggatgtcttagtcatcatgcatccaacaacgcaggggggcagtacaagtatgcaggtcatcctagctaggtcgcccaaattaaagcagcctgcttggaggaattagatttgtgtactgttgttaagttttttttttttttttttttgaattcaactgctagattctggcagatctgtcaaccgcactctccttggtttcccaaaatttactggtttgaacaagtttattactgaatctcgctgtggtgcttcgtctagcattggactggac

SEQ ID NO: 216159 - DNA, 3311 bp, Zea Mays
atgtctattgcctaccccttatgctcaaaatgtgctcttctgtgctgtggggtgttgcataatgagcagtcaagccatgtttttcacaacgttcaagccatctagctaaacagggcttaggcctgattcattctagttcaagtgattattggataaaaatatgaagtccagctcacaaagtcccattacattgggaactgaaggtatcaccactagagcattcggtgcaccatgcacatgtgcttcaacagaccacatgctatgatgctacttgcgagcaacgtcaaagagtggtgaacctgcgctgcaacctgaacacgtggcggttgcttagttggttgtttggtttgtagtggtttcatcatcacgatcggagacaacactgctgtgttgtttcctggctaaagttttttgattctttgtaatagtgactaatgagaagttatagagcgtgcgtccaatatttggaagttaatgaggaaggagcaataaattgaaataagctgtttgcatactttcttgatgctggggaacaggatagggaaaggaacacatgtcttcggactccggctacttcgtgatcgagcaaaaatgaattgcagtatttagttcatgatgaaaatataatattaatggaaaggttgaaagtgtgttcctttttactggactactggaggaagttgccagggaatgcaaggaataagaaaataactattgggcttagcttaactgaactatgttaattttttatttaaatttccctccatataccatgcactttttgactttgggtggttttgcctcaatagtcaatacagatgccactttgatcatgtgacattgatttagtaaactttgtagtacctaggcaattcttatacatcttagaatacaatactatattactactaaaattttagcatcttgtaatgttataagcaccaccacaacactaaatgaaattatgaatgcggatcaatgccatgtggtctctacctttaacaagaacattaccaaattccattggtgtcaaactggattttagcaaaagcttcaagattatttctgaagtatgtaatttattttgccaacagtctaaaaatatttggatttttctgcatttttctctggatttgtggatctgggatctgttcccttttgtcgcacgaattcttcgttttttccatatccagggtgaaaatcatgtcacgtttaaatggtgatgcatcagatagggtgtggatggctggaaccccatttctctcttcattgttaattaatatatacccatattttttggacagctttacccctcttatttctcttcccatttcactttccccttcctctacccactctctcgatctctagcgccgcttcgtcgttcgttgatactcttcactccgtcgttcgttgacaatacctttgtgggcttggtgcgtggacttccactggatcccaatcagcttatcacctcacctttgaacactggacatggacttcttcacggaatatggggaggcgagtcagtatcaaatccaagaggtcattggtaagggaagttatggagtagttgctgctgcaattgatagtcacactggggagcgggttgcgatcaagaagataaatgatatttttggtaatgtctcggatgctgctcgcattttgcgggaaatcaagcttcttcgtctgcttcgtcacccaaacatagtccagattaagcacattatgttgccccctacccgaagggagttcaaagatatctatgttgtttttgagctcatggagtctgacctgcatcaagtgatcaaagcaaatgataacctgactccagagcatcaccgctttttcctgtatcaacttattcgtgctctcaagtacatgcattcagcccatgtatttcatcgtgatttaaagcccaggaacatactggccaattcagacagcaaactaaagatctgcgactttggacttgcacgtgcatcatttaacgactctctttcagctatctattggacagattatgtcgcaacaaggtggtaccgggctcctgaattatgtggctcctttttctccagttacacccctgcaattgatatttggagtatagggtgcatttttgctgaagttctcaccggaacgccattgtttcctgggaggaatgttgtgcaccaattagacttaataacagatctccttggaacaccatcgtttagatccttatcccagattcacagtgataaggccagggaatatttgcttggcatgccgaggaagcgccctattccattttctcataagttccgtaatgccgatcctctggctctccggttgctagagcgtttacttgcatttgacccgaaagatcgacctactgctgaagaggctttagctgatccatacttcagtggcctttctaaattggaacttgagccttcagcacaaccaatttcgaaggttgactttgaattcgagggaaggaaactaacaaaggctggtgtgagagaaatgatatatcgggagattttggagtaccatccccagatgcttcaggagtacatcgaaggtggagatcagattcacttcctatacccaagtggggtcgatcgcttccagcgacagtttgctcatctcgaggagaactacaggagaggagtagctagcaccccgccgcgaaggcagcccacatctctgccgagggagcgagtctgctcatcagaagatggccacagtcaggactctgacagcgaagagcagagagcagcatcctacgttgcccgaacaaccataagccctccaagatcacaagaggagggcggcaagctccagcctgcctaccagagcgccgccgccgccgcagactcctgcgccaagagctatctgaagggtgccgctagtatcagtggtgcttccaggcgtggcatcaagggggataatggccgaaaggagaaggaatctccgaggctgtgaaagaggtggcgcaggctcgtcacctgttaggcaaaagaggtagcaatggcgccaatgcgactgcaacgtgggatgtcttagtcatcatgcatccaacaacgcaggggggcagtacaagtatgcaggtcatcctagctaggtcgcccaaattaaagcagcctgcttggaggaattagatttgtgtactgttgttaagttttttttttttttttttttgaattcaactgctagattctggcagatctgtcaaccgcactctccttggtttcccaaaatttactggtttgaacaagtttattactgaatctcgctgtggtgcttcgtctagcattggactggac

SEQ ID NO: 216160 - DNA, 3371 bp, Zea Mays
atgtctattgcctaccccttatgctcaaaatgtgctcttctgtgctgtggggtgttgcataatgagcagtcaagccatgtttttcacaacgttcaagccatctagctaaacagggcttaggcctgattcattctagttcaagtgattattggataaaaatatgaagtccagctcacaaagtcccattacattgggaactgaaggtatcaccactagagcattcggtgcaccatgcacatgtgcttcaacagaccacatgctatgatgctacttgcgagcaacgtcaaagagtggtgaacctgcgctgcaacctgaacacgtggcggttgcttagttggttgtttggtttgtagtggtttcatcatcacgatcggagacaacactgctgtgttgtttcctggctaaagttttttgattctttgtaatagtgactaatgagaagttatagagcgtgcgtccaatatttggaagttaatgaggaaggagcaataaattgaaataagctgtttgcatactttcttgatgctggggaacaggatagggaaaggaacacatgtcttcggactccggctacttcgtgatcgagcaaaaatgaattgcagtatttagttcatgatgaaaatataatattaatggaaaggttgaaagtgtgttcctttttactggactactggaggaagttgccagggaatgcaaggaataagaaaataactattgggcttagcttaactgaactatgttaattttttatttaaatttccctccatataccatgcactttttgactttgggtggttttgcctcaatagtcaatacagatgccactttgatcatgtgacattgatttagtaaactttgtagtacctaggcaattcttatacatcttagaatacaatactatattactactaaaattttagcatcttgtaatgttataagcaccaccacaacactaaatgaaattatgaatgcggatcaatgccatgtggtctctacctttaacaagaacattaccaaattccattggtgtcaaactggattttagcaaaagcttcaagattatttctgaagtatgtaatttattttgccaacagtctaaaaatatttggatttttctgcatttttctctggatttgtggatctgggatctgttcccttttgtcgcacgaattcttcgttttttccatatccagggtgaaaatcatgtcacgtttaaatggtgatgcatcagatagggtgtggatggctggaaccccatttctctcttcattgttaattaatatatacccatattttttggacagctttacccctcttatttctcttcccatttcactttccccttcctctacccactctctcgatctctagcgccgcttcgtcgttcgttgatactcttcactccgtcgttcgttgacaatacctttgtgggcttggtgcgtggacttccactggatcccaatcagcttatcacctcacctttggtgcggactaaatcgtttccacttaagcatgcgacggaagtaatcttatcaatttatcataacactggacatggacttcttcacggaatatggggaggcgagtcagtatcaaatccaagaggtcattggtaagggaagttatggagtagttgctgctgcaattgatagtcacactggggagcgggttgcgatcaagaagataaatgatatttttggtaatgtctcggatgctgctcgcattttgcgggaaatcaagcttcttcgtctgcttcgtcacccaaacatagtccagattaagcacattatgttgccccctacccgaagggagttcaaagatatctatgttgtttttgagctcatggagtctgacctgcatcaagtgatcaaagcaaatgataacctgactccagagcatcaccgctttttcctgtatcaacttattcgtgctctcaagtacatgcattcagcccatgtatttcatcgtgatttaaagcccaggaacatactggccaattcagacagcaaactaaagatctgcgactttggacttgcacgtgcatcatttaacgactctctttcagctatctattggacagattatgtcgcaacaaggtggtaccgggctcctgaattatgtggctcctttttctccagttacacccctgcaattgatatttggagtatagggtgcatttttgctgaagttctcaccggaacgccattgtttcctgggaggaatgttgtgcaccaattagacttaataacagatctccttggaacaccatcgtttagatccttatcccagattcacagtgataaggccagggaatatttgcttggcatgccgaggaagcgccctattccattttctcataagttccgtaatgccgatcctctggctctccggttgctagagcgtttacttgcatttgacccgaaagatcgacctactgctgaagaggctttagctgatccatacttcagtggcctttctaaattggaacttgagccttcagcacaaccaatttcgaaggttgactttgaattcgagggaaggaaactaacaaaggctggtgtgagagaaatgatatatcgggagattttggagtaccatccccagatgcttcaggagtacatcgaaggtggagatcagattcacttcctatacccaagtggggtcgatcgcttccagcgacagtttgctcatctcgaggagaactacaggagaggagtagctagcaccccgccgcgaaggcagcccacatctctgccgagggagcgagtctgctcatcagaagatggccacagtcaggactctgacagcgaagagcagagagcagcatcctacgttgcccgaacaaccataagccctccaagatcacaagaggagggcggcaagctccagcctgcctaccagagcgccgccgccgccgcagactcctgcgccaagagctatctgaagggtgccgctagtatcagtggtgcttccaggcgtggcatcaagggggataatggccgaaaggagaaggaatctccgaggctgtgaaagaggtggcgcaggctcgtcacctgttaggcaaaagaggtagcaatggcgccaatgcgactgcaacgtgggatgtcttagtcatcatgcatccaacaacgcaggggggcagtacaagtatgcaggtcatcctagctaggtcgcccaaattaaagcagcctgcttggaggaattagatttgtgtactgttgttaagttttttttttttttttttttgaattcaactgctagattctggcagatctgtcaaccgcactctccttggtttcccaaaatttactggtttgaacaagtttattactgaatctcgctgtggtgcttcgtctagcattggactggac

SEQ ID NO: 216161 - DNA, 1550 bp, Zea Mays
gccctggaaggctggaaccggatcacgccatggctgcctctttttcctcgtggaaaggcatgccgcgcggctagctgcagtctcaaggacatggtgctcaagttctccggctccagcaagcagtgcaaggggacggccgggacccagtcgttcaggagcagcggggacaggtaccgccgcccctaccccggcttcatcgacgacacaggcttcacgcccgcgagcaaggttctcggcgaggactactacccaaggaccgcattggcgggggcagcaggcgccgccggtggcgcgcgaacggcttcgtcggatacgttggacatgggcaggagcaaccgcaagagccccgggagtagcggctggattccgggcaccgacgaggcagcggcgggcggggacgatgtcctcgctctggaggacgccgccgcgcccagggagtggacggcgcaggtggagcccggcgtccagatcaccttcggtaccatcccgaccggcggcaacgacctcaagcgcatccgattcagtcgggagatgttcaacaagtgggaggcacagcggtggtggggcgagaactacgaccgcatcgtggagttgtacaacgtggtgatgttcagcggccggcagcaagggtgctccactccggtgtcctccgtcgacgacttggcgctgagggactcgtcctactcccgtggcggctcgacaagcaggggcagcccgatcacagcgccgccgccgccgccgccactgccgccggtggcaagcaaagaaccgatcacccggagcgcgtcgtacaaggcaacggcagcagggtcctcctcggcaccgtacgcggccgcgcattccaccagggcggcagcggcatacttcccgtccgcggccgtgcccgacccgtcggaccacgtctgggcgcaccacttcaacatgctcaactccgctgctgcggcggccggcacgtcagcggcgatgggcggcggggccccgtcgtcctacgacccgtcgcgcgccaccacgtcgtccagggacgaggcctccgtgtccctcagcaacgtgagcgacctggaagccacggagtggatcgaggaagacgagccgggcgtgtgcctcaccatccgcgagctcggcgatggcactcgcgaactccgccgcatccggttcagccgggagatattcggcgaggatagggccaaggtgtggtgggagcagaacagggagagaatacaggcggaatatctgtagcaagcgatcagacactgagctgatgcaattttcaggcctgatgggataatcaaatatgtttgtgagaggatagattagggagatgataccgctatatacatggtgaaaacaacgtgaagggggaaactgtgaaagtgaaagaaatggtacctgtccttagttgcctaaactaataataagtttgtacatcgttggtacaatggtaccgtgtctggtttaaagttactttgtactgtacgtgtactgtacatcttggttccttcggtggtttaatttgtttttttaactctgtccatttcttgcgtgtttattac

SEQ ID NO: 216162 - DNA, 1280 bp, Zea Mays
aaaccacacacaccacagcactaaagtctattcatctctggctccccaaattcagctggagagcactttttcccatcatggataagaactacggtgaactctacaacatcctcggatggggtgaggagtacttcgcggtgaacacggaggggcacctcagcgtgaagcctttcggccgctggacggagcccgggcaggagatcgacgtgcactcggtcatcgtggaagctctagcgacccaacccaacgacagcaccagcaaatctcagttccccatgatccttcgcttccccgacgtgctcaagaaccgtatcgagacgctccataacgcattcaacagcgccatggagtccaccgggtacacgtccaggtaccaaggcgtgttcccgatcaaggtgaaccagaacaagcacgtcgtgcaggacatggttaggttcggccagcaatggaactatgggctcgaggctggctccaagccagaactgctcatcgccatgagctgcctccccgtcaccgaagccgagcccaagccgagccgactctcaagggcacgctggtggacatcacctgcgacagtgacgggaagatcgagaacttcatcagccgcgaaaacacattgccgctgcacctgttcgagccgagcctcggtggctactacgtggccgtactcgtctccggggcgtaccaggaggccattgctggcaagcacaacctgttcagtggcccaaccctcgttcgtgtcaatagtagcactacaaaagatggcggcttcgagattgaacgcgttgacctgggcccagctgcggatgagatcatcggcagcatgaggtacagcgtcgaggaagacattatcaccgtcatcgagaagaaagccaaggggacagaagaagaagaacgtgtgtgggcgtgggagatggtggagccactcatgaccaaagcgctcaccaccatgccctacctcaacgaatacaaggtccctgaacctgaacctgaacctgaacccatcccttgaacttctgcactgcagagtctccggatttggctgcgactgcgatcatatatacaataagaactgcctggttgatgatggataagcagataacgaaagcagcctacgtatgtatgtttcccttttttgagtttaccctgctcgcttgcatcttgttattgtacgtgttatccaataaataaaacaagcttcactggtgtgtttaattgctatatgtgcatgtctgtttctaccattttctaacaatttaatccagattatatatttcagc

SEQ ID NO: 216163 - DNA, 2714 bp, Zea Mays
cttaagcccttaactgacgcttgtgagggcgtcggcagttcgcgacaccccgtgcagccgtgctcttccgcttgaactagggcgcctccgcctccgcgcccgcgccgccgccggctgtagccatgtccgacgaatacgtggacttgcccgtctcggacgaggatgaagaagagctcgaagatgagatggatgatggtgatggggagagtggtggtggaagctcgaagaaaaaggccaagcagcacgtggagcagctcaagcggctgcagcaaaaggatcctgatttctataaatatttagaagagtttgataaagatttgttgggatttgatgatgatgatgatgaaatcgagaacgaccgggagactggggttgaggagaaagagcaatatgtatctaaagaggaactgaagcatgtgaaaccgattacaatggaaatggttgattcctggtgcaacggagtagagaatgaaaagataggttctatccgttctattcttcaagcttttcgcagagcctgccattatggtgaagatcatggggacaattcaactccgaagctcagtgtcatgtctggcagcgtacttgataaagttatgcactttgttttgaaacacatggataaagtcctccgtcaattacttggtgccccaagctatggagggaagaaagaggtaatcagtgagctgatgctgagtaagtcatggaagaggcatggtaatcttatgaggatctatcttgccaatgcgcttcatatgataacagagatgaccgatgagcaaatgatagcatttactgtacaccgtgtcagagcatcagctgtttttctggcagctttcccatcgctcctgaggaagtatgttaaggctctgctccatacctgggctagaggacgaggtgcaatgcctcttgtttcttttatgttccttcgagacttgtgcattcaagtaggttcagattgccttgatacttgcctcaagggtatctataaggcttatttggtgaactgcaaactgtccaaatctatcagcggatcaaaacaacaacacattcaattccttggaaattgtgtcagagaattgtatagtctggatccacaaagtgcgtatcagcatgcttttgttttcatccgtcaactgggggttatcctaagaggagctcttactgaaagggggccaaagtcagtgaaggacaaaaggcagaaagaaagtagcaaatcatcgaaaaaacaagcggagaaatcttaccaaaaaatttatgattggcaatacatattctgccttgagctttggaccagtgttgtgtgcggatgtagttctgaggaagaattccgacctctagcttatccgttgacacaaataatacatggtgtggcatgcctcgtacctagcgcacgttacttccctgtgcgctttaggtgtgtcagaatgcttaattgtattgccgaagccactggtaccttcattcccgtgtcctccctgctgcttgatatgcttgaaatgaaagaacttagaggacgtccagatggtgttggcaaagccgtgaatttgttcagtgttaaacaggttgacaagaaaacagtaaagacacgtgcctttcaggaagcttgcatttattctgtggtcgatgagctggctaaacatttgacccaatggagctactccattgccttctttgagatgtcctttattccacttgttcggctccgaagtttttgcaaaaccattaaagcggacagatttaggaaagagatgaaggatcttatctatcagatagaggccaatgtcgagttcattaagtcaaaacgagtggggattgcattttcacccaatgacccagctgtagagtcatttctgcagaccgaaaaggaagaacgttgcagccctctctcaaaatttgttgctactttacaccagagagcgcaagacaggatggatgctctggatgagaccagtgtgattgtgggtgccgagtcctcaaccttctcacggaggttatcagaagcgcagaagcaacaggatgagcaggacgatgatgaaggcactatcgctttcagtaagaactggctgtctgaaaataagaaacccaaaaccccaaaggaggataaaaagcgaccccgggaggatgatgatgtcgcgactgaggaggatcgggttgaggatttggtcttgagctcagatgaagaggatggcaacaatgaggaagcagacgatggttttgttccggttgaaggtgatagtgatgaagactttgtagaccctgacagcgaatataagaaacaaaagaaggcgaagctgaagaagaggaacaagcgccagccatttctgcacaaggcgccctctagaacaaaaagtaattcagggcccaagaagaaggccagacattagttatgcctgatagggcttggcaaatatgctgccgttgtgatgtatgcttctgagttccgaccgataaaaacattgtcccttgagtggaaaaattattatattttttcaagaaaaatttcaagtctttttttgaccccaacaggactgagatagaatttccaatctgagttttcatttcagtgctcaagggtttacatgattcaaatgtaaagggtttacattgccatggaaaaaattgtacaccaaacatcacaaatatctacctgttcctggtagtgtttatatacgtctagcatgggcgaatgtccatattattgtctgatttga

SEQ ID NO: 216164 - DNA, 2538 bp, Zea Mays
tcgcgacaccccgtgcagccgtgctcttccgcttgaactagggcgcctccgcctccgcgcccgcgccgccgccggctgtagccatgtccgacgaatacggtgggctcctcatccatccacatttctgtgggttactctatgctctattgctattgcgcttgtttaacttgggattttgattggttttcttcccctttcgctgtggttttggcgggggattagtggacttgcccgtctcggacgaggatgaagaagagctcgaagatgagatggatgatggtgatggggagagtggtggtggaagctcgaagaaaaaggccaagcagcacgtggagcagctcaagcggctgcagcaaaaggatcctgatttctataaatatttagaagagtttgataaagatttgttgggatttgatgatgatgatgatgaaatcgaggtaagctggtccctttttgtgagttttctatactagaatgatgagtggtcattgttctacattacatttagaacgaccgggagactggggttgaggagaaagagcaatatgtatctaaagaggaactgaagcatgtgaaaccgattacaatggaaatggttgattcctggtgcaacggagtagagaatgaaaagataggttctatccgttctattcttcaagcttttcgcagagcctgccattatggtgaagatcatggggacaattcaactccgaagctcagtgtcatgtctggcagcgtacttgataaagttatgcactttgttttgaaacacatggataaagtcctccgtcaattacttggtgccccaagctatggagggaagaaagaggtaatcagtgagctgatgctgagtaagtcatggaagaggcatggtaatcttatgaggatctatcttgccaatgcgcttcatatgataacagagatgaccgatgagcaaatgatagcatttactgtacaccgtgtcagagcatcagctgtttttctggcagctttcccatcgctcctgaggaagtatgttaaggctctgctccatacctgggctagaggacgaggtgcaatgcctcttgtttcttttatgttccttcgagacttgtgcattcaagtaggttcagattgccttgatacttgcctcaagggtatctataaggcttatttggtgaactgcaaactgtccaaatctatcagcggatcaaaacaacaacacattcaattccttggaaattgtgtcagagaattgtatagtctggatccacaaagtgcgtatcagcatgcttttgttttcatccgtcaactgggggttatcctaagaggagctcttactgaaagggggccaaagtgaaggacaaaaggcagaaagaaagtagcaaatcatcgaaaaaacaagcggaggttgacaagaaaacagtaaagacacgtgcctttcaggaagcttgcatttattctgtggtcgatgagctggctaaacatttgacccaatggagctactccattgccttctttgagatgtcctttattccacttgttcggctccgaagtttttgcaaaaccattaaagcggacagatttaggaaagagatgaaggatcttatctatcagatagaggccaatgtcgagttcattaagtcaaaacgagtggggattgcattttcacccaatgacccagctgtagagtcatttctgcagaccgaaaaggaagaacgttgcagccctctctcaaaatttgttgctactttacaccagagagcgcaagacaggatggatgctctggatgagaccagtgtgattgtgggtgccgagtcctcaaccttctcacggaggttatcagaagcgcagaagcaacaggatgagcaggacgatgatgaaggcactatcgctttcagtaagaactggctgtctgaaaataagaaacccaaaaccccaaaggaggataaaaagcgaccccgggaggatgatgatgtcgcgactgaggaggatcgggttgaggatttggtcttgagctcagatgaagaggatggcaacaatgaggaagcagacgatggttttgttccggttgaaggtgatagtgatgaagactttgtagaccctgacagcgaatataagaaacaaaagaaggcgaagctgaagaagaggaacaagcgccagccatttctgcacaaggcgccctctagaacaaaaagtaattcagggcccaagaagaaggccagacattagttatgcctgatagggcttggcaaatatgctgccgttgtgatgtatgcttctgagttccgaccgataaaaacattgtcccttgagtggaaaaattattatattttttcaagaaaaatttcaagtctttttttgaccccaacaggactgagatagaatttccaatctgagttttcatttcagtgctcaagggtttacatgattcaaatgtaaagggtttacattgccatggaaaaaattgtacaccaaacatcacaaatatctacctgttcctggtagtgtttatatacgtctagcatgggcgaatgtccatattattgtctgatttga

SEQ ID NO: 216165 - DNA, 2819 bp, Zea Mays
tcgcgacaccccgtgcagccgtgctcttccgcttgaactagggcgcctccgcctccgcgcccgcgccgccgccggctgtagccatgtccgacgaatacgtggacttgcccgtctcggacgaggatgaagaagagctcgaagatgagatggatgatggtgatggggagagtggtggtggaagctcgaagaaaaaggccaagcagcacgtggagcagctcaagcggctgcagcaaaaggatcctgatttctataaatatttagaagagtttgataaagatttgttgggatttgatgatgatgatgatgaaatcgaggtaagctggtccctttttgtgagttttctatactagaatgatgagtggtcattgttctacattacatttagaacgaccgggagactggggttgaggagaaagagcaatatgtatctaaagaggaactgaagcatgtgaaaccgattacaatggaaatggttgattcctggtgcaacggagtagagaatgaaaagataggttctatccgttctattcttcaagcttttcgcagagcctgccattatggtgaagatcatggggacaattcaactccgaagctcagtgtcatgtctggcagcgtacttgataaagttatgcactttgttttgaaacacatggataaagtcctccgtcaattacttggtgccccaagctatggagggaagaaagaggtaatcagtgagctgatgctgagtaagtcatggaagaggcatggtaatcttatgaggatctatcttgccaatgcgcttcatatgataacagagatgaccgatgagcaaatgatagcatttactgtacaccgtgtcagagcatcagctgtttttctggcagctttcccatcgctcctgaggaagtatgttaaggctctgctccatacctgggctagaggacgaggtgcaatgcctcttgtttcttttatgttccttcgagacttgtgcattcaagtaggttcagattgccttgatacttgcctcaagggtatctataaggcttatttggtgaactgcaaactgtccaaatctatcagcggatcaaaacaacaacacattcaattccttggaaattgtgtcagagaattgtatagtctggatccacaaagtgcgtatcagcatgcttttgttttcatccgtcaactgggggttatcctaagaggagctcttactgaaagggggccaaagtgaaggacaaaaggcagaaagaaagtagcaaatcatcgaaaaaacaagcggagaaatcttaccaaaaaatttatgattggcaatacatattctgccttgagctttggaccagtgttgtgtgcggatgtagttctgaggaagaattccgacctctagcttatccgttgacacaaataatacatggtgtggcatgcctcgtacctagcgcacgttacttccctgtgcgctttaggtgtgtcagaatgcttaattgtattgccgaagccactggtaccttcattcccgtgtcctccctgctgcttgatatgcttgaaatgaaagaacttagaggacgtccagatggtgttggcaaagccgtgaatttgttcagtgttaaacaggttgacaagaaaacagtaaagacacgtgcctttcaggaagcttgcatttattctgtggtcgatgagctggctaaacatttgacccaatggagctactccattgccttctttgagatgtcctttattccacttgttcggctccgaagtttttgcaaaaccattaaagcggacagatttaggaaagagatgaaggatcttatctatcagatagaggccaatgtcgagttcattaagtcaaaacgagtggggattgcattttcacccaatgacccagctgtagagtcatttctgcagaccgaaaaggaagaacgttgcagccctctctcaaaatttgttgctactttacaccagagagcgcaagacaggatggatgctctggatgagaccagtgtgattgtgggtgccgagtcctcaaccttctcacggaggttatcagaagcgcagaagcaacaggatgagcaggacgatgatgaaggcactatcgctttcagtaagaactggctgtctgaaaataagaaacccaagtatgttctggcttacctctttttttttcccattacttggcgtggaaaacacaatcatactgttgttcggtgtgcagaaccccaaaggaggataaaaagcgaccccgggaggatgatgatgtcgcgactgaggaggatcgggttgaggatttggtcttgagctcagatgaagaggatggcaacaatgaggaagcagacgatggttttgttccggttgaaggtgatagtgatgaagactttgtagaccctgacagcgaatataagaaacaaaagaaggcgaagctgaagaagaggaacaagcgccagccatttctgcacaaggcgccctctagaacaaaaagtaattcagggcccaagaagaaggccagacattagttatgcctgatagggcttggcaaatatgctgccgttgtgatgtatgcttctgagttccgaccgataaaaacattgtcccttgagtggaaaaattattatattttttcaagaaaaatttcaagtctttttttgaccccaacaggactgagatagaatttccaatctgagttttcatttcagtgctcaagggtttacatgattcaaatgtaaagggtttacattgccatggaaaaaattgtacaccaaacatcacaaatatctacctgttcctggtagtgtttatatacgtctagcatgggcgaatgtccatattattgtctgatttga

SEQ ID NO: 216166 - DNA, 6775 bp, Zea Mays
cgtctgtcactctcctctctcgcgtcttggtcctcctcctccccttcatcgaacgaatccatccaaggcaaaagggaacgagggaagcaagcaaaaaatccccaattcctcctagatcgatccaccgccgacgcggccgccgcctcctcgtccgcctccaagcgcccccgccgcaactcctcttcctcctcctctgcgccgccgcgccagcagccaccgatggaaccctcgccctcctcccgccgccgctcccgcgccgccgccgccgacaagggcaaggaccccgaccccgcctcctccgaccacccttccccacccgcccctgacgatgacgccgacgtcaccttcccccagcccttcacctccgccagcaccgccctccagggcctcctccgcaggctcggcgccggcctcgacgacctcctcccatcctcctcctcagcgccctcctccgccacgtccggtcacctcaagaggatcctcgccggcctgcaggcgcacggcgacgagtcgcgccagctccagtccctcatgcagctctgcgagatgctctccatcggcaccgaggactcgctcgccgccttcccggtcgatgcttttgtcccaatcctcgtcgggatgctcggccgcgaggacgagcctgccaccgctggtgccagccccgacgtcatgctgctcgcggcgcgggcactctccaacctcgttgatgtgctcccctcctcctgctccgcggtcgtgcactacggggccatacagtgcttctgtgctcgactgctcaccatcgagtacatggacctcgctgagcagtctctacaagcccttaagaagatctctctggagcacccaactgcctgtttgcgagctggtgccctaatggctgttctatcgtatctcgacttcttctccactggggttcagagggtagccttgtctaccgctgcaaatatttgcaggaagctgccgtccgatgcttccgagtttgtcatggaagctgtccccttgctcacgaatcttctaaatcaccatgattccaaggtactagagcatgcttctgtttgtttgacacgcattgctgaagcttttgcctattaccccgacaaacttgatgaactctgcaatcatggattagttgctcaagctgctagcttgatagctgttggcaactcatctggccagacatcactgagcacatccacatatacaggcttaatccgtcttctctcaatatgtgcaagtggatccctgctggcagttaaaacactacttcttcttgggatcagcggcactcttaaagatatcctttctggctctgctttgatttctggaacatcagtctcccctgctgtaacaaggcctgcagatcagatgtttgagattgtgagccttgccgatgatttgcttccgcatatccctgcgagaatcattaagttaccaacatattaccatacatataaaggctcttcaacaaagaaatctgcttccatcaaacaagaggggggtggttcaacaggaaatgaaaggtctggccgtgagaggctattgcgtgagcaacctgagcttttacaacagtttggtatggatttgttacccacaatgacacaggtgtatggttctagtgtaaatgcaccaatacgtcacaagtgtttatctatcattggaaaattaatgtactacagctccgccgaaacaatccagtctctccttggcacaacaaacatatccagcttccttgcgggcattcttgcatggaaagatcctcaagtgttgattcctgctcttcagatagcagaaataatgatggaaaagcttccagagacattttccaagttatttgtgagggaaggtgtcgttcatgctgtggagtcactcatatgttcagaatcttccaacaaaatgccttctcaggtgccacctcaggataaagataaagattctgccatgccatcacgttctagacgtcaacgccggcgtgcgggtgctgttgcagcagaaaatagttcattggatgaatcaaatagttccaaccttggtgttatgtgctcaacagcaaccgcttcagaagctccaaacaccagccttcgtttcacagttagtgaccatgcaaagtctttcaaagataaatactttccggcggatactgattcaagtgatatcgggtttactgatgaccttcttaaactgagggcactctgtgcaaagttgaatactgtctctgagaacgtcaaaacaaaagcaaaagggaaatcaaaagctataagcactaattttttggacatctcaattgatgttgaagaacaattagacaaaataatatctgaaatgctctctgagcttagcaaagttaatggtgtttccacatttgaattcattagaagtggtgttgtcatagcattgcttgactatttgtcctgtgggacatttgggaaggaaaaggtatctgaaggaaacctatctcagcttcgtcagcaggcccttagacgatacaaaaccttcatatctgttgccctttctattgatcatggacgagatgaaactcccatggcactgttggttcagaaactgcaaagtgcattgtcttcgctggaacgtttccctgttgtgctcagccagtctagtaggattggtattggagggtctcgtctgacttcaggtcttagtgctctggctcaacccttcaagcttcgtctttcccgagctcaaggcgaaaaatcacttcgggattattcatcaaatattgtgcttatcgacccatttgctagtcttgcatctgttgaagaattcctttggcctagagttcaacgcagtgaggttgcatcgaagcctataattccatctggtaataattctgaatctggggttcctggcaccacggctggtgcatcattaacagctgcaatggctcaatctggtcggcgcccaacaacaagatcaaagtcatctgctgcaggtggtcttacatctaagaaggattctcatgatgaaagcactagtactgccaaaggaaaaggaaaagctattgtaaagccaaactcagatgaatcaaaaggacctaatacaaggaatgctgcccaccaaaaatctgcttcagagaaagatttggaaatgaagcaggcacatggccacagtagctctgaggatgaagagctcgacacatctcctgttgagatcgatgatgctttgatgattgatgatgatgacatttcagatgatgatgatgatgacgacgatgatcatgaggttctccaagaagggtctcttccaatctgttctcaagatggtgtgcatgacgtgaaactgggtgatgccgatgaatctaacattggatcagctacttttagccatgcacagccatcatctggttctggggctagaaacacttctagcaggggaccggattctactgaatttcgaagtatgggcacattcggttcacgaggtgcaatgtcatttgttgctgcgacgatggctggtctggcttctgttggtggtcgcagtgttagaggtgtccgagatcggcgtggtctgtcacttggaggtagcatgaatgatcacaataaacttatattcactgctggtggcaagcagcttaacaaacatttgactgtatatcaagctatccaacgtcaacttatgctcgacgaggatgatgaagaaaggtttaatggatctgatataccaaatgatggaaaccgcttctggggtgatgtgttcacaataacgtaccagaaggctgataaccaagttgagaagggttgccaagggacttccacctcattaaacataaaatcagattcttacaggtccatttctgaagcacaaggggtttctcttcttgatagcatcttacaaggagaacttccttgtgatcttgagaggacaaactcaacgtacaacattttagcattattgcgtatacttgaggggcttaatcagttatcccctcgtttaagagtacagggagcatctgatgattttgctgagggaaaaatcaataccctggatgagttatatagaactggagccaaggtaccttctgaagtgtttgtcaatagcaagttaacaccaaagcttgctcggcaaatgcaggacgttctcgcactatgtagtggcagtttaccttcttggtgttatcaaatgaccaaggcctgcccattcctgtttccttttgagacaaggaggcagtacttctattccacagcctttgggttgtcacgagcattgaatcgactccagcaacagcagagtgataatcacagctctggtggtgaaagagaggtcaggtttggcaggttacaacgccagaaagttcgtgtttcccgtaaccgtattctagattctgctgctaaagttatggagatgttctccagtcagagggctgttcttgaggtggaatactttggcgaagttggaactgggctggggcctactctagagttttatactctcttaagccatgaactacaatgtgctcaactgggattatggagagctacttcttcatatgattcaggattgcacactgatatgaaggatgtgatccgtttagatcctgaagatgggtcgtcaggaaaagaactcaacacagatctaccaggtgatggcatgtatttgatacaagctcctcttggattgttccctcgaccttggccacctaaagttgatacttcagaaggtagcagattcttcaaagttttggagtatttccgcttaataggtcaagtgatcgcaaaagtcctgcaagatggcagacttttagatttgcctttatcaacagcgttttataagcttatacttggacaggaacttgatttgtttgacatagtgtcatttgattctgagtttgggaagacattgcaagaactgcaagttcttgttgaacgaaagcagttccttgaatccacttctggcaagaaccagctacaagttgcagatttgtgtttccatggcgcttctattgaagatttgtgtttagattttactcttccaggttatcctgattatgtgcttaaagagggtgaaggaggcacaattgttaatatttataatttagaagagtatattactttggtggtggatgctacagttaagtcagggataaagcgacaggttgaggcatttagatcagggtttaatcaggtgtttgacatgtcatccctccacatattttcacctcaagaacttgactatctaatatgtggagatccgcaagacattcagcatcaagaacgacttcacccaagaggaggaggatgagatccgcatggagaaccagtgggccttcgagtgattgttgtcttcctttccctgccatggcgaagcccgtctccatccaggtgtggaaccccagcggcaagtaccgcgtggtgagcaccaagtccatgccgggcacacgatggatccgcctgctcaccgacaacgactgccgccttgagatatgcaccgagcacaagaccatcctctccgtggacgacatcctggcgctcatcggcgatcgctgcgacggcgtcattggacagctcaccgaggactggggggacgtgctcttctctgcgctcaagcgcgccggaggcacggtcttcagcaacatggccgtcggctacaacaacgtcgatgtcgaggctgccaacaggaatggcatcgcaatcggcaacacgccgggcgttctgacggagacgacggctgagctcgccgcctccctctcgctggcggcagccaggaggatcgtcgaggctgaccagttcatgagggctggcctctatgacggatggctcccacacctgttcgttggcaacctgctcaagggccaaactgttggagtcattggagctggtcgcattggctccgcctatgcacgcatgatgattgagggtttcaagatgaacctcatctactacgacctgtatcaggccacacgtcttgagaatttcgtcacagcatatgggcagttcctcaaagcaaacggtgaggagcctgtcacctggaagagggccgccaccatggaggatgtcctcagggaggctgacgtgataagtctgcatccggtgctggacaagaccacctaccatctgataaaccccgagaggctggccatcatgaagaaggaggctgttcttgtgaacgcaagccgagggcccgtgatcgatgaggccgcgctggtggagcacctcaaggctaaccccatgttccgcgttggcctcgatgtctttgaggatgagccttacatgaaacctggactcgctgacatgaagaacgccgtcgtggtaccgcacatcgcatcagcctccaagtggacacgcgagggaatggcaaccctgtctgctctcaacgttcttgtatggtaagatcaaggggtaccctgtgtgggggaaccccaatcaggtggagcccttcttgcaggagaatttgacgccaccgcctgcctgcccaagcatcgttaatgccaaacaaattggcctgccatcggcaaagctttaggagcgaacactgacaggctggtatctacatgttgaagatgtgtcgtcgtcgtctccaccacgcgcacatatatgtacatgcatgtggattgaggtcatgcatctgcagagcaggtagcacatattaatttggatcatatatattgaccaatacacactgtatgctagattgctaggttgctgtgcatggatcatattgatcaatgacgaccaggcctccctccgtttcccttctatatttaggacctatttggttccttaagtccaatttggttccttaagtccatggactaaactcccgt

SEQ ID NO: 216167 - DNA, 6234 bp, Zea Mays
cgtctgtcactctcctctctcgcgtcttggtcctcctcctccccttcatcgaacgaatccatccaaggcaaaagggaacgagggaagcaagcaaaaaatccccaattcctcctagatcgatccaccgccgacgcggccgccgcctcctcgtccgcctccaagcgcccccgccgcaactcctcttcctcctcctctgcgccgccgcgccagcagccaccgatggaaccctcgccctcctcccgccgccgctcccgcgccgccgccgccgacaagggcaaggaccccgaccccgcctcctccgaccacccttccccacccgcccctgacgatgacgccgacgtcaccttcccccagcccttcacctccgccagcaccgccctccagggcctcctccgcaggctcggcgccggcctcgacgacctcctcccatcctcctcctcagcgccctcctccgccacgtccggtcacctcaagaggatcctcgccggcctgcaggcgcacggcgacgagtcgcgccagctccagtccctcatgcagctctgcgagatgctctccatcggcaccgaggactcgctcgccgccttcccggtcgatgcttttgtcccaatcctcgtcgggatgctcggccgcgaggacgagcctgccaccgctggtgccagccccgacgtcatgctgctcgcggcgcgggcactctccaacctcgttgatgtgctcccctcctcctgctccgcggtcgtgcactacggggccatacagtgcttctgtgctcgactgctcaccatcgagtacatggacctcgctgagcagtctctacaagcccttaagaagatctctctggagcacccaactgcctgtttgcgagctggtgccctaatggctgttctatcgtatctcgacttcttctccactggggttcagagggtagccttgtctaccgctgcaaatatttgcaggaagctgccgtccgatgcttccgagtttgtcatggaagctgtccccttgctcacgaatcttctaaatcaccatgattccaaggtactagagcatgcttctgtttgtttgacacgcattgctgaagcttttgcctattaccccgacaaacttgatgaactctgcaatcatggattagttgctcaagctgctagcttgatagctgttggcaactcatctggccagacatcactgagcacatccacatatacaggcttaatccgtcttctctcaatatgtgcaagtggatccctgctggcagttaaaacactacttcttcttgggatcagcggcactcttaaagatatcctttctggctctgctttgatttctggaacatcagtctcccctgctgtaacaaggcctgcagatcagatgtttgagattgtgagccttgccgatgatttgcttccgcatatccctgcgagaatcattaagttaccaacatattaccatacatataaaggctcttcaacaaagaaatctgcttccatcaaacaagaggggggtggttcaacaggaaatgaaaggtctggccgtgagaggctattgcgtgagcaacctgagcttttacaacagtttggtatggatttgttacccacaatgacacaggtgtatggttctagtgtaaatgcaccaatacgtcacaagtgtttatctatcattggaaaattaatgtactacagctccgccgaaacaatccagtctctccttggcacaacaaacatatccagcttccttgcgggcattcttgcatggaaagatcctcaagtgttgattcctgctcttcagatagcagaaataatgatggaaaagcttccagagacattttccaagttatttgtgagggaaggtgtcgttcatgctgtggagtcactcatatgttcagaatcttccaacaaaatgccttctcaggtgccacctcaggataaagataaagattctgccatgccatcacgttctagacgtcaacgccggcgtgcgggtgctgttgcagcagaaaatagttcattggatgaatcaaatagttccaaccttggtgttatgtgctcaacagcaaccgcttcagaagctccaaacaccagccttcgtttcacagttagtgaccatgcaaagtctttcaaagataaatactttccggcggatactgattcaagtgatatcgggtttactgatgaccttcttaaactgagggcactctgtgcaaagttgaatactgtctctgagaacgtcaaaacaaaagcaaaagggaaatcaaaagctataagcactaattttttggacatctcaattgatgttgaagaacaattagacaaaataatatctgaaatgctctctgagcttagcaaagttaatggtgtttccacatttgaattcattagaagtggtgttgtcatagcattgcttgactatttgtcctgtgggacatttgggaaggaaaaggtatctgaaggaaacctatctcagcttcgtcagcaggcccttagacgatacaaaaccttcatatctgttgccctttctattgatcatggacgagatgaaactcccatggcactgttggttcagaaactgcaaagtgcattgtcttcgctggaacgtttccctgttgtgctcagccagtctagtaggattggtattggagggtctcgtctgacttcaggtcttagtgctctggctcaacccttcaagcttcgtctttcccgagctcaaggcgaaaaatcacttcgggattattcatcaaatattgtgcttatcgacccatttgctagtcttgcatctgttgaagaattcctttggcctagagttcaacgcagtgaggttgcatcgaagcctataattccatctggtaataattctgaatctggggttcctggcaccacggctggtgcatcattaacagctgcaatggctcaatctggtcggcgcccaacaacaagatcaaagtcatctgctgcaggtggtcttacatctaagaaggattctcatgatgaaagcactagtactgccaaaggaaaaggaaaagctattgtaaagccaaactcagatgaatcaaaaggacctaatacaaggaatgctgcccaccaaaaatctgcttcagagaaagatttggaaatgaagcaggcacatggccacagtagctctgaggatgaagagctcgacacatctcctgttgagatcgatgatgctttgatgattgatgatgatgacatttcagatgatgatgatgatgacgacgatgatcatgaggttctccaagaagggtctcttccaatctgttctcaagatggtgtgcatgacgtgaaactgggtgatgccgatgaatctaacattggatcagctacttttagccatgcacagccatcatctggttctggggctagaaacacttctagcaggggaccggattctactgaatttcgaagtatgggcacattcggttcacgaggtgcaatgtcatttgttgctgcgacgatggctggtctggcttctgttggtggtcgcagtgttagaggtgtccgagatcggcgtggtctgtcacttggaggtagcatgaatgatcacaataaacttatattcactgctggtggcaagcagcttaacaaacatttgactgtatatcaagctatccaacgtcaacttatgctcgacgaggatgatgaagaaaggtttaatggatctgatataccaaatgatggaaaccgcttctggggtgatgtgttcacaataacgtaccagaaggctgataaccaagttgagaagggttgccaagggacttccacctcattaaacataaaatcagattcttacaggtccatttctgaagcacaaggggtttctcttcttgatagcatcttacaaggagaacttccttgtgatcttgagaggacaaactcaacgtacaacattttagcattattgcgtatacttgaggggcttaatcagttatcccctcgtttaagagtacagggagcatctgatgattttgctgagggaaaaatcaataccctggatgagttatatagaactggagccaaggtaccttctgaagtgtttgtcaatagcaagttaacaccaaagcttgctcggcaaatgcaggacgttctcgcactatgtagtggcagtttaccttcttggtgttatcaaatgaccaaggcctgcccattcctgtttccttttgagacaaggaggcagtacttctattccacagcctttgggttgtcacgagcattgaatcgactccagcaacagcagagtgataatcacagctctggtggtgaaagagaggtcaggtttggcaggttacaacgccagaaagttcgtgtttcccgtaaccgtattctagattctgctgctaaagttatggagatgttctccagtcagagggctgttcttgaggtggaatactttggcgaagttggaactgggctggggcctactctagagttttatactctcttaagccatgaactacaatgtgctcaactgggattatggagagctacttcttcatatgattcaggattgcacactgatatgaaggatgtgatccgtttagatcctgaagatgggtcgtcaggaaaagaactcaacacagatctaccaggtgatggcatgtatttgatacaagctcctcttggattgttccctcgaccttggccacctaaagttgatacttcagaaggtagcagattcttcaaagttttggagtatttccgcttaataggtcaagtgatcgcaaaagtcctgcaagatggcagacttttagatttgcctttatcaacagcgttttataagcttatacttggacagtgtcatttgattctgagtttgggaagacattgcaagaactgcaagttcttgttgaacgaaagcagttccttgaatccacttctggcaagaaccagctacaagttgcagatttgtgtttccatggcgcttctattgaagatttgtgtttagattttactcttccaggttatcctgattatgtgcttaaagagggtgaaggaggcacaattgttaatatttataatttagaagagtatattactttggtggtggatgctacagttaagtcagggataaagcgacaggttgaggcatttagatcagggtttaatcaggtgtttgacatgtcatccctccacatattttcacctcaagaacttgactatctaatatgtggtcgacaagaaatttgggagtcggaatccctggtggataacataaaatttgatcatggatatactgctaaaagtcctgcgatcgtgaatctactcgagattttgtcagaattcacccctgagcagcagcatgcgttctgccagtttgtaaccggtgctcctcggcttccacatggtggattggctgcccttagccccaagcttactatagttaggaagcatccttcaagtgctgtgaatacttcaaattcaactggggcagtagagtccgctgatgatgatttgcctagtgtgatgacgtgcgccaattatctgaagctgcccccctactccacaaaagaaatcatgcgcaagaagttgctttatgcgatcctggaaggccgaggatcatttgatctttcataagaaatatacaatatccgaactaacatacaggggtcagttttattctggagatttagtttcttggtccatgtataacactgagttgaggttaccagctcactcagcaaacggcttcaagggcgagagccccagtcctcactcggatgcaggctaagctatagtaattgaggatgtgcgccttgagtgaggatgtgcgccaacaagaacccccgtttgtttcagtacatgtaaataaaagggattttttgttccagaattgttatctgtaacaagaacatctacatctgtgatgactgaccattaataaatgtgtcccggtgtaccatttgttttttttctttgagcactggcagtagcaggatacacaaaagggagtgtatgctatatactactagtcgcggatagctcatctggtcatggccacagttttttcttatggagagaataacaaaatttggccctataaacagaaaaaaataaagtgcaagaatcggcagcatgagaattgtttgtacccaagactatctttagtagcttacccatcctacttatatttaactctacaatagtgtagtttatagtgcagaaaagtatataaatagtgttttaagtaaactattaaactctactctacatttaaactctactattaaac

SEQ ID NO: 216168 - DNA, 6255 bp, Zea Mays
cgtctgtcactctcctctctcgcgtcttggtcctcctcctccccttcatcgaacgaatccatccaaggcaaaagggaacgagggaagcaagcaaaaaatccccaattcctcctagatcgatccaccgccgacgcggccgccgcctcctcgtccgcctccaagcgcccccgccgcaactcctcttcctcctcctctgcgccgccgcgccagcagccaccgatggaaccctcgccctcctcccgccgccgctcccgcgccgccgccgccgacaagggcaaggaccccgaccccgcctcctccgaccacccttccccacccgcccctgacgatgacgccgacgtcaccttcccccagcccttcacctccgccagcaccgccctccagggcctcctccgcaggctcggcgccggcctcgacgacctcctcccatcctcctcctcagcgccctcctccgccacgtccggtcacctcaagaggatcctcgccggcctgcaggcgcacggcgacgagtcgcgccagctccagtccctcatgcagctctgcgagatgctctccatcggcaccgaggactcgctcgccgccttcccggtcgatgcttttgtcccaatcctcgtcgggatgctcggccgcgaggacgagcctgccaccgctggtgccagccccgacgtcatgctgctcgcggcgcgggcactctccaacctcgttgatgtgctcccctcctcctgctccgcggtcgtgcactacggggccatacagtgcttctgtgctcgactgctcaccatcgagtacatggacctcgctgagcagtctctacaagcccttaagaagatctctctggagcacccaactgcctgtttgcgagctggtgccctaatggctgttctatcgtatctcgacttcttctccactggggttcagagggtagccttgtctaccgctgcaaatatttgcaggaagctgccgtccgatgcttccgagtttgtcatggaagctgtccccttgctcacgaatcttctaaatcaccatgattccaaggtactagagcatgcttctgtttgtttgacacgcattgctgaagcttttgcctattaccccgacaaacttgatgaactctgcaatcatggattagttgctcaagctgctagcttgatagctgttggcaactcatctggccagacatcactgagcacatccacatatacaggcttaatccgtcttctctcaatatgtgcaagtggatccctgctggcagttaaaacactacttcttcttgggatcagcggcactcttaaagatatcctttctggctctgctttgatttctggaacatcagtctcccctgctgtaacaaggcctgcagatcagatgtttgagattgtgagccttgccgatgatttgcttccgcatatccctgcgagaatcattaagttaccaacatattaccatacatataaaggctcttcaacaaagaaatctgcttccatcaaacaagaggggggtggttcaacaggaaatgaaaggtctggccgtgagaggctattgcgtgagcaacctgagcttttacaacagtttggtatggatttgttacccacaatgacacaggtgtatggttctagtgtaaatgcaccaatacgtcacaagtgtttatctatcattggaaaattaatgtactacagctccgccgaaacaatccagtctctccttggcacaacaaacatatccagcttccttgcgggcattcttgcatggaaagatcctcaagtgttgattcctgctcttcagatagcagaaataatgatggaaaagcttccagagacattttccaagttatttgtgagggaaggtgtcgttcatgctgtggagtcactcatatgttcagaatcttccaacaaaatgccttctcaggtgccacctcaggataaagataaagattctgccatgccatcacgttctagacgtcaacgccggcgtgcgggtgctgttgcagcagaaaatagttcattggatgaatcaaatagttccaaccttggtgttatgtgctcaacagcaaccgcttcagaagctccaaacaccagccttcgtttcacagttagtgaccatgcaaagtctttcaaagataaatactttccggcggatactgattcaagtgatatcgggtttactgatgaccttcttaaactgagggcactctgtgcaaagttgaatactgtctctgagaacgtcaaaacaaaagcaaaagggaaatcaaaagctataagcactaattttttggacatctcaattgatgttgaagaacaattagacaaaataatatctgaaatgctctctgagcttagcaaagttaatggtgtttccacatttgaattcattagaagtggtgttgtcatagcattgcttgactatttgtcctgtgggacatttgggaaggaaaaggtatctgaaggaaacctatctcagcttcgtcagcaggcccttagacgatacaaaaccttcatatctgttgccctttctattgatcatggacgagatgaaactcccatggcactgttggttcagaaactgcaaagtgcattgtcttcgctggaacgtttccctgttgtgctcagccagtctagtaggattggtattggagggtctcgtctgacttcaggtcttagtgctctggctcaacccttcaagcttcgtctttcccgagctcaaggcgaaaaatcacttcgggattattcatcaaatattgtgcttatcgacccatttgctagtcttgcatctgttgaagaattcctttggcctagagttcaacgcagtgaggttgcatcgaagcctataattccatctggtaataattctgaatctggggttcctggcaccacggctggtgcatcattaacagctgcaatggctcaatctggtcggcgcccaacaacaagatcaaagtcatctgctgcaggtggtcttacatctaagaaggattctcatgatgaaagcactagtactgccaaaggaaaaggaaaagctattgtaaagccaaactcagatgaatcaaaaggacctaatacaaggaatgctgcccaccaaaaatctgcttcagagaaagatttggaaatgaagcaggcacatggccacagtagctctgaggatgaagagctcgacacatctcctgttgagatcgatgatgctttgatgattgatgatgatgacatttcagatgatgatgatgatgacgacgatgatcatgaggttctccaagaagggtctcttccaatctgttctcaagatggtgtgcatgacgtgaaactgggtgatgccgatgaatctaacattggatcagctacttttagccatgcacagccatcatctggttctggggctagaaacacttctagcaggggaccggattctactgaatttcgaagtatgggcacattcggttcacgaggtgcaatgtcatttgttgctgcgacgatggctggtctggcttctgttggtggtcgcagtgttagaggtgtccgagatcggcgtggtctgtcacttggaggtagcatgaatgatcacaataaacttatattcactgctggtggcaagcagcttaacaaacatttgactgtatatcaagctatccaacgtcaacttatgctcgacgaggatgatgaagaaaggtttaatggatctgatataccaaatgatggaaaccgcttctggggtgatgtgttcacaataacgtaccagaaggctgataaccaagttgagaagggttgccaagggacttccacctcattaaacataaaatcagattcttacaggtccatttctgaagcacaaggggtttctcttcttgatagcatcttacaaggagaacttccttgtgatcttgagaggacaaactcaacgtacaacattttagcattattgcgtatacttgaggggcttaatcagttatcccctcgtttaagagtacagggagcatctgatgattttgctgagggaaaaatcaataccctggatgagttatatagaactggagccaaggtaccttctgaagtgtttgtcaatagcaagttaacaccaaagcttgctcggcaaatgcaggacgttctcgcactatgtagtggcagtttaccttcttggtgttatcaaatgaccaaggcctgcccattcctgtttccttttgagacaaggaggcagtacttctattccacagcctttgggttgtcacgagcattgaatcgactccagcaacagcagagtgataatcacagctctggtggtgaaagagaggtcaggtttggcaggttacaacgccagaaagttcgtgtttcccgtaaccgtattctagattctgctgctaaagttatggagatgttctccagtcagagggctgttcttgaggtggaatactttggcgaagttggaactgggctggggcctactctagagttttatactctcttaagccatgaactacaatgtgctcaactgggattatggagagctacttcttcatatgattcaggattgcacactgatatgaaggatgtgatccgtttagatcctgaagatgggtcgtcaggaaaagaactcaacacagatctaccaggtgatggcatgtatttgatacaagctcctcttggattgttccctcgaccttggccacctaaagttgatacttcagaaggtagcagattcttcaaagttttggagtatttccgcttaataggtcaagtgatcgcaaaagtcctgcaagatggcagacttttagatttgcctttatcaacagcgttttataagcttatacttggacaggaacttgatttgtttgacatagtgtcatttgattctgagtttgggaagacattgcaagaactgcaagttcttgttgaacgaaagcagttccttgaatccacttctggcaagaaccagctacaagttgcagatttgtgtttccatggcgcttctattgaagatttgtgtttagattttactcttccaggttatcctgattatgtgcttaaagagggtgaaggaggcacaattgttaatatttataatttagaagagtatattactttggtggtggatgctacagttaagtcagggataaagcgacaggttgaggcatttagatcagggtttaatcaggtgtttgacatgtcatccctccacatattttcacctcaagaacttgactatctaatatgtggtcgacaagaaatttgggagtcggaatccctggtggataacataaaatttgatcatggatatactgctaaaagtcctgcgatcgtgaatctactcgagattttgtcagaattcacccctgagcagcagcatgcgttctgccagtttgtaaccggtgctcctcggcttccacatggtggattggctgcccttagccccaagcttactatagttaggaagcatccttcaagtgctgtgaatacttcaaattcaactggggcagtagagtccgctgatgatgatttgcctagtgtgatgacgtgcgccaattatctgaagctgcccccctactccacaaagaaatcatgcgcaagaagttgctttatgcgatcctggaaggccgaggatcatttgatctttcataagaaatatacaatatccgaactaacatacaggggtcagttttattctggagatttagtttcttggtccatgtataacactgagttgaggttaccagctcactcagcaaacggcttcaagggcgagagccccagtcctcactcggatgcaggctaagctatagtaattgaggatgtgcgccttgagtgaggatgtgcgccaacaagaacccccgtttgtttcagtacatgtaaataaaagggattttttgttccagaattgttatctgtaacaagaacatctacatctgtgatgactgaccattaataaatgtgtcccggtgtaccatttgttttttttctttgagcactggcagtagcaggatacacaaaagggagtgtatgctatatactactagtcgcggatagctcatctggtcatggccacagttttttcttatggagagaataacaaaatttggccctataaacagaaaaaaataaagtgcaagaatcggcagcatgagaattgtttgtacccaagactatctttagtagcttacccatcctacttatatttaactctacaatagtgtagtttatagtgcagaaaagtatataaatagtgttttaagtaaactattaaactctactctacatttaaactctactattaaac

SEQ ID NO: 216169 - DNA, 6205 bp, Zea Mays
ctgcgtctgtcactctcctctctcgcgtcttggtcctcctcctccccttcatcgaacgaatccatccaaggcaaaagggaacgagggaagcaagcaaaaaatccccaattcctcctagatcgatccaccgccgacgcggccgccgcctcctcgtccgcctccaagcgcccccgccgcaactcctcttcctcctcctctgcgccgccgcgccagcagccaccgatggaaccctcgccctcctcccgccgccgctcccgcgccgccgccgccgacaagggcaaggaccccgaccccgcctcctccgaccacccttccccacccgcccctgacgatgacgccgacgtcaccttcccccagcccttcacctccgccagcaccgccctccagggcctcctccgcaggctcggcgccggcctcgacgacctcctcccatcctcctcctcagcgccctcctccgccacgtccggtcacctcaagaggatcctcgccggcctgcaggcgcacggcgacgagtcgcgccagctccagtccctcatgcagctctgcgagatgctctccatcggcaccgaggactcgctcgccgccttcccggtcgatgcttttgtcccaatcctcgtcgggatgctcggccgcgaggacgagcctgccaccgctggtgccagccccgacgtcatgctgctcgcggcgcgggcactctccaacctcgttgatgtgctcccctcctcctgctccgcggtcgtgcactacggggccatacagtgcttctgtgctcgactgctcaccatcgagtacatggacctcgctgagcagtctctacaagcccttaagaagatctctctggagcacccaactgcctgtttgcgagctggtgccctaatggctgttctatcgtatctcgacttcttctccactggggttcagagggtagccttgtctaccgctgcaaatatttgcaggaagctgccgtccgatgcttccgagtttgtcatggaagctgtccccttgctcacgaatcttctaaatcaccatgattccaaggtactagagcatgcttctgtttgtttgacacgcattgctgaagcttttgcctattaccccgacaaacttgatgaactctgcaatcatggattagttgctcaagctgctagcttgatagctgttggcaactcatctggccagacatcactgagcacatccacatatacaggcttaatccgtcttctctcaatatgtgcaagtggatccctgctggcagttaaaacactacttcttcttgggatcagcggcactcttaaagatatcctttctggctctgctttgatttctggaacatcagtctcccctgctgtaacaaggcctgcagatcagatgtttgagattgtgagccttgccgatgatttgcttccgcatatccctgcgagaatcattaagttaccaacatattaccatacatataaaggctcttcaacaaagaaatctgcttccatcaaacaagaggggggtggttcaacaggaaatgaaaggtctggccgtgagaggctattgcgtgagcaacctgagcttttacaacagtttggtatggatttgttacccacaatgacacaggtgtatggttctagtgtaaatgcaccaatacgtcacaagtgtttatctatcattggaaaattaatgtactacagctccgccgaaacaatccagtctctccttggcacaacaaacatatccagcttccttgcgggcattcttgcatggaaagatcctcaagtgttgattcctgctcttcagatagcagaaataatgatggaaaagcttccagagacattttccaagttatttgtgagggaaggtgtcgttcatgctgtggagtcactcatatgttcagaatcttccaacaaaatgccttctcaggtgccacctcaggataaagataaagattctgccatgccatcacgttctagacgtcaacgccggcgtgcgggtgctgttgcagcagaaaatagttcattggatgaatcaaatagttccaaccttggtgttatgtgctcaacagcaaccgcttcagaagctccaaacaccagccttcgtttcacagttagtgaccatgcaaagtctttcaaagataaatactttccggcggatactgattcaagtgatatcgggtttactgatgaccttcttaaactgagggcactctgtgcaaagttgaatactgtctctgagaacgtcaaaacaaaagcaaaagggaaatcaaaagctataagcactaattttttggacatctcaattgatgttgaagaacaattagacaaaataatatctgaaatgctctctgagcttagcaaagttaatggtgtttccacatttgaattcattagaagtggtgttgtcatagcattgcttgactatttgtcctgtgggacatttgggaaggaaaaggtatctgaaggaaacctatctcagcttcgtcagcaggcccttagacgatacaaaaccttcatatctgttgccctttctattgatcatggacgagatgaaactcccatggcactgttggttcagaaactgcaaagtgcattgtcttcgctggaacgtttccctgttgtgctcagccagtctagtaggattggtattggagggtctcgtctgacttcaggtcttagtgctctggctcaacccttcaagcttcgtctttcccgagctcaaggcgaaaaatcacttcgggattattcatcaaatattgtgcttatcgacccatttgctagtcttgcatctgttgaagaattcctttggcctagagttcaacgcagtgaggttgcatcgaagcctataattccatctggtaataattctgaatctggggttcctggcaccacggctggtgcatcattaacagctgcaatggctcaatctggtcggcgcccaacaacaagatcaaagtcatctgctgcaggtggtcttacatctaagaaggattctcatgatgaaagcactagtactgccaaaggaaaaggaaaagctattgtaaagccaaactcagatgaatcaaaaggacctaatacaaggaatgctgcccaccaaaaatctgcttcagagaaagatttggaaatgaagcaggcacatggccacagtagctctgaggatgaagagctcgacacatctcctgttgagatcgatgatgctttgatgattgatgatgatgacatttcagatgatgatgatgatgacgacgatgatcatgaggttctccaagaagggtctcttccaatctgttctcaagatggtgtgcatgacgtgaaactgggtgatgccgatgaatctaacattggatcagctacttttagccatgcacagccatcatctggttctggggctagaaacacttctagcaggggaccggattctactgaatttcgaagtatgggcacattcggttcacgaggtgcaatgtcatttgttgctgcgacgatggctggtctggcttctgttggtggtcgcagtgttagaggtgtccgagatcggcgtggtctgtcacttggaggtagcatgaatgatcacaataaacttatattcactgctggtggcaagcagcttaacaaacatttgactgtatatcaagctatccaacgtcaacttatgctcgacgaggatgatgaagaaaggtttaatggatctgatataccaaatgatggaaaccgcttctggggtgatgtgttcacaataacgtaccagaaggctgataaccaagttgagaagggttgccaagggacttccacctcattaaacataaaatcagattcttacaggtccatttctgaagcacaaggggtttctcttcttgatagcatcttacaaggagaacttccttgtgatcttgagaggacaaactcaacgtacaacattttagcattattgcgtatacttgaggggcttaatcagttatcccctcgtttaagagtacagggagcatctgatgattttgctgagggaaaaatcaataccctggatgagttatatagaactggagccaaggtaccttctgaagtgtttgtcaatagcaagttaacaccaaagcttgctcggcaaatgcaggacgttctcgcactatgtagtggcagtttaccttcttggtgttatcaaatgaccaaggcctgcccattcctgtttccttttgagacaaggaggcagtacttctattccacagcctttgggttgtcacgagcattgaatcgactccagcaacagcagagtgataatcacagctctggtggtgaaagagaggtcaggtttggcaggttacaacgccagaaagttcgtgtttcccgtaaccgtattctagattctgctgctaaagttatggagatgttctccagtcagagggctgttcttgaggtggaatactttggcgaagttggaactgggctggggcctactctagagttttatactctcttaagccatgaactacaatgtgctcaactgggattatggagagctacttcttcatatgattcaggattgcacactgatatgaaggatgtgatccgtttagatcctgaagatgggtcgtcaggaaaagaactcaacacagatctaccaggtgatggcatgtatttgatacaagctcctcttggattgttccctcgaccttggccacctaaagttgatacttcagaaggtagcagattcttcaaagttttggagtatttccgcttaataggtcaagtgatcgcaaaagtcctgcaagatggcagacttttagatttgcctttatcaacagcgttttataagcttatacttggacaggaacttgatttgtttgacatagtgtcatttgattctgagtttgggaagacattgcaagaactgcaagttcttgttgaacgaaagcagttccttgaatccacttctggcaagaaccagctacaagttgcagatttgtgtttccatggcgcttctattgaagatttgtgtttagattttactcttccaggttatcctgattatgtgcttaaagagggtgaaggaggcacaattgttaatatttataatttagaagagtatattactttggtggtggatgctacagttaagtcagggataaagcgacaggttgaggcatttagatcagggtttaatcaggtgtttgacatgtcatccctccacatattttcacctcaagaacttgactatctaatatgtggtcgacaagaaatttgggagtcggaatccctggtggataacataaaatttgatcatggatatactgctaaaagtcctgcgatcgtgaattttgtaaccggtgctcctcggcttccacatggtggattggctgcccttagccccaagcttactatagttaggaagcatccttcaagtgctgtgaatacttcaaattcaactggggcagtagagtccgctgatgatgatttgcctagtgtgatgacgtgcgccaattatctgaagctgcccccctactccacaaaagaaatcatgcgcaagaagttgctttatgcgatcctggaaggccgaggatcatttgatctttcataagaaatatacaatatccgaactaacatacaggggtcagttttattctggagatttagtttcttggtccatgtataacactgagttgaggttaccagctcactcagcaaacggcttcaagggcgagagccccagtcctcactcggatgcaggctaagctatagtaattgaggatgtgcgccttgagtgaggatgtgcgccaacaagaacccccgtttgtttcagtacatgtaaataaaagggattttttgttccagaattgttatctgtaacaagaacatctacatctgtgatgactgaccattaataaatgtgtcccggtgtaccatttgttttttttctttgagcactggcagtagcaggatacacaaaagggagtgtatgctatatactactagtcgcggatagctcatctggtcatggccacagttttttcttatggagagaataacaaaatttggccctataaacagaaaaaaataaagtgcaagaatcggcagcatgagaattgtttgtacccaagactatctttagtagcttacccatcctacttatatttaactctacaatagtgtagtttatagtgcagaaaagtatataaatagtgttttaagtaaactattaaactctactctacatttaaactctactattaaac

SEQ ID NO: 216170 - DNA, 522 bp, Zea Mays
ggggaaaggaaaaggggaagttctcgccagcgtgctgccttgcaagctgctaactagaataggaatccgacgtcgcccccgcccccccctgtgaaaattcgtgatgcggagaacagctaccgccgccctcgtcctcgtccccctcctcgctgcggcggtacagacctccgccctgcctttcatcgtcctgcacgggattggggaccagtgcgtcaaccatggcgttgccaagttcactaaacttctcgccgattggtccggctccgacggctactgcctagagattggcagaggaacatgggactcttgggtcatgcctcttcaacaacaggctgatataatctgcaacaaggtcaccaccccaaccgatttgcgctgtttgatgagttgttcaaaactacactctgccacttttgattttttttccaggtcaaggaaatgaaacaactgagaggtggctacaacatagttggtctgtctcaggtcatgcagctactatactaaaaccctgcctcatctttg

SEQ ID NO: 216171 - DNA, 3282 bp, Zea Mays
cttttgcgacattgcgcaccagctggagtctgtgctcggttaactgatgagagtatgatcagagaaaggaagcgcctccctacctccagctccaataaataggggaagagagagagagagaactataagcctgctgctgtatgtaacccagatccaccccattcgcatctctgcttctttctgcttgggtgccctctgccctgaccacagggcccaaccatatcttcttcctcacacagagacactgagcgagcgagcttgagatcgatctcaggaggcggccggcggcggcagcagcagcagagcttgttggcgccgccatggcgataggtggcttcgtggaagcccctgccggcgccgactacggtggccgcgtgacgtccttcgtggtgctctcctgcatcgtagccggtagcggcggcatcctcttcggctacgacctcggcatctcaggtggggttacctccatggagtcgttccttagaaagttcttcccggacgtgtaccaccagatgaaaggagacaaggacgtgagcaactactgccgcttcgacagcgagcttctcaccgtcttcacctcctccctctacatcgccggcctcgtcgccacgctcttcgcctcctccgtcaccaggaggatactccttggagtaggcctcggattcacaaaccagtccatcccgctgtacctctcagagatggcgccaccgcagtaccgtggcgccatcaacaacggcttcgagctctgcatcagcatcggcatcctcatcgccaacctcatcaactacggcgtggagaagatagcaggtggatggggctggaggatctctctgtccctggccgccgtgccggccgcgttcctcaccgtcggcgccatctacctgcccgagacgcccagcttcatcatccaacgccgcggcggcagcaacaacgtcgacgaggcaaggctgctcctccagaggctgcgtggcaccaccagggtccagaaagagctcgacgatctcgtgtccgcgaccaggacgaccaccacagggcgtcccttccgcaccatactgaggcgcaagtacaggccgcagctggtcatagctctcctcgtacccttcttcaaccaggtcaccggcatcaacgtcatcaacttctacgcgccggtcatgttccggaccatcgggctcaaggagagcgcgtccctcatgtcggccgtggtcacgcgcgtctgcgccacggccgccaacgtggtggccatggtggtcgtggacaggttcggccgccggaagctcttcctggtgggcggcgtgcagatgatcctgtcgcaggccatggtgggagcggtgctggccgccaagttccaggagcacggagggatggagaaggagtacgcgtacctggtgctcgtcatcatgtgcgtcttcgtcgcgggcttcgcctggtcctggggccctctcacctacctggtgcccaccgagatctgcccgctggagatcaggtcggcggggcagagcgtcgtcatcgccgtcatcttcttcgtcaccttcctcatcggccagaccttcctggcgatgctgtgccacctcaagttcggcaccttcttcctcttcggcggctgggtgtgcgtcatgacgctcttcgtgtatttcttcctgccggagaccaagcagctgcccatggagcagatggaacaggtctggaggacccactggttttggaaaaggattgtagacgaagatgcagcaggggagcaaccgagagaggaagcagcaggaaccatagctctgtcgtccacgtccaccacaacatagtcatcatcaacaatactcatggcatgggcctgccctgtatagatagataattaactagctgcaccgcacagattgtctccgactataagctagctagctagttggatgcatgcatgcatgcattctgttatttctgtgaccatgaatcaaagggccttccaacagaacagaatatgagatgagatgaatcttatttgtgactgagtgccaagccaaccaagcagaggcagcgtaacaatccaagccactgtcggaagcccatgcatcaaatcaaaacagcgtcatcaccctctgccagtgccagcccaagcacagcgtgccaaatggcaactagcaaatcagaaaccgtcaccgatgcctttttgtttgtcaggtaaggcacaatgtacttcttcatgtcacctttggagataccaagatgacctcccggcacagacacaaacttcacccgccctgcttcatccagtgtcttcaaaccaatccagtcttcctcatacagtttcgtctgcacacacagagcttgccattgtaagcagagcacacatggaggaggacccaactcacgtgcatgaatcaattctaccttctgaggtggtagaactggatcaaaggctccatcagggtagtaaccaaaccatgccgtttctcgtggtatcaggactgcatcatcctgaaactgcaaataacatacatacatacatacatatattaagataggtcaaaagaattcaatcgattttggattcagaccatgtcaagcttaccataatcagaaccaaattctctaagctactgaatctttccttgtaggtggcatttcttttatctggaatttcattgttaagttttggaagaaacctacaactcttcagataatctgccatatcagttgggattttgaggtagccactaggtgcaagatgttcctgtaattcaccatgcctcaagttatcgcgtgatttttttttaaaaaaaaataataaagtgtttaccatgacaaaaaaatcaagttcgatttaagccaatgcattcaaacctgcacatagtctgagtagatctccaatttgatcagagcatcaacaataatgcaaaaaaatccagactgcatatataatatacagatatcaactgaatcatacaggctgccatagaatatgcggatgttaaaagacaagtacatttaaacaataatggtgttagtctcagccaatatattttccttaatttttactaagtgtataagtcatcaaacaaatgcatgaaagcatatttaaccatctattatactacacaaacttgtcaccatatcatcgaattattagtcaaaacatggcattaaaaaaccacatagtgattggaaataatgactgatgagattaacttacaccacaaagaggcactgaagcggtaccagcatgaggacctcctagagagatgaaattcttgacctgccaggtgcgatctggatcataacttattgcataga

SEQ ID NO: 216172 - DNA, 2972 bp, Zea Mays
gggatagggaagcatagggaggagctacagagggtacttccagcagttccagatattccccgtgaccaacgaagagaaacctgtcctagcaaaccagttctcggcatttgtttcgcgcccgaacgggaacaagtactccacggtgctgtcggcgccaaccgctgaccttctcaagggagtcggcaaagccggcattggatcttgggactggaggttgaaggaggacaggtgcacttaccacgccctgttcccaaggtcatggacggtatatgatggtgaacctgaccctgagatcaagatcacctgccgtcagatatcgcccttcataccgcacaactacagagagagcagcttcccggctgcagttttcacattcacggtgaacaactctgggagctcacctgcagatgtgacgctgctcttcacctgggcaaattcagttggcgggaagtcggaactgacaggaaaccacgtgaattccaaaatgacggagcacgacggcgtccgtggcgttctcctccatcacaggacggcgggagggcagcctccggtgacgttcgcgatcgcgtcccgagagaccgacggtgtccgcgtcagcgtctgcccgtccttcacgatcgcgtcgggcggcccgtccagctccggcgagcccacggcggcggccatgtgggacgagatcaagaagcacggcgcgttcgggcacgccggcgccggcaacggcaacgcggcgagggcggcggcttccaaggccgggtcgtccgtgggcgcggcagtggcggcgtcgacggccgtgccggcgggggcgacgcgggtggtgtccttctcgctggcctgggcgtgccccgaagttaagttccccgccgggagcacgtactacaggaggtacaccaggttctacggcactgatgccgacgcagctgcagagcacctagctcatgatgcccttcttgagcatatgaactgggagtcccagatcgaggagtggcagaagccaatcttgcatgaccaaaggctgcctgaatggtatccagttgctctgttcaacgagctctactacctcaacgctggaggcaccatctggacagacgggcaggctccgaagagggccggcttcgcttcgtcgttgacggccaccgagccgttctccatcgacacgctcctcccagtcgcagcgggcggcagcgcggtggacggcgtcgtgcgcgcggtggcgtcggcgacggagcggtcccactccgcggcggcgttcggcgcggcgctactgcgcggcggcgaggacaacgtggggcagttcctgtacctggaaggcatggagtacaacatgtacaacacctacgacgtgcacttctacgcctccttcgcgctgctgtccctcttcccccggctggagctgagcctgcagcgggacttcgcgcgcgccgtgctcctccacgaccctcgcccccggcgcaccctggacggcaggaccgtggcgcgcaaggtgctgggcgccgtgccgcacgacgtcgggctcaacgacccatgggtggagctgaacgcgtacatgctgcacgacgcggcgcggtggaaggacctcaaccccaagttcgtcctgcaggtgtaccgcgacgccgtggccacgggcgacgccgcgttcgcggaggcggtgtggcccgccgtgtacgtggccatggcgtacatggaccagttcgaccgcgacggcgacgggatggtggagaacgagggggtgcccgaccagacgtacgacatgtggtcggtctccggtgtcagcgcctacacgggcggggtctgggtggcggcgctgcaggcggcggcgggcatggcgcgcgtcgtcggggaccgccccgccgaggcctacttccgcgcgaggcgggacagggcggcgcgcgtgtacgatgccgagctctggaccggcgcctacttccgctacgacaacagcggcggcggcggcgccagcgagtccatcatggcggaccaactggcggggcagtggtacgcgcgggcgtgcgggctggagccggtggtggaggacgccaaggcacggagcgcgctggcgaccgtgctggactacaacgtcatgcgggtcaagggcggcgccatcggggccgtgaacgggatgcgccccgacggcgccgtcgacgcatcgtccacgcagtccaaggaggtgtggcccggggtcacgtacgccgttgcggcggccatggtccacgagggcatgacggaggccgcgttccggacggccaagggcgcccacgacgccgcctggggcaacgacggcttcgggtacgcgttccagacgcccgaggcttggacggaggacggcggctatcggtcgctgcactacatgcggccgctcggcatctgggcgatgcagtgggcgctgtcgccacccgagctccacagggatctcaggacacccgaggcgcgatcctcggaggagccgtcgccggcggacgctgccctcgggcaggcgcagttcgacaaggtggcgagcatgttgaggctgccggaggagcagcagcccaagggatacctttgggccatctacaacctcgttaggcaaattgtgctccccgcatgaggattctcttgctccaagcagccgcactcatgaatgcaaattgagcccgttattatatatcttttttttattaaaacctaaagcgttacggagccttcaccgcatttccgggctagggcgcctgtcgcgtggtggcgcgtgtccgaatccgagacgcgaaaacttcatctacaaagccgtccccgcgtctaggcggtaattcagttccgtctatttaggttgtaaaatttcagatgaaaaatgagaatcggtttttttagaaacccaacctaaataaacccataattttggttcgagacccaaatagtaaaaagactaatattttttgttaaaatatatactgtcggagagggaattcttcgcccgagtgccggagtacacccgccattaa

SEQ ID NO: 216173 - DNA, 1644 bp, Zea Mays
tgtcatgtacggtaaaacgttcactaggtgcaggcgcgcgcgtgatgtccggcgagcagtcgagcgcgcggccacagagcgggcagcagcgcatgctgcaaatcagccacagatagcaagtggctaagattagggaagttggctaagattaggaaagaagcagtctatcaggctagagagaatcaaggagacttgctccatttgtaattggccaccggccatatattcatgtatgcagcacgattactagcagaaaagaatttatccttcttctacctctagcctcttaagcctgcggttaggggggcataaccccgaccggagaagacggccgacggctacgagctacgtagccgaggtccggcgagtcagggattccaggttctgatatattcgccagacggaaggtgcttgttcaagtatctagcttatgaaagtgggttgggtgtgaaaactgttgcttggtcaccatgtggacagtttttagcagtgggcagctatgatcaagcagtacggactttgaatcacttgacgtggaaaacttttgcggagttctcacatgcagggtatattcgtagtccttgcaatgctgctatatataaggaagtggatgacccatggcaacttgatatgtcagaattatgtctaagtgaaggcctctctcgaaacatgccagacaatggtgcagaaaatggcaccgagggaggaggctctagagttaaatatgctgtgatggatgttcccatcaccttaccttcgttgaaaccagcttttgacaagcctaaccccaaacaaggcattggtatgctgtcatggagcagcgacagccactatttcttcaccaggaatgacaacatgccaactgttctctggatatgggatatatgccgccttgagcttgccgctgtgctcgtgcagaaagatccaatccgtgctgcagcatgggaccctacctgcacacgccttgttttatgcacagagagccctcacttgtacatgtggacgccatccggtgcctgctgtgtcaacatcccctttctgaacttccgaatcgttgatttgaagtggagctcgaatgggagctgtctcctcctgaaggagcgcgaatctttctgctgtgccacaatcatatctgccctgcctgaggaagaacctgatcattctgatgatacttctgaagatgaatgagtggcctcatggtatgtctagcagcttatgcgaatggaactgggaactaacagtacaaatgatcttgtgatggtgaatgagtgacactgactgactacttagctacttgtagaatccagagtggattgcgataccatgaatcgataaggtcatttcgctgcttagatggcaaatgctctatcaccaggcactacagaatggacagagaactgtgtggttctatttgttgtattcttgctcttgtttgtctgttgtagtttctccaaggttgtactgcttgaccttacttgttggatcttaatcttacatatccagtcaccagggtattttcaatctgggagtacatacttaggccgtacttagccctgtttagccctgtttgtttcggattataatctctctagattatataatctaacgcaaataatccaacagctaaataaacacctagattat

SEQ ID NO: 216174 - DNA, 3200 bp, Zea Mays
cttttgcattttagtggatcggtactcccaggggttatgcatgacagcccctgtggctcttccaaatgatcgagcagcagtctcccattctgcaagggttgacttattccgagacactagttgcaacatagaaaaggaggtgttggccagtatgggaaatgaccaagattcgactgctgctggaacaaatcctggtttcagagttggggagatcaggtttggcaatggagatgtttattctggcacattgttggggaacacaccagagggttcaggccagtatcgctggtcagatggttgcacctatgacggtgagtggacgagagggatgaggcatgggcaaggaaagacgcaatggccatctggagccacctatgagggcgagtattctcgcggctatgtatacggtgaaggcacctatacgggtccagataaaatcatctacaagggacggtggaagttgaatcgcaagcatgggcttggatatcagacatatccaaatggagacacgtttgaaggttcgtggattcagggagaaatagtaggtcacgggaagtacacatgggcaaatgaggacacttacgttggcaacatgaaaagtggcaggatgtcagggaaaggaactcttacatggaaaaatggggactcatatgagggtaactggatagatggcatgatgcatgggtatggaatctatacatggaatgaatgcgggtattacattggaacatggacaaggggactgaaggatgggaaaggtaaattctatccggaaggttgcagagttcctgttaacgatgagctgtatatcaaaaatctaagaaaccgtggtgtactgcctgatattagaaggcagaatcatggctcacgcatacttcactcttcctcggttgacatggggaacatgaaggttggtataaccaggcaatcttcagatgttttgtacaaaaggaatccaactgagcagcctcctttgaagaatgtgtctttggaaagacggtggagccttgaggtggctattgaaaagtttattggccatgaatcgattgaaagttctggtcaagaaagcttggaaaacttgagtgattctcgtatgcccatactggaaagagaatacatgcaaggcgttctaatcagtgaggtggttcttgacaggagtttttcagactcctcaaagaagacaaaacgccgccagaagaaaatggtaagggacacaaaaaggcctggagaggcgataattaagggacacagaagctatgatttaatgctcagcctgcagattggaatcaggtacacagttgggaagattacaccaattcaaaaacgtgaagttcatgcttcagattttggaccaacagcaagtttctggatgaatttctcaaaagaaggatctcggcttactccttcacattcagcggaagattttaaatggaaagactactgtcccatggttttcaggaatttgagagagatgttcaagattgatgctgcagactatatgatctccatatgcggaaactctgctcttaggcaactatcttcccctggaaagagtggaagtgtctttttcttgtcacaagatgatagattcatgattaagactctccgagaatctgaagtgcaggttcttttacgaatgcttccaaagtattatgatcatgtccgtacctatgagaacaccctcataaccaagttttttggcctccacagggtgaaaccttctagtggccaaatgttccggtttgttgtaatgggaaacatgttttgcactgaattgagaattcaccggaggtttgatttgaaaggctcgtctttaggccgctctactgacaaaattgaaattgacgagaacacaactctgaaggatttggatcttaattattccttttatcttgaaccttcctggcgtgaggctctactgaagcagattgaaacagatagtgattttttgagaacacagcggataatggattacagcctactgcttggtgtccattatagagctccacagcacttgcggacacgtgcatcttatcaccggagcatggcagcagatagattgaccgttgtttctgaagaagatgctcaggaggaggatgcccttagccatccagaaggattagtcctggttcaaagcagtggcgagaacagtgttgttgttggtcctcacataagaggcagccgtttgcgtgcatcggcagctggatttggcgaggtagacctgctgctgcctggtaccgccaggcttcagatccagctaggagttaacatgcctgcaagggcagagcaaatctccaaggaagacggaagcaaatcatttcgcgaggtgtacgatgtcgtgctttacctgggcatcattgacatattgcaagagtacaacaagtcaaagaaaatcgagcacgctgtcaagtccatgcaatatgactctgtctccatctctgccgtcaacccccggttctactcggagcgtttcttgaagttcatccagaccgtcttccccgagaattcatagctcatgagtcaatacttgttcgaaacatgagacctgatgattcccacggcagtccctgtctccaaaattggaacttgcatgcatcagaaaagcattagtcccttctttgatgaactgtcaggaggaatgggaatggctgacaagatgaggttcgtgagggctattgtgcagaagcaaatagatctcatctttctttggttttgtccccagcccctgcgatcagccggcccggctggcttccctcttccctgagtaggccgtaggcgtggcatactgccccccacctgcgaaaagatttataaataaaagttaacggcaggaagatttggggtcggcactcggtggcttagctggctgttgggagtccgggaagggaaaactggcagcaccagatgagcatttctcggtggagagttgtttctaagaacaggtagcggtgttgttgagtttcttaacggtagtaatggcgtcagtactcggtcgcctgaaaatctacagaggagtcattttcctggctgctgcgaactggagtggtatagtagtcgtggtttcttgtaattacgtagctgttggctgaatcgatcatggaccttagtgcccaagaagacagaagcccaatttcagtaaactaagccggaggagaaaactcatcagccagcaccgactcatccaaagtccttgtaatggg

SEQ ID NO: 216175 - DNA, 3846 bp, Zea Mays
cacggcggccttggtgggcggtgtctggaggctgcggtgggtgagagccgtgccgaccatctgcatgcatgcgtgcaagccatcatctttcgttttcgtcagcattggatgtcgggacctaataaatctccatttagtggagtggctgatgatttgaaaggaagagcaggttgctacaaacaagactggaaccatggatttcgttctggtttaaggatactggcacctacgctctacatattctttgcatctacagtccctgttatagcctttggggagcaattgagcaaagatacagatagtgcactaaccacagttgagacattagcatcagcggctatttgtggcatcgtacattcaataataggtggacaaccactattgatcgtgggtgttgcagaaccgacaattatcatgtacacttatatctacaattttgccaaaaatcagccaaacctgggagaaaaaatgtttctgccatgggctgcctgggtttgcatctggacagctgttatgctgttcctcatggcaattttcaacgttgcagctattctaaacaaatttaccagtttttttatgcaagaggcgataaaggggatggttggtgaattcagtgcccctgacggtagtaatcaaagtcaatcaacattccagttccagtggctatatattaatggtttgcttggatttatcttttcaatgggtgtactatatactgcattagctagcaggagcataatacctgcagcatggcaaaggagcttaattgcggactacggtgttccactgatggtgatactttggacatcattgtcatattcattgccaagcaggatcccttcaggggtccctaggaggctcttcaccccacttccttgggaacccaagtcgctccagcattggacagtagcaaaagatctgttttcagtccctacagtacatatattcctggctattgtgcctgccaccatggtcgcagggctctctttctttgaccacagtgtagcttcccagatgagtcagcagaaactctttattaatgtgtttcttgttctcataccatggaaatgtggtgtagaccttgatctgtggtgtggtcttcttggcattcctccatctaatggagtactcccccagtctccgatgcatacaagaagcctagcggtcctcaagaggcagttgctttgcaagaagatggtccaaactgccaaggagggcatgatgaataatgctaccagttccgaagtttatgtcaaaatgcaagatgttttcataaaaatggaccacggaggcgacactgtttctgctcacaaagaactgaaggacctgaaggatgcaattattccagaagggaatggatcaagaacagtgcctgaagtatttgatcctgaaaagcatgtagatgcttacttgcctgtccgggtgaatgagcagagagtaagcaatctgttgcagtccctgttgattactggttgtattggagttacaccgctcattcagaagataccaacatcagtcctctggggttacttcgcctatatgtccatcgacagccttcctggaaaccagttctgggagaggatacagcttcttttcatcacgcctcaaagacgctacaaggttcttgaaggagcacatgcatccttcatggagtcagtgcctttcaacacaatatgcaccttcacactcttccagctaatctatctgttgatcgtctttgggatgacatggataccagtagcaggaatcctcttcccactgctcttcttcttcctcattatcatcagccacctgagggaattagatgcagccgagtacgaagaactgaaaggttttacacctgatccatcagtgtgtgaggacgagtctgttcgcagcggagatgctcagcctggatatgcttccgaaatactcgaggaattcacgactcaccgtggagagctgaagcgcaggaactctaccttccatgatgggagactacttcagcttaactctgtcaagatgacgagagagctttctcgggttccttcttggcttacaagaatcctggaagaatacgcggtttctgaatccgagctccaattaagcatgggggtgcgaagtctcatagcctcattgcttacagagtattctctgaagcaagcaactcattttaggtactgactttgggggcaaatacacggggatgagcagaggaatgtagcagagctagaaaatgtttgtaaaaaataaagacaaaaagaaatgcatgttaaacacatctaagcttcaattcagttttgtgattttttattttttattttttatttttgcatattatagtgatgtttgttgttccttatctatgttttataccaactttttttacttccgttgcaacgcacgggcacatacctagtatatatatatatataggtaacaaaggaacttcacacatcgaaatagacgaggacttccatgaagactaaattttgcagataaaaaaaaggcatattttctgtagtgctcttaacatgcttctgcagccccttcaaaaccagtacttttggtttacctccataaagactgaacattgcagttcaaaataacacatattttctgtagcgctcattagcttgcttttctggcctttaagaccagcgttttttgttcgtataaatgtaggtacgcctactataatataatctccaagatcctgatgctgctacgtttccaaaaacttcaatccttcatcacatacacttttctggccttcaatgcttttatgttcatgccttatcaagctgagctgcaattctgttggttgaatcgtgatgccggcatgccgctatgttgttgactgtccagctttgcaccaaaccgtgaaatgctttcgttcatattgaaagtatgttcataaaaatgtcatgtcatgtcaacctccggtgcagggatttgggttaccctcctatttgacgcgtattaattcaactgtttacatgtgtcgtttgtaaaaactggcgagaaccacgagccctttaatagtaaaagaaaggttggagcactcaagagaccagtaagatgtgtagaaagagaaagtgggccgaaaatggaggaagttgaggggaaatcgaactcattttcactgaattacctaaaatcccaaaaattgtgaacatttaaaatttgcttgtgtgtagttcggaagtgtaccatcgtttactgaaccaatggacacgagagaccgtccaacacatgaacgagcgtccaaaggttcacccaataacgatggacatacatattatgtacctaaagtttacggggacactgtttaaagagagagcacaaagtcctgcttttttgctttagggtacctttcaaattccaaatgttttacaacaatcgatgcagaaactagcacacatgatggatcagatttctggcttgggaccctcctccgcagaggaggcgtcgcagttgcgcacagtataatcatagtcgatcagctggggaaaggatcctcatctccatcgtcaaaaccacaacaacaacaaaaaaaaagaacaaaataagaagggtgcacaaagaaggatgttttcaggaggaggcgggcgttgttgtttcgatcagaacatctggcttaggagcgccttctccgaagagaagagctcgaaaaatcgcacagtataatcatagtcgataatttggggaaaggatcatcacctcaaaacaacttgggatccgaaaaaacaaggaaataaaacgaaatcgatacttattaacaggagattagatctaccggtaccacgcccgcagctttgacgatgtgtatgagggacgggtttggagagacgcagtgcggcgtcg

SEQ ID NO: 216176 - DNA, 3178 bp, Zea Mays
cgcagacatcacgctccctccccatgaaacccccttcccccaatctacccctctctgtgcccccgacatccacgctgcctcagcccgccgtccagcgccctctctgcgcctccctccccacaccgcctcagcccgccgttcgccacgctccccacgctgcctccccccgtcgcccctccctcccgcgcggaactccgccatgctccccacgtcgcctccccccatcgcccaccagccgtcgcccaccagcccacactatctcacgccatggatggtggcaacagtccccgcccccgtacctcacacgcatcaggctgggctggccgatcccgccgccgcaaacgccgcgcccagccccgatgtcagcgcggcccgcccgccaacgcactttcggcctccccccgcccctcccttcgcccgcccacccgcaacctccgcgccatccgcaacctccgcccgcttctcacgccaccgacccgacctccgcgccatccgcaaccgtcgtgcgtcttatcccttctctaccgcgcactccgtgtggaacaacctccgcgtaggaagcctcctcccttccccatccccattccccaccacgcgcttcggggacggcgagctccgggcgggagcgaccgccgggcgcttctgctgctggtgcggaggaggaggagcggcgagggtggttcggcgcaggctccacggcggcggtgcccgagccgagttcgactggctggcgctctactgcaacctcacacgcggcgatgggccggacggtaacaatggcaagctggtcctggaggagctgctgtcgtgcgccgccacccaattttgttttccccaaatcctgagctgtgaagagaagaagaagacaaggacgcggcgagtacgatgacgagcgccgcacagcaagtcagcgaggagcacgatgacgcgatgaggaccacgagctgccgaggaagtcaaggacgacgacggcgcagagacccgcgagttgagacatcttcttcgccggcgtgaaccgcaaggctgagacatcttcttcgccgggttcggccacgccgacaccaccgacccgatccgtgtttgcaggcctctcaaattgaaccgattgcttcaagggtgccatacatgattgtgttaaccatgagagggattggcctggcactggttcattctacgggaacctcgacttcggtggagaatgtggtgtccctgtccaaactgtgttctacactccaactgaaaaccgtgcaaagttctggtacgcaacagattacgacatgtttagccttctgcattgctcacatggaagaggacttgagacccgggaccgagcagtacagattcatcgagcaatgccacattggcctcatgaagtttcacaatcacagtggtttttacaaggatttcagttcatgggttgggcagaggctttaccttttgcgtcagacagtgctctcctatgcacagaactatcaaaagcaagcaaagatgctctagagtacctgaggaaggctactttgtgctctataaggattgccaggaaagtgccagatttggcagagaacttcatgggcctggatgcatcattgttaaaggagaaacaccatgggtccttatatctgcaattcagctatgcacagaactatgcaaagcaagcaaagatgctctagagtacctgaggaagagctaggataaaactgttgattgttacagccctgggcaaggattgatgcttgctagcttcaagattaggaccctaccacttgatgagaacagatagtgctatactgctatgtacatctacatttctccagttatacataatcagatcttgcttctagccaactgttgcaaatacattgatcccttaggggttgagatggaaactgccacaagggagggaggacgtgagtcagctgcacgtgccgacatacacatcacttcctgcctcgctgtccttgatcgagacaaaatcagaagagctgtatctatatgtactccataccttgacgtatgcaggggctagatccataccccggcctatctgccctgtgaggaatgtatacttctgcaagtttgaatactttgacaccttgtgaggagcactctttgaaggtggagaaggtgttgttccaagggaagccagactaccaaaatgttatggttttttagcttctcaatagccggcgacagtgcatacgacctgccccgcgctggggctgtgtctgccttctcctccttcgatgccatgacactgtaaagtgaagccttcgagctaggcgcggaggccagggagatgctatgcgcccacatctaccacgccgccttcatattgctcaagctcgcgctccgcaactcctgccccatctgccgccatgagatgcccaccgatgctgccctgcgggctgccgccagcgtcggcgttgccgaacgcgccgccggggaggaacaagcgtgggatgcgccccacgcgcgcgactttcacctgcctcccaatttgatccgtgagttcaccaggaccagaacttcttcgatgatttgttggaccatccctgctgatacaaacacaatcattttgtggcaggaaatcaccatattagagcttacaaccttcgcatcaactgtttgtgcagcaatgagtttatcttaagttatgtttttttggtaatatcggttgactgcacttaagttctaataaagcatctttgatgtcacttgtaggaagagtttgacactcatgatccaaaggagaacactttgctactcccttacttgaggaaaaggtcaaaaatcattgagatagttgcagcgcgtgatatagtctttgctctatcacagttaggagtatgtgctgcttttagtagcgagacaaatcagagaatatgctttttgaacggaagtctagatgaagttatccgcaatttattttacaacaagaataatgattcattcaaaactgtatcagtatatggttctgaaaacttcagtgctctgcgatgcagaataactcgaatagagacccaacgtctctgcgagagaccttgggttcccttatccgaaggcaggcaccgctaagcctacagacgtggtggtgaagttctacgtcctctacgagaagtggcggaggggcgagctcctgggttcttcgtcagttgcgcggtacttgaaaagcatcact

SEQ ID NO: 216177 - DNA, 765 bp, Zea Mays
taatgatcaagtggtcgtgttgtacctatcctagccgtgtttgcaggcctctcaaattgaaccgattgcttcaagggtgccatacatgattgtgttaaccatgagagggattggcctggcactggttcattctacgggaacctcgacttcggtggagaatgtggtgtccctgtccaaactgtgttctacactccaactgaaaaccgtgcaaagttctggtacgcaacagattacgacatgtttagccttctgcattgctcacatggaagaggacttgagacccgggaccgagcagtacagattcatcgagcaatgccacattggcctcatgaagtttcacaatcacagtggtttttacaaggatttcagttcatgggttgggcagaggctttaccttttgcgtcagacagtgctctctcacagcaattgtccttttgcctacctgtatcattctgtcatactatctgcaattcagctatgcacagaactatcaaaagcaagcaaagatgctctagagtacctgaggaaggtaagggcatctatttcttaccacaaggcccaaaccaatataagctactttgtgctctataaggattgccaggaaagtgccagatttggcagagaacttcatgggcctggatgcatcattgttaaaggagaaacaccatgggtccttatatctgcaattcagctatgcacagaactatgcaaagcaagcaaagatgctctagagtacctgaggaagaaactgattgtgtggtagag

SEQ ID NO: 216178 - DNA, 2083 bp, Zea Mays
cgcagacatcacgctccctccccatgaaacccccttcccccaatctacccctctctgtgcccccgacatccacgctgcctcagcccgccgtccagcgccctctctgcgcctccctccccacaccgcctcagcccgccgttcgccacgctccccacgctgcctccccccgtcgcccctccctcccgcgcggaactccgccatgctccccacgtcgcctccccccatcgcccaccagccgtcgcccaccagcccacactatctcacgccatggatggtggcaacagtccccgcccccgtacctcacacgcatcaggctgggctggccgatcccgccgccgcaaacgccgcgcccagccccgatgtcagcgcggcccgcccgccaacgcactttcggcctccccccgcccctcccttcgcccgcccacccgcaacctccgcgccatccgcaacctccgcccgcttctcacgccaccgacccgacctccgcgccatccgcaaccgtcgtgcgtcttatcccttctctaccgcgcactccgtgtggaacaacctccgcgtaggaagcctcctcccttccccatccccattccccaccacgcgcttcggggacggcgagctccgggcgggagcgaccgccgggcgcttctgctgctggtgcggaggaggaggagcggcgagggtggttcggcgcaggctccacggcggcggtgcccgagccgagttcgactggctggcgctctactgcaacctcacacgcggcgatgggccggacggtaacaatggcaagctggtcctggaggagctgctgtcgtgcgccgccacccaattttgttttccccaaatcctgagctgtgaagagaagaagaagacaaggacgcggcgagtacgatgacgagcgccgcacagcaagtcagcgaggagcacgatgacgcgatgaggaccacgagctgccgaggaagtcaaggacgacgacggcgcagagacccgcgagttgagacatcttcttcgccggcgtgaaccgcaaggctgagacatcttcttcgccgggttcggccacgccgacaccaccgacccgatgcctctcaaattgaaccgattgcttcaagggtgccatacatgattgtgttaaccatgagagggattggcctggcactggttcattctacgggaacctcgacttcggtggagaatgtggtgtccctgtccaaactgtgttctacactccaactgaaaaccgtgcaaagttctggtacgcaacagattacgacatgtttagccttctgcattgctcacatggaagaggacttgagacccgggaccgagcagtacagattcatcgagcaatgccacattggcctcatgaagtttcacaatcacagtggtttttacaaggatttcagttcatggttgtacatagtttttttagttttttttttgaaaaatgaggcattttctttttaccggcggcggaggcgatggcaacaagcccttccctattcgaatctctgtgaccacagagcctacctcgctgagctcatcaccgagatcactggtgggatcaatgagctcgccgacgtagcacagttcttttgatgagagtggttcaactctattttgcttggttcagtggagatggtagcatggtgaaggataatgcctacgtgcgcagcaattttcatttttcttttagtttcttggagtcgtggaaatctcgctattcacaaggatttcatggcggcgttgttaatttgggggttgggcagaggctttaccttttgcgtcagacagtgctctctcacagcaattgtccttttgcctacctgtatcattctgtcatactatctgcaattcagctatgcacagaactatcaaaagcaagcaaagatgctctagagtacctgaggaaggctactttgtgctctataaggattgccaggaaagtgccagatttggcagagaacttcatgggcctggatgcatcattgttaaaggagaaacaccatgggtccttatatctgcaattcagctatgcacagaactatgcaaagcaagcaaagatgctctagagtacctgaggaagaactgt

SEQ ID NO: 216179 - DNA, 1973 bp, Zea Mays
cgcagacatcacgctccctccccatgaaacccccttcccccaatctacccctctctgtgcccccgacatccacgctgcctcagcccgccgtccagcgccctctctgcgcctccctccccacaccgcctcagcccgccgttcgccacgctccccacgctgcctccccccgtcgcccctccctcccgcgcggaactccgccatgctccccacgtcgcctccccccatcgcccaccagccgtcgcccaccagcccacactatctcacgccatggatggtggcaacagtccccgcccccgtacctcacacgcatcaggctgggctggccgatcccgccgccgcaaacgccgcgcccagccccgatgtcagcgcggcccgcccgccaacgcactttcggcctccccccgcccctcccttcgcccgcccacccgcaacctccgcgccatccgcaacctccgcccgcttctcacgccaccgacccgacctccgcgccatccgcaaccgtcgtgcgtcttatcccttctctaccgcgcactccgtgtggaacaacctccgcgtaggaagcctcctcccttccccatccccattccccaccacgcgcttcggggacggcgagctccgggcgggagcgaccgccgggcgcttctgctgctggtgcggaggaggaggagcggcgagggtggttcggcgcaggctccacggcggcggtgcccgagccgagttcgactggctggcgctctactgcaacctcacacgcggcgatgggccggacggtaacaatggcaagctggtcctggaggagctgctgtcgtgcgccgccacccaattttgttttccccaaatcctgagctgtgaagagaagaagaagacaaggacgcggcgagtacgatgacgagcgccgcacagcaagtcagcgaggagcacgatgacgcgatgaggaccacgagctgccgaggaagtcaaggacgacgacggcgcagagacccgcgagttgagacatcttcttcgccggcgtgaaccgcaaggctgagacatcttcttcgccgggttcggccacgccgacaccaccgacccgatgtacctatcctagccgtgtttgcaggcctctcaaattgaaccgattgcttcaagggtgccatacatgattgtgttaaccatgagagggattggcctggcactggttcattctacgggaacctcgacttcggtggagaatgtggtgtccctgtccaaactgtgttctacactccaactgaaaaccgtgcaaagttctggtacgcaacagattacgacatgtttagccttctgcattgctcacatggaagaggacttgagacccgggaccgagcagtacagattcatcgagcaatgccacattggcctcatgaagtttcacaatcacagtggtttttacaaggatttcagttcatggttgtacatagtttttttagttttttttttgaaaaatgaggcattttctttttaccggcggcggaggcgatggcaacaagcccttccctattcgaatctctgtgaccacagagcctacctcgctgagctcatcaccgagatcactggtgggatcaatgagctcgccgacgtagcacagttcttttgatgagggttgggcagaggctttaccttttgcgtcagacagtgctctctcacagcaattgtccttttgcctacctgtatcattctgtcatactatctgcaattcagctatgcacagaactatcaaaagcaagcaaagatgctctagagtacctgaggaaggctactttgtgctctataaggattgccaggaaagtgccagatttggcagagaacttcatgggcctggatgcatcattgttaaaggagaaacaccatgggtccttatatctgcaattcagctatgcacagaactatgcaaagcaagcaaagatgctctagagtacctgaggaaggtaagggcatctatttcttaccacaag

SEQ ID NO: 216180 - DNA, 319 bp, Zea Mays
aaaagctggttaaagtatgataagttagacagcagtccgcggttccaacttcccaccgctactccgccagtcgccagggatctcggcatctcgcgccgtcgccgggccgccgcctcgcccacgacgcccagtctccagcctctgggctttggcgccctcaccggccatgctgcgtgcgactcacctcccactcccccagcagccactgccggcgcattcttcctttgattaatgtaagtttggcccggggctggacggcggcggctaggatttggtgcccactgagctgcctcacgataagtcaccttctggaccaatc

SEQ ID NO: 216181 - DNA, 1253 bp, Zea Mays
aaaagctggttaaagtatgataagttagacagcagtccgcggttccaacttcccaccgctactccgccagtcgccagggatctcggcatctcgcgccgtcgccgggccgccgcctcgcccacgacgcccagtctccagcctctgggctttggcgccctcaccggccatgctgcgtgcgactcacctcccactcccccagcagccactgccggcgcattcttcctttgattaatgtaagtttggcccggggctggacggcggcggctaggatttggtgcccactgagctgcctcacggttcaacctcatccaaggaaatcctgactggagtttctctaaacttcagcataccacgcagagtacaagacttattcagctcctgagtgtatctagaatattcttttgatgatctcccgggttgggaagagagtttgcttctgcacttccaggtggtaaagttcttgacgggaatgccaactcatggagatgaagtgcatcttgtgcaagcatttcaaatgttgagccctcaactctactaggtgtaccttcaaaacacttactgaccacttctgaagcaagaccaagggcctcaaatatctgggcacctttgtacgacgccagggtggaaatccccatctttgcaagaaccttcattattccattgttagaagcatagaaatacttgtcaataagttcctttggatacagctgtccgtcatcttgaagaggtattttctcatcaatctgtaaccgccatatggcttcaatagccaaataagggcatatagcatctgcaccaaatccaagaaggctacagaaatggtgcacttcacgaggttcagctgaatcaacaagcaaccctatgcgtgtcctctcaagattcaagacaagatgctgatggacagctccaactgccaatagagaactgacagctacacgatctggagagaaacctgtatggaaaaatagttcaaacctgacattttaaacctccaaatgctagagagtatatgacaagtaattttacagaatcaagcattgagatgcatagcacaaaatcatataaatcaagtgtgttgtgagtatcaagcgttgggaaaagatgaaagcagactgcttagaataagggagtagaatttagatgaacttagaataagggagtaggatttagatgaacttagaataagggagtaattcaaaaaatttatctctttacatgctgtgatgaaaaataatagagaaagttaattattc

SEQ ID NO: 216182 - DNA, 9822 bp, Zea Mays
tcggcgaggaggcggcattctctctacttccctacgaagccgggcaatgtcggcgacgcagagcctggctctcaagctccgggcggctcccgcgccgggcaggccccgtggccggacgacggtgagggcagctggagcggcgcatgccggggcgctgctgcagcaccgccgctgcgtgtcgctggcgcagggcgggcggttcctccgcggcgcgccgctccccgccgcccagcggcgcccgcgggcattgccgtgggccgagcgcgccgcgcggcgccacggcggcggctcggtggtggcggcggccgcggcgggggtcaggtccatgtcgaagctaccgcagggcgacactgggctctacgacccgtccatggaccgcgattcctgcggcgtcggcttcatcgccgagctctccgccgagcccagccgcaaaaccatcgtcgacgccgtcgagatgcttgagagaatgtcccaccgtggcgcctgtggctgtgacaagaacaccggcgatggtgcgggcatccttgttgcactgccggatgcctttctcagagaggtcaccaaggacgccggctttgagcttccaccgcaaggtgagtacgccgtagggatgttcttcatgccccacgatgatgaccgacgtgagaagaccaagcttgtgttccatgagattgccgagtcattgggacatgtagtgcttgggtggcgtcgggttccaacagacaactcggacttgggcaaagcagcgcttgaaactgaaccaacgatcgaacaagtgtttgtgtctaagagcatgcactccaaggctgactttgagcaacagttgtacatcctacgtgggctctcaatcaagtccatccgtgaagctttatgtcttgagcacggaggaccaaatgatttctatacgtgctctctatcttcaaggactgttgtttacaagggtcagctgaagccaactcaacttaaagggtacttctttgcagacttaggtgaccaaaggttcaaaagttacatggctctggttcactcaagattctccacgaacaccttccccagctgggatcgggcacaaccaatgcgtgttttgggacataatggcgagatcaatacccttagagggaacaagaactggatgacagcacgtgaaggtcttctggagtgcaagggactcggtctatcaagggatgaaatgtcaaaacttctgcctatagtggatgttacctcttcagactcaggtgcatttgataatgtacttgagcttctcatccggtctggaaggagcttgccagaggctgtgatgatgatgatccctgaggcgtggcacaatgacgttaacatggacccagagaaaaaggctttgtatgaatacttttcggcccttatggagccttgggatggacctgccctagtgtcatttactgatggccgttatcttggtgctactctggatcgtaatggcttgcggcctggccgtttttatgtgacatacagtggccgcgtgatcatggctagcgaagttggtgtggttgatgtccctaatgacgatgtgatgagaaagggcaggctaaaccctggtatgatgcttttagttgattttgagaagcattgtattgtggatgatgatgcattgaagaaacaatactctggagctcgcccgtatggggagtggcttgagagacaaaagatacaacttgcagatattatagaatctgtatctgaaactgagagaattgctcctaggattggcatgcttccacaaaagagcgagaacaaggaagccttttgtattcatggaattttggctccgctgaaagcctttgggtacacggtagaaacactccaaatgttgctgctaccaatggccaaaaatggtgtagaagctctaggatccatgggaaacgatacccctctcgctgttatgtcaaacagagagaagctgccttttgattatttcaagcaaatgtttgctcaggttacaaacccaccaatcgacccaattagagaaaaaattgtcacatccatggagtgtatgattggtccagaaggtgacttatctgaaacaacagaacatcagtgtcatcgactgaaacttcaaggtcctttactgcatatagatgaaatggaggctattaaaaatatgaactttcgtggttggcgcagcaaggttcttgacataacttatcctaaagagtatggaagggaaggtttagaacaaactttggataaactctgtgatcaagctcgtgaagctattcatgagggatacaccattctagttctctctgatagaggtttctctccagatcgtgtagctgtcagttctctattggcagttggagctgtccatcagcatcttgtcttgaatcttgagaggacacgcatagggttgcttgttgattcagctgaacctcgtgaagtgcaccatttctgtagccttcttggatttggtgcagatgctatatgcccttatttggctattgaagccatatggcggttacagattgatgagaaaatacctcttcaagatgacggacagctgtatccaaaggaacttattgacaagtatttctatgcttctaacaatggaataatgaaggttcttgcaaagatggggatttccaccctggcgtcgtacaaaggtgcccagatatttgaggcccttggtcttgcttcagaagtggtcagtaagtgttttgaaggtacacctagtagagttgagggctcaacatttgaaatgcttgcacaagatgcacttcatctccatgagttggcattcccgtcaagaactttaccacctggaagtgcagaagcaaactctcttcccaacccgggagatcatcactggaggaaaaatggagaagtacaccttaatgatcctttttctattgcaaaattacaggaagcagctagactcgacagcagggaagcatacaaagaatattctagatacactcaggagctgaataagtcttgtactctgcgtggtatgctgaagtttagagaaactccagtcaggatttccttggatgaggttgaacctgcaagtgaaatagtcaagagattttgtactggagcaatgagttatggatccatttccttggaagctcatacaacgatggctaaggctcagaatataatgggagcaaaatctaatacaggtattttccaccatggacgataatgaccaccctaaccattcttatgaataccatatatgtttaggcaaaattgatgttcttaaatgccaatgaactagaaaaattcaacctaccggggtaagacatcccatgagtattttgttaagaagacctcacacaagttgagaaaccccctaaacccttgccccacacccatccatattgacatcgtagcccatgtaagaatggtcatggccttaggccggaccttaggcctgagctttgacatatgggagacgaaatgccaagtgaactatatgttgattactttattcttggcctttttctatgtcacatgccatttgaggcacagcaaacaggttgaagttgtttcataacccttgttcactgcattttgtatgttatgatgtttaaatttcttcttgcaaccatgtgccttattttatctatgatttgctcatcatagttattcgcttcaagtataattgctaattggttactataccctcccccccggaagggaggtgagaacattggcacataatatatcagaagaaaaatagttggccaagtttttatgaaaaaaagcagggcccaaaaaccgaacaactgaaaattggcccagttttcaagaaaaagaattgacccagcattgctgcataattgccaagtacagttggtaactagttccatttcatatgctaactgggatgcatatatatgatacgaaggcgagggaggagaacaatcgtctcgcatggagcctcttcctgatggttccatgaatccattgatgagtgcgatcaagcaggttgcaagtggaagattcggagtttctattgattatctgtcaaatgctattgagctgcagataaaaatggctcaggtatatttgactacactatacacctgcttgaagtacctaagcaccatggggaacctcttccctgaattgctcgaaagaacaacttggttctgcatcactatgtactatgcttgatttgttgtacctaatcctacaacatatgctggttatttgtcatgttgaagaaatttatatcttttacagggtgctaaacctggtgaagggggcgagctcccaagtcataaggtcatcggcgacattgcaattacaagacattctacagctggcgtaggactcatcagcccacctcctcaccatgatatatattctattgaggatctcgcacaacttatctatgaccttaaggtatgctctcatgatgattttttttcttttccaggagtcttgctatatatgcttatgactatctttttaaagattatgttgttgatgttacttagtacaagcatcatatttgtagttgaagtcgcacttgccagcatagttcttccttaaaatgttgctttcttatgttaaggttctccatttttctgtagaatgcaaatcctggggctagaattagtgtgaaactagtctctgaggctggtgtgggagttgtcgcaagtggtgttgttaaaggacatgcagaccatattctcatctctgggcatgatggaggcacaggggcttctagatggacaggaattaaacatgctggacttccttgggagcttggattggctgagacacatcagactctagtggcaaatgggctccgtgcccgagttgtccttcagacagatggacaattgaaaattggtagagatgttgtcattgcttgtttacttggggcagaggaatttggatttagcacagctccactaatcgtacttggttgccttttgatgaggcaatgtcatactaatacctgtcctgttggtattgctacacaagatccaattctcagagaaaaatttgctggaaagccagagcatatcataaacttcttcttcatgcttgctgaggaggtacgagaaattatgtctcagcttggtttccgtactatcaatgaaatggttgggcgatcagatatgcttgaggttgattcagatgtactgaaaggcaacgagaaacttcagaacattgatctatcactgatcttgaaaccagctgctgagattagccccgaggctgttcaatattgcgttgagaaacaagaccatggccttgatatggcattagataacaaactcatagcatcctcaagagctgcccttgaaaaaagatttcgtgttttcattgaggcaccagtcaagaacactgatagagctgttggcactatgctcagccatgaagtgacaaaactgtttcgaatgcctggactgcctccagacaccatccgtgttaaactcaatggaagtgccggtcaaagttttggtgcctttctctgtcctggagtcactcttgagcttgaaggagacagcaatgattatgttggtaaaggattatctggtgggaagattattgtttaccctcccaaaaacagccgatttatcccgcaggacaatattgttattggtaatgtggctctatatggttctaccaaaggagaagcatattttaatggcatggcagctgaaaggttttgtgtccgcaattcaggtgcacaagcagttgttgaaggaattggcgatcatggatgtgaatacatgacaggaggcactgttgttattctgggaaaaactggtagaaactttgccgctggcatgagtggcggcattgcttatatttatgatgtggatgggatgttcagtacccgttgcaatcatgagttagttgacctgtatagtgtagatgaagaggatgacattacaacattaagggtgatgatagaacagcatcgactcaacacagaaagtgttttggccaaatatatactttctaatttcgaggatattcttccaaaatttgtaaaagtatttccaagagattacaggcgggttttggagaatatgaaggcagaaaaggttgccaaagaagcagagcaaaaaaggagaaaaaaggggtgggataagaaggcaggtgaaatgattaaagctccaaatggtgtttcagtaattacaaaggaagtacagaacaaaaagtcatctagccgaccaacacaagttctcaatgctgaaaaacctcgaggttttgtaaaatatgagcgagaggggatctcttacagacatgaaaatgagcgtattaaggattgggatgaagttataaatgaattggtttgtgggccactgataaacacacaatctgctaggtgcatgggttgtggcacgcctttctgtcatcaggtgatacttaaaatttcaagttctgctctttttaatgaaatctattatatttcaagccttttgtttaggtctgtaaaattgtatggttttttcattgactttattattgatctaaaggagtccacatacatgtgcagtatacatgggttagctccgcattccgaatagaatttaataaatgtgctactctgaaaatataatgcagaaatgaagatattactaaaaccaacaaccaaagtgtgctgtctagggtttgtcacaggcatatttttcgatcattagcccagatagttatctattgttgctgtaaagcttgctttccattgtggtagcttaaattaattatcatatcctctttgctatcaaattttcagtattttaaagctgttatctatgctgacataaaaagaaccagtaatattgtcttggtaaatttacacaagtttgtgtacacattgacatcaaacagtcaagattcatgaagggggtgtttggtttgtgtaataaagtggtccaccatcatatcactctttagtttttttggttggtttctgggatagaatgagttgatacatcgccacctcattccccacaggttaataatcagtactagtacaaggaatatggtgtttccaccaaatttaaggaacagactcatgatgcaccacccctatctagaatgggttgatttctcaaaccaaacatcccataaatgtcttgccagtaattattacatatctaggtgactaggtctcaattaaccctaatacctaagctacaagttaattgcctaaccaaaccatttaattgcattgttcttcagtaaataatagtgatattgattcatatacttttcaaatttattacaatttgaatttcttatgcttgctggttggtatgaaaatattaatattttggttgtaattttcttgaatcaaaattctacaggaaaattttggtgctgggtgtcctcttggaaataagatccctgaattcaatgaattagtttatcagaacagatggcgtgaagcgttatatcgcctacttgagaccaacaattttcctgagttcactggacgagtttgcccagccccttgtgagggttcatgtgtgcttggcattatagagaatccagtatctataaaaagcatagagtgtgccatcatagacaagggcttcaaagagggctggatggtaccatgccctccccttcatagaacagggtatgcttttgttgtcatctttggcttgctttgctactgcatgaatgaaagcatgccataatagttgcattgaaacgatttaatatgcaggatgacagttgctataattggaagtggaccggctggtttagctgctgcagatcaactgaacaagatgggccattatgtagttgtgtttgaacgtgatgatcgtattggagggctgatgatgtatggggttccaaacatgaaggcagacaaagctacaatcgttcagcgccgtgttgatttaatggataaggagggagttaaattcattgtgaatgcccatgttggaactgatcctcggtactctattgagcggctccaagctgagaatgatgcagttattttggcttgtggtgctactaggccgaggtgattcaataacacttaaaaatgagttcaaaatgcctaacatcatccttagcaccaatatgacaataatataagctctaaactatatggttatgatgttaaataggagtataattataaattgtatgaatttgagaatttgctaacacctagagcattatccttgaacagagatctctctatccctggacgtgaactgtcaggcatccattttgctatggattttcttcatgccaataccaaaagtttacttgacagcaatttagaggatggtaagtacatatctgctaaagggaaaaaggtagtcgtaattggtggtggtgacacaggtacagattgtattgggacagccatcagacatgattgcagcaaccttgtaaaccttgaacttctaccagaaccgtctaaagagagggcccctgacaatccgtggcctcagtggccgaggatattccgaatagactatgggcaccaagaagcagtcagcaagtttggaaaagacccaagaacttaccaaatcctcacgaaacgttttatcggagatgaaaatggaaaagtgagggcccttgaggtagtacgcgttgagtggagcaaagtggacggaagatttcagtccaaggagatagaaggttcacaagaaatcattgaggcagatctagtcctcttagctatggggttcctaggtcctgaggcggatattgccaagaaactgggtttagagcaagacagccgatcaaatttcaaagctgagttcggaaacttcgcgactaacgtggaaggtgtgtttgctgccggggactgcaggcgtgggcaatcactggttgtttgggcaattgcagaggggagggaagctgcagcagccgttgacaaatacctgaccagagaaaaaacgaatgctgatgaggacgttgccggcccaagttcaagtggatgcctggttcaacccgttgcggcataagcaaagaaagcatttctgtaataatagctctttggtaggtagattgttttacccctttttcatgctgaactctttgtagctctaaaaggattaaggaaagggctcatttagcagaaacagagagcccgtgtgttgcaggtaaagcagtaggaaaccttttttttttgggtgacacggttgttgttcttgttctcttcccgtgaagaaataccgggcttgtaggtttaggaaaatgtatagctgattcagatggaaagcttatgaccaattgtttataaaaaaactatactcgcttttgtcttcttttttttttcggtgcatgcgtgaacatgcccttgtacatgtgtggatctgttgtgctctgtattatagggcttctctaatgcttcagcttagcattagccccatcctttatgtctgcatctgatatccatatcacaccgtcagagactcagagtgtcttccagatgtaacaataacaagcgattcatctaacaaaaggctatatatcacatagatagactttattaaatgatataatttttcaaaaaaccataattccaattctcatgttatctcaccgtgaggcagctcagtgggcaccaaatcctagccgccgccgtccagccccgggccaaacttacattaatcaaaggaagaatgcgccggcagtggctgctgggggagtgggaggtgagtcgcacgcagcatggccggtgagggcgccaaagcccagaggctggagactgggcgtcgtgggcgaggcggcggcccggcgacggcgcgagatgccgagatccctggcgactggcggagtagcggtgggaagttggaaccgcggactgctgtctaacttatcatactttaaccagctttt

SEQ ID NO: 216183 - DNA, 3326 bp, Zea Mays
gcccgatctggtttatacgaacgtaacaccgaggaactacgatccccaacggcccaattcaacccgccccacgcgacgccgaccgcagatccttcatctctttcctccctcgtaggcgaacccgactcaaaccctagccccctctccttgccatccccgcccatggatcgcgatcgctcctcacggcgcactcgcaacgacgacgggcaccaccgatcccgcggccgggacgacgaccggcaccgccgccgtagtcgccacgacaccgaggatcaccagcacgacggtggagacgaggaccgtcgccaccgccgccaccgcgacaaggacggtggcagaggcggcgaggatgaccgccggcaccgtgaccatcacgataaggacgacagccgttgccaccgctaccgtgacggcggtgacgacgatcgccgccgcgggaaccgacgttccgtttccccgtccgagtccccgccaccctcggcgaagcgggaccgctcgtctagccgcccccgggagcttgtcgagcgccgcgactccaccgaccgcgagccgcggtcgccgtcgcggaagagaaaggggcacgagggcggtggcgacggggacgagcccggccgcgaagggggcaagcgggccagggcctccgtagacccgcctccacccaaggaggagaggcctaggcgggagcgccggaggtttgaggatgtcggtgcgaatgggaagaatggtgatgtgagtaagtcgagtaaggaaatctcatctcatgggcagaagggggagttatcaattaacggagattcacagaacggcaatgggcctaatgctggttctcagcaactgctcagtgccgttcctatgccatcttctgttcccattccttcaaagatggaagtgcaacatctgctgctggcaaaagtagtaacctatctcttgatgctttagccaaagcaaaaaaagctttgcaactgaagaaggaactgtcagaaaaactcaagaaattacctatgcttaataataagcttggtacatctgttactgctacacaagtttctaaagaagaagcaaaaacttctgtatcagctgtagatgcacaactcttttctaaaggagaagcaaaacctactgatgtttctgttctgccaactagtaccatctctggaacgccggccgtaggtggtgctatcggtattccaggtcttacgaacattcccaatcttgaatctgtgaagcgagcccaagaacttgctgctaagatggggtttcgccaagatccacaatttggtcctcttatcaacttattccctggtacatccactgaagttactgtgccacaaaggcctgcaaaggctcctgttcttcgccttgatgcccaaggtagggaaattgatgagcagggaaacgttatcagcatgacaaagccaacaaatctgagtactctgaaggtcaatataaacaagcagaagaaagaggcttttcaaataatcaagccggacttggactctcttgcaaaatcaagtgttcattttgatgaacggatgggcataaaccaaaagaagctccttcgtcttaaaaggccaggatttcagttcgttgaagagggtaaactcactaggcaggctgaattgcagaaaattaagagtcaatttggtgaagcgcaagctaaagagctcaaagtaaagcaagcccagcttgctaaggcaaagacagaagtagacatgaatccaaaccttattgaggttgctcttggtgtgagagctccaaaacaaaagcagaaggaagagatccctgaaattgagccatgggatgcaaaaattttactttctgccacatatgaggatgtctctgtggagaaacttaatttggacaagatcaccatatatgttgaacatccagaaccatatgatccacctgctgagcctgcaccaccgccgccccagccactgaagttgactaagaaggagcagaagaagttgagaacacaaaggcgtcttgctaaggaaaaagataggcaagaaatgattaggcaaggcctcttggagccacctaagcccaaggtcaaaatgagcaatcttatgaaagtgctaggctctgaagctgtccaagatcccacacggatggagatggaaataagaactgcggctgcagagcgtgagcaggctcacgttgaccgtaacattgcccgcaagctcacaccatctgagcgccgtgagaagaaagaacggaagctttttgatgatccaactaacacagtggagactatagtttgtgtttacaagataagagacctgtcccatccacagacacgcttcaaagttgatgtgaatgcacaagagaataaactgacagattgggctgctgctgttggtggtgatgaagacgcagaagcagaagcggaagctgacaagccagtgaatagctgtgaattggtctggcagggtagtgtggcaaagcccaccttccacaggttcactgtacataactgccggagtgaatctgcagctaagaagatattcgttgatgcttctgttcctcactactgggatcttgctgtcaattcctcggagggttctccctgagcaaagcacctgttcagaaccttggtagctactgctgatctttgctggctacatgctagttatgtgtggccagtgttatagcgcttgttatggtaagacccttaccacgagtatctacatcaatggcctcatcagttgaagtactgaactcagtaatgcctggtgttagggggtgtttatccctccattttatttcatttgtccctagattgccaaatacagccatatttgtcaatttaggaactaaaatggaataaaatgtagggactaaaaattagtccctataaaccgaacacccccttaatctgttgtgaacatgctatttcagagatgttattgttggattttcctgtggcctagaaactgttatgtgagcaactgttgaattttgcacgctcagcgtgcatttggaataaaccaattgcatcaaatgactgcgtgtatttagtattgttgcggtgtgaattgcgggcagtgcctgcacatcaattacaaattcatcaacttgtgtggatgtttataatggttcatcaattttaaaagtataattctggatcaataaacttttcaagctcccttggctcgaatttttttttcaagttgtttaacgtactcactcggtcctaaaagaccatctcaagttgtttaggcacacaattacaagttcatcaacttgtgtggatgtttataatggttcatcaactttaaaagtataattctggatcaataaacttttcaagctcccttggctcg

SEQ ID NO: 216184 - DNA, 2713 bp, Zea Mays
gcaggcacacgggatcctgactgaggtaggttgttgccatttttgttccctcacccagtccgtctcaccacttcaaaaaccctctcctctctcatccgccttcctggcgattgcggcgacgaggtgacgatagagctgcccccgcaaggaaaacggacaagagaggcggaggctgatagggagaggagacggaggaccaagagcggcgtcgatctaaaagcgttggcggcggccatggccaccgcggaccggacccggactttcatgaaggacgtcaaacgcgtcatcatcaaggtgggcactgcagtcgtcacgaggggtgatgatgggcgactggctgtgggccggttggggtgtctttgtgagcaggtaaaagagctgaatgtcttaggatacgaggtgatccttgtgacctcaggtgctgttggtgtggggaagcagaggctcaagtacaggaagcttgtcaatagcagctttgctgatctgcaaaagccacagatggagctggatggaaaggcttgcgctgctgttggtcagagtggcctcatggctctttatgatatgctatttacccaacttgatgtgtcctcctcgcaacttcttgtgacagatagtgattttgagaatccaaactttcgggagaggctctgtgaaactgttgagtcactattagaccttaaagttgtaccaatatttaatgaaaatgatgccatcagcactagaaaggctccatatgaggattcatctggtatattctgggataatgacagtttagctggtcttttggctattgaacttaaagcagatctccttgttctactaagtgatgtagatggtctatacagcggtccaccaagcgaaccgggatcaaagatcattcatacctacattaaagataaacattacagtggaataacttttggggataagtcacgtgtaggtagaggaggaatgacagctaaagtgaaggctgcttttgtggcttcgaacagtggcacacctgttgttattacaagtggatttgcatctcagagcattgttagagttctccaaggagagaagattggtactctcttccataaggatgcaagtctgtgggagccatccaaggatgttagtgctcgtgagatggctgttgctgcaagagaatgttcaaggcgtctgcagaatttatcatcggatgaacgcaagaaaatattgttagacattgcagatgctttggaacaaaatgaggatctaattagaactgaaaatgaagctgatgtatctgcagcacaagatgctggatatcagaaatctttggttgatagattgacattgaagccagaaaagatagcaagccttgcgaaatccatacgcactcttgcaaatatggaagacccaatcaaccagatactcaaaagaacagaggttgctgaagacttagtgctcgaaaaaacatcttgccctctgggtgtgctgttgattgtttttgagtccaggcctgatgccttagtccagattgcgtctttagcagttcgaagtggcaatggtcttctcctgaaaggtggaaaagaagccatgagatcgaacacagtattacataaggttataactggcgcaattcctgacaacgtgggtcaaaaacttattggccttgttacaagtagagatgaaatcgctgatttactaaagcttgatgatgtcattgatcttgtcattccaagaggcagcaataagctggtttcgcaaatcaaagcatcaactaagatacctgtcctcggtcatgcggatggtatttgtcatgtatacattgacaaatcagctgacatgaatatggcaaaacgaatagtgatggatgccaaaactgattacccagcagcctgcaatgctatggagacattgcttgttcataaagaccttataaaggctccaggtcttgatgatatactcctatcactcaaaacagaaggagttgctatttatggagggcctgttgcacatgaagtactgtgtattccgaaagcagattcattccatcatgaatatagctctatggcctgcacaattgagttcgttgatgatgtacagtcagcaattaaccatatacatcgttatggaagtgcacatacagattgcattatcaccacagatgataaagtagcagaaacttttctgcgtcaagttgatagtgctgctgtatttcataatgcgagtacacgattctctgatggggctcgttttggattgggtgccgaggttggcataagcacagggcgtatacatgctcgcgggcctgtgggtgttgaaggtctcttaacaacacgctggatcatgcgaggaagtgggcaagtggtgaatggtgacaagaatgttgcatacacccataagaaccttcccttacaatgaggcaggagcatagaatggtgaatcttttcgattgaggactgtgaatccatggatgttcagtcattgtttgtgtagacattgtggtgagcttggaggccaccccacctccccaataaagcagtgctgggagtaatagagcactgatgtactgagggtgcctaggttaaacaagaggaaccggttatatttgttttgcggtcgaacacaaacaatttttgttggtgacttgtttcttatgattctacatatttcaaggtttatgtgctgtcctaaccgggttctttgataccgggtattttggatactgtaggcatactgtaacgac

SEQ ID NO: 216185 - DNA, 3710 bp, Zea Mays
gtagattccggaagctctctccccggcggtaggggacggagacggagacggagacggagacggagacggagatggtgccgggcccaccccagttgtcgacggaggcagacatggcattatcttattccggtccaccacgaccttcccgacgggccgcggcggcacacatttgatccccccctcccccacatggcaccgcacctcacccctccaccactccctcctcccgtcctcctcccgtctcgccgtcgcctcctgctcctcctcttccgccgccgacgtcgccgctagctgccgcttttcgccgtccggtcacactagcacagccagcagcagcaaggtttcatcccatggacttcgacccctcccccgcctccgcccacggggacggcagcggcggcgcctggcccttcgactcgctcaccacgtccatgctcttctcctccgtctccgcctccccgcagctgccggccagctcctcgtcctggctcaccccgccctcgccgctctggctcttcgaggaccgccacctgctcccgctcgacgccccctccgccgcgccggaggcagccgtcgcagccgccgtcgtcgaggaggtccagcgggcacgctccgggaattctcacactacaggcaagagagttgatcaaatcaatcacaagtggcagtttcatctatctctggacgaagatggcacagataactctagcttcttcaaggagaagcttacacaagcccttcggtacttcaaggagtccacagatcaacatctgttggtccaagtctgggcaccagtcaagaacggagaccgctatgtgcttactacttcaggacagccttttgtgcttgaccaccagagcattggcctacttcagtacagggctgtatccatgatgtacatgttttcagttgatggggaaaatgctggagacctgggcctacctgggcgtgtctacaagcaaaaggtgcctgagtggacaccaaatgtgcagtactatagcagtggtgagtatcaacgacttaaccatgcgatcagttacaatgtccatggtacggttgccctgcctgtttttgatccttctgctcagtcgtgtattgctgtcgtcgaacttataatgacatcaaagaagataaactatgcctgtgaggtcgataaagtctgcaaagcacttgaggcggtaaatcttaaaagcactgaaatactggaccatccaaatgtccagatatgtaatgaaggccgtcaagcggctctggtcgaaatactagagatcttgactgtagtatgtgaagagcacaagcttcctttggcacaaacctgggttccttgcaagtatagaagtgtattggcacatggtggtggtttaaagaagagttgcttaagtttcgatggaagttgcatgggggaagtctgcatgtcaactagtgatgtggcgtttcatgtgattgatgctcatatgtggggatttagagatgcatgcgtggagcatcacctacagaggggacaaggagtttctggaaaggcatttatctcacacaaaccttgcttttcaaaagatatccgcaagttctgtaagttggcatatcctcttgtacactatgctcgcatgtttgggttgtctggctgctttgcaatatgcttgcaaagttcttataccgggaatgacgactacatattagagttctttttgccactcgattgtattgacgaagatgaccaaaatgccttactggagtctatattaactctgatgaagcggtgtcttcgtagcctaaagctagttgatgacaatgatttgagtggggtttctcttcaccttagtaatgtgctaaaacttgagaatgaagaatccaaaacagatgcacagtttgatggttcccttcgcgaatcacctgaggatgatagacatggaggatcccacaagtttgataatgagaaccagaaagttttggatatcacagagggacaattgttgactgatgactactctcaagacaatggtacttctgttggcagaccaaatggtagtggtgcttctgattcttcattgcttcacaaaaccaacaaaccccctgaaagaagacgtgggaaagctgaaaagactatcagtttagaggttcttcagcaatatttttctggaagcttgaaaaacgcagctaaaagccttggcgtttgtcctacaaccatgaaacgcatctgccggcagcatggaatttctcgttggccatctcggaaaattaataaggtcaacaggtcctcttcctatacctgttggcccttcaccagagtctctcaatgtagagaaattaactcaaagtaaagtggcagaactttcgaatcttgctgttggtgttgacagagattctttgcagaagtcgcttgaaaatgatgaccattttgatatagtcatggcccagcaaggatttatagacaataacaatgacgtgcagcttgaagctgacaaagcttctcactcgagaagttcatctggagagggcagcataaattcacgcacttcagaaggctcatgccagggaagtccagcaaaccaaacatttgtttgtaagccaatcgcttcaatgttcgcagaacctcaacttaatcaagaggagttcaacaaagaaccttttcaagaaccacaactaccactttcaaggatgctgattgaagattctggtagctccaaagatttgaagaatctcttcacttcaacatcggaccaaccatttttggcccctcccaacaacttggtgtcaatgaagcattcagggactgtaacgataaaggcgagttttaaggaagatattgtgaggttccgtttcccatgctcaggtggtgttattgtattgaaagaggaggtagcgaagaggctaaggatggatgttggcacgttcgatatcaagtatctcgatgatgaccatgagtgggtaaagttggcgtgcaatgcagacttggaagaatgcatggagatctcgcggctttctggcagccatgtcattaggctactggttagcgatattgcagcacactttggcagttcttgtggaagctctggttgatatgcgtgtcagccttttgctttgatcaatgtagactcgaaagttcagttccacttggtagttttgttgctagttagctttagctgtttcattgtgtttgataaatgtatcattgtattttacccccaaaaaaatacatgtaattgtgcagaacgcacttgtagtcaactttgtatatatcatgtgctggaaattctatttcaagttataaaaactgaatttgttattgtctagaatttgcacagaacagtgttgggttaaaatgattacattgtattggaattgcagcagattttcgtaggtcataattccatgctgtaaacacgtttatacattttatttatatctttgtgatccatgaagttgagacgcatgctggttttaacttattgcggtgatagaattggcaacttcataaagtagtatcacttgcactttactccctccatttctttctattggatgtaatatattaaaaaaaattgaacttcaaagttttgacaaaatggttaaatgtgttaaattagcttcatgcttagtgtctaaaaatcatatcaataaaattcacatatctcacgtcttttaccatggcgttgattttatagaaactgtatatatatatatatattaatgtgttttataaaaaaaagaaa

SEQ ID NO: 216186 - DNA, 4780 bp, Zea Mays
atatttgcagattctagttgtccattgtgctgcactgcagcagtagacaatcgtgtttttcggtgttttgtctgtctctccttgatcattcagatgcctgtacagctcaactgctatagctagctgtatatatctggttgaagaggactaatctagcaacaatgtcatcgcttcagttattgcaactaacagaacgggggcgcaaccttttgtcttcaagaaggagaacacttgcaattgtttctggtgcagtacttgctggtggagctttagcatatgcgcagtcaggtcgatggaaaaaacaccaggaagcaaattcttgcagtgatgcaaactcacatagcagtaataacggaagaactagtcagaacggcattgatggtaaattggttaaaacaaggaaaaagaaaagtggactgaagtccttgcattttttggctgctattttacttaagaagattggcccgaatggaacgaattaccttattggcttgatactaacagcagtcttgcgtacagctgttggccacagattggcaaaagtacaaggatatttattcagatctgcattccttcggcgtattccgacctttacacgtctcattattgaaaatcttcttctatgctttctccaatccacgttatatcagacatcaaagtacttaacagggtctttaggcctgcgcttcaagaaaatcttgacagatcttgtccatgctgattattttgagaacatggtgtactacaagatctcacatgttgatcatcggatcacaaacccagagcaaaggattgcaagtgacataccaaagttctgctcagaattaagtgaccttgtacaggatgatctggctgcaattgtagaagggttaatatacatctggcgcctctgctcttacgcgagtccaaaatatgtgttatggattctggcatatgttataggtgctggtggtacaattagaaaattttctcctgcttttggcaagctgaagtctacagaacaacagctagagggggaatatcgtcaactccattcacgattgagaacccatgctgagagtgtggcgttttatggtggtgagaacagagaagcatcacatattaagcagcggttccgggcacttgttaaacacttgaatgttgttcttcatgaaaactggtggtttggcatgattcaagattttcttctgaagtatcttggcgccactgtgggagttatcctaattattgaacctttctttgcggggaatcttaaacccgaatcatccaccttaggacgggcagagatgttgagcaatctccgataccacaccagcgtgataatatcactatttcaatctcttggaaccatttctattagttcaaggcgcttaaatattctcagtggctatgctaatcgtattcatgaattactggatgtctcgcgtgagctatctggtggccgtgatagattgattactcaaaattcttctgatggaaattatattagcgaggcaaattatatagagttttcagatgttaaggtggtgacaccttctgggaatgtcttggttgataatttgaaccttcatttggagtcgggctctaatctgttgatcactggtcccaatggtagtggaaaaagctcccttttccgtgttcttggtggtctgtggccaatggtatctggtcatattgtcaaacctggtgttggttccaatctcaacaaggaaatattttatgtgccccagagaccatatacagctgttggaacgcttcgcgaccagttaatctatccactcacagcagaccaagagactgaaccacttagctatggtggcatggtggatcttctaaagaatgttgatctggaatacttgctagaacgctatcctcttgataaggaagttaactggggtgacgaattgtctcttggtgagcagcaaagattaggaatggctagactgttctatcataagccaaagtttgctatcctggatgaatgcactagtgctgttacaactgatatggaagagcgcttctgcaaaagggttcgagcaatgggcacatcttgcataacaatatctcaccgtccagcattagttgcgtttcatgaaattgttttatccttagatggtgaaggagggtgggatattcaggacaacagaaatggttccttctctcccgaagttgagtttgatgtgctgaaggcatcagaaagtgatcgcaagtctgatgcacttaccgttcaaagggcttttatcaccagcacaaagggaaatgcgtcaatgaagcccaagaaacattcttattcaacagaggtcatagcatcttcccccagtatggagatagaacatacagtacaatcatctattgtcacacaattgcaatgctctccaagacctttgcctgtcagagttgctgcaatgtctcaaatactggttccaaagctatttgataagcaaggagggcagctgcttgcagtggtacttcttgtattctcccgcacttggatttcagaccgtatagcttcattgaatggaacaagtgtcaagtatgtcttggagcaggacaaagctgccttcattcgtttggctggcactagtgtgctgcaaagtgcagcaaattccatcgtgtcaccctcactgaggaaccttacttcaagaatcgcccttggatggcggattcgcatgaccaatcatttgcttcaatattatttgaaaagaaatgctttttacaaggtattcaacatttcaggtatgagtatggatgcagatcaaagaatgacacatgatgtagagaagttgaccaatgaccttgctggcttgcttactggtcttggttttctaagagctgtgtcccctgactttggggatcttgcaaaccaagaacaagaacttgaaggcacgttcaggttcatgcactcaagattgcggacacatgctgagtcaatagctttctttggtggtggatcaagggagaaagctatgattgacgctaaattcatgacattgctcaaccactcgaaggttctattgagaaagaagtggctttatggtatttttgatgattttgtgacgaaacagcttcctcataacgtgacatgggggctgagtatgttatatgctttggagcacaagggagaccgagctttgacttcaactcaaggagagttggcacatgctctgaggttcttggcatctgtggtgtcacaaagcttcatagcgtttggtgatattcttgagttacacaagaagttccttgaactctctggtggtattaacaggatatttgagcttgaggagcttctacaggcatcacaaagcaatcctgtcatgccttctgatgccacaaatgccggttccgaagaaataatttccttccgtggcgtgaacattgtgacaccatcgcaaaagctattggctagccaactgtcttgtgatgtatctcaagggaaaagccttcttgtgactggtccaaatggtagcggaaagagttccatctttagggtgcttcgaggcttgtggcccattgcttctggtagtcttagcaagccatctgaaggaatttttaatgttcctcaacgtccatatacttgtcttggaaccttgagggatcagatcatataccctctctctcacgaggaggcaaagttgaagatgctctcaggcgaaacaagtgacaagtctacagcttccgagctgttggatgatcacctgaggacgattctagagaatgttcgcttgctgtatcttctggagagagaaggttgggatgctaccactaactgggaagatactctatccttgggagagcagcagaggctggggatggctcgtctgttctttcactgtcccaagtatggcatcctcgacgagtgcaccaatgccacaagcgtggacgttgaggagcatctgtacaggctagcaaccaacatgggcataacagtcatcacatcctcacaaaggcctgctctgattcccttccattcgttggaactgaaactcattgacggcgaaggaaagtgggagctatgttccatccaccaataaccgattgccatcaaccagtttatttatgttcaccggagtagggtatttacaagttgcaacgcacagaggaaaaaaaactcgtccactcgggtgtagagtgtgtgacggagtcttttttttttttggtttcccttttcttttctttttctctcccctttgatggaaatcttgcgatacggaaagggagggaggaaggaaatatacggcaggaaaggaaagtattaggagaggttatagatgcaggcttcgtcatttgggatagcatagtacatgttcctggcatgatatgccagcctgattgatttttatacgagatacagaataagttaaaataaaaatggatatggcacaaagtgtgcccttgtaaattaaatgggaaactaatctataggaaattcatcctctctgtgtcgcccttgcatcgaacgtatcccaatccatatgtaatggcctaatgggaagataccgtatgcaatcactcatatttgcgagaaaaggaatcggcaattaaaatactacacattctgtgaggttgtggtgtttggaattctagtttatgctattttagtggtaattatctacaatgttctagaagcaagtcacttttatgatgcgcccgctaacaaggcaagggtattttatagttagaatctaattgacggataccgtacgacaccctaactaaatttaatactcataaaaaataaatttaatatcaaagtactcataaaaataaatttaatatcaaa

SEQ ID NO: 216187 - DNA, 5078 bp, Zea Mays
cccgtctccgtctccttctcctcctccccgtcgccgtctccgagtctccctctatttctctccgcccttgttcttctcctctctccctctatcttattacctcaagtagaagtagtatatattttttgtccgccttttcaatttttccttttatctccctgcgtctcttcgtcgtcctcctgctgtggcggccgccggcgatccccgatcggcgatactcagattctagttgtccattgtgctgcactgcagcagtagacaatcgtgtttttcggtgttttgtctgtctctccttgatcattcagatgcctgtacagctcaactgctatagctagctgtatatatctggttgaagaggactaatctagcaacaatgtcatcgcttcagttattgcaactaacagaacgggggcgcaaccttttgtcttcaagaaggagaacacttgcaattgtttctggtgcagtacttgctggtggagctttagcatatgcgcagtcaggtcgatggaaaaaacaccaggaagcaaattcttgcagtgatgcaaactcacatagcagtaataacggaagaactagtcagaacggcattgatggtaaattggttaaaacaaggaaaaagaaaagtggactgaagtccttgcattttttggctgctattttacttaagaagattggcccgaatggaacgaattaccttattggcttgatactaacagcagtcttgcgtacagctgttggccacagattggcaaaagtacaaggatatttattcagatctgcattccttcggcgtattccgacctttacacgtctcattattgaaaatcttcttctatgctttctccaatccacgttatatcagacatcaaagtacttaacagggtctttaggcctgcgcttcaagaaaatcttgacagatcttgtccatgctgattattttgagaacatggtgtactacaagatctcacatgttgatcatcggatcacaaacccagagcaaaggattgcaagtgacataccaaagttctgctcagaattaagtgaccttgtacaggatgatctggctgcaattgtagaagggttaatatacatctggcgcctctgctcttacgcgagtccaaaatatgtgttatggattctggcatatgttataggtgctggtggtacaattagaaaattttctcctgcttttggcaagctgaagtctacagaacaacagctagagggggaatatcgtcaactccattcacgattgagaacccatgctgagagtgtggcgttttatggtggtgagaacagagaagcatcacatattaagcagcggttccgggcacttgttaaacacttgaatgttgttcttcatgaaaactggtggtttggcatgattcaagattttcttctgaagtatcttggcgccactgtgggagttatcctaattattgaacctttctttgcggggaatcttaaacccgaatcatccaccttaggacgggcagagatgttgagcaatctccgataccacaccagcgtgataatatcactatttcaatctcttggaaccatttctattagttcaaggcgcttaaatattctcagtggctatgctaatcgtattcatgaattactggatgtctcgcgtgagctatctggtggccgtgatagattgattactcaaaattcttctgatggaaattatattagcgaggcaaattatatagagttttcagatgttaaggtggtgacaccttctgggaatgtcttggttgataatttgaaccttcatttggagtcgggctctaatctgttgatcactggtcccaatggtagtggaaaaagctcccttttccgtgttcttggtggtctgtggccaatggtatctggtcatattgtcaaacctggtgttggttccaatctcaacaaggaaatattttatgtgccccagagaccatatacagctgttggaacgcttcgcgaccagttaatctatccactcacagcagaccaagagactgaaccacttagctatggtggcatggtggatcttctaaagaatgttgatctggaatacttgctagaacgctatcctcttgataaggaagttaactggggtgacgaattgtctcttggtgagcagcaaagattaggaatggctagactgttctatcataagccaaagtttgctatcctggatgaatgcactagtgctgttacaactgatatggaagagcgcttctgcaaaagggttcgagcaatgggcacatcttgcataacaatatctcaccgtccagcattagttgcgtttcatgaaattgttttatccttagatggtgaaggagggtgggatattcaggacaacagaaatggttccttctctcccgaagttgagtttgatgtgctgaaggcatcagaaagtgatcgcaagtctgatgcacttaccgttcaaagggcttttatcaccagcacaaagggaaatgcgtcaatgaagcccaagaaacattcttattcaacagaggtcatagcatcttcccccagtatggagatagaacatacagtacaatcatctattgtcacacaattgcaatgctctccaagacctttgcctgtcagagttgctgcaatgtctcaaatactggttccaaagctatttgataagcaaggagggcagctgcttgcagtggtacttcttgtattctcccgcacttggatttcagaccgtatagcttcattgaatggaacaagtgtcaagtatgtcttggagcaggacaaagctgccttcattcgtttggctggcactagtgtgctgcaaagtgcagcaaattccatcgtgtcaccctcactgaggaaccttacttcaagaatcgcccttggatggcggattcgcatgaccaatcatttgcttcaatattatttgaaaagaaatgctttttacaaggtatgagtatggatgcagatcaaagaatgacacatgatgtagagaagttgaccaatgaccttgctggcttgcttactggtatggtgaagccattagttgatattatttggtttacatggagaatgaagcttttgtctgggcgaagaggggttgctatactgtatgcttacatgttcctaggtcttggttttctaagagctgtgtcccctgactttggggatcttgcaaaccaagaacaagaacttgaaggcacgttcaggttcatgcactcaagattgcggacacatgctgagtcaatagctttctttggtggtggatcaagggagaaagctatgattgacgctaaattcatgacattgctcaaccactcgaaggttctattgagaaagaagtggctttatggtatttttgatgattttgtgacgaaacagcttcctcataacgtgacatgggggctgagtatgttatatgctttggagcacaagggagaccgagctttgacttcaactcaaggagagttggcacatgctctgaggttcttggcatctgtggtgtcacaaagcttcatagcgtttggtgatattcttgagttacacaagaagttccttgaactctctggtggtattaacaggatatttgagcttgaggagcttctacaggcatcacaaagcaatcctgtcatgccttctgatgccacaaatgccggttccgaagaaataatttccttccgtggcgtgaacattgtgacaccatcgcaaaagctattggctagccaactgtcttgtgatgtatctcaagggaaaagccttcttgtgactggtccaaatggtagcggaaagagttccatctttagggtgcttcgaggcttgtggcccattgcttctggtagtcttagcaagccatctgaaggaatttttaatgttcctcaacgtccatatacttgtcttggaaccttgagggatcagatcatataccctctctctcacgaggaggcaaagttgaagatgctctcaggcgaaacaagtgacaagtctacagcttccgagctgttggatgatcacctgaggacgattctagagaatgttcgcttgctgtatcttctggagagagaaggttgggatgctaccactaactgggaagatactctatccttgggagagcagcagaggctggggatggctcgtctgttctttcactgtcccaagtatggcatcctcgacgagtgcaccaatgccacaagcgtggacgttgaggagcatctgtacaggctagcaaccaacatgggcataacagtcatcacatcctcacaaaggcctgctctgattcccttccattcgttggaactgaaactcattgacggcgaaggaaagtgggagctatgttccatccaccaataaccgattgccatcaaccagtttatttatgttcaccggagtagggtatttacaagttgcaacgcacagaggaaaaaaaactcgtccactcgggtgtagagtgtgtgacggagtcttttttttttttggtttcccttttcttttctttttctctcccctttgatggaaatcttgcgatacggaaagggagggaggaaggaaatatacggcaggaaaggaaagtattaggagaggttatagatgcaggcttcgtcatttgggatagcatagtacatgttcctggcatgatatgccagcctgattgatttttatacgagatacagaataagttaaaataaaaatggatatggcacaaagtgtgcccttgtaaattaaatgggaaactaatctataggaaattcatcctctctgtgtcgcccttgcatcgaacgtatcccaatccatatgtaatggcctaatgggaagataccgtatgcaatcactcatatttgcgagaaaaggaatcggcaattaaaatactacacattctgtgaggttgtggtgtttggaattctagtttatgctattttagtggtaattatctacaatgttctagaagcaagtcacttttatgatgcgcccgctaacaaggcaagggtattttatagttagaatctaattgacggataccgtacgacaccctaactaaatttaatactcataaaaaataaatttaatatcaaagtactcataaaaataaatttaatatcaaa

SEQ ID NO: 216188 - DNA, 3702 bp, Zea Mays
  misc_feature (1)..(2): n is a, c, g, or t
nncccgtctccgtctccttctcctcctccccgtcgccgtctccgagtctccctctatttctctccgcccttgttcttctcctctctccctctatcttattacctcaagtagaagtagtatatattttttgtccgccttttcaatttttccttttatctccctgcgtctcttcgtcgtcctcctgctgtggcggccgccggcgatccccgatcggcgatactcagattctagttgtccattgtgctgcactgcagcagtagacaatcgtgtttttcggtgttttgtctgtctctccttgatcattcagatgcctgtacagctcaactgctatagctagctgtatatatctggttgaagaggactaatctagcaacaatgtcatcgcttcagttattgcaactaacagaacgggggcgcaaccttttgtcttcaagaaggagaacacttgcaattgtttctggtgcagtacttgctggtggagctttagcatatgcgcagtcaggtcgatggaaaaaacaccaggaagcaaattcttgcagtgatgcaaactcacatagcagtaataacggaagaactagtcagaacggcattgatggtaaattggttaaaacaaggaaaaagaaaagtggactgaagtccttgcattttttggctgctattttacttaagaagattggcccgaatggaacgaattaccttattggcttgatactaacagcagtcttgcgtacagctgttggccacagattggcaaaagtacaaggatatttattcagatctgcattccttcggcgtattccgacctttacacgtctcattattgaaaatcttcttctatgctttctccaatccacgttatatcagacatcaaagtacttaacagggtctttaggcctgcgcttcaagaaaatcttgacagatcttgtccatgctgattattttgagaacatggtgtactacaagatctcacatgttgatcatcggatcacaaacccagagcaaaggattgcaagtgacataccaaagttctgctcagaattaagtgaccttgtacaggatgatctggctgcaattgtagaagggttaatatacatctggcgcctctgctcttacgcgagtccaaaatatgtgttatggattctggcatatgttataggtgctggtggtacaattagaaaattttctcctgcttttggcaagctgaagtctacagaacaacagctagagggggaatatcgtcaactccattcacgattgagaacccatgctgagagtgtggcgttttatggtggtgagaacagagaagcatcacatattaagcagcggttccgggcacttgttaaacacttgaatgttgttcttcatgaaaactggtggtttggcatgattcaagattttcttctgaagtatcttggcgccactgtgggagttatcctaattattgaacctttctttgcggggaatcttaaacccgaatcatccaccttaggacgggcagagatgttgagcaatctccgataccacaccagcgtgataatatcactatttcaatctcttggaaccatttctattagttcaaggcgcttaaatattctcagtggctatgctaatcgtattcatgaattactggatgtctcgcgtgagctatctggtggccgtgatagattgattactcaaaattcttctgatggaaattatattagcgaggcaaattatatagagttttcagatgttaaggtggtgacaccttctgggaatgtcttggttgataatttgaaccttcatttggagtcgggctctaatctgttgatcactggtcccaatggtagtggaaaaagctcccttttccgtgttcttggtggtctgtggccaatggtatctggtcatattgtcaaacctggtgttggttccaatctcaacaaggaaatattttatgtgccccagagaccatatacagctgttggaacgcttcgcgaccagttaatctatccactcacagcagaccaagagactgaaccacttagctatggtggcatggtggatcttctaaagaatgttgatctggaatacttgctagaacgctatcctcttgataaggaagttaactggggtgacgaattgtctcttggtgagcagcaaagattaggaatggctagactgttctatcataagccaaagtttgctatcctggatgaatgcactagtgctgttacaactgatatggaagagcgcttctgcaaaagggttcgagcaatgggcacatcttgcataacaatatctcaccgtccagcattagttgcgtttcatgaaattgttttatccttagatggtgaaggagggtgggatattcaggacaacagaaatggttccttctctcccgaagttgagtttgatgtgctgaaggcatcagaaagtgatcgcaagtctgatgcacttaccgttcaaagggcttttatcaccagcacaaagggaaatgcgtcaatgaagcccaagaaacattcttattcaacagaggtcatagcatcttcccccagtatggagatagaacatacagtacaatcatctattgtcacacaattgcaatgctctccaagacctttgcctgtcagagttgctgcaatgtctcaaatactggttccaaagctatttgataagcaaggagggcagctgcttgcagtggtacttcttgtattctcccgcacttggatttcagaccgtatagcttcattgaatggaacaagtgtcaagtatgtcttggagcaggacaaagctgccttcattcgtttggctggcactagtgtgctgcaaagtgcagcaaattccatcgtgtcaccctcactgaggaaccttacttcaagaatcgcccttggatggcggattcgcatgaccaatcatttgcttcaatattatttgaaaagaaatgctttttacaaggtattcaacatttcaggtatgagtatggatgcagatcaaagaatgacacatgatgtagagaagttgaccaatgaccttgctggcttgcttactggtatggtgaagccattagttgatattatttggtttacatggagaatgaagcttttgtctgggcgaagaggggttgctatactgtatgcttacatgttcctaggtcttggttttctaagagctgtgtcccctgactttggggatcttgcaaaccaagaacaagaacttgaaggcacgttcaggttcatgcactcaagattgcggacacatgctgagtcaatagctttctttggtggtggatcaagggagaaagcttcttaaggttcattcaaaattccaaaaatcatcacaacaacaaagccttttagtcccaagcaagttggtgtagattagagttgaaacccaatagaaaccacaagtcaaggttcagatacatagatagttgtttccatgcactccttttatgactaaatctttgggtatattctatcctttcaagtctcattttactgccttttctcaagttaacttcagccttcctctgcctctcttcctattgcaatcgcaccttaggaactcactacacaatggtgtctctataggtctccattggacatgtcttaaaccatcacaaccggtattggacaagcttttcttcaattggtgttacccctagcctatcacacacatcatcattttggattcgatcactttttgaatggccataaatccaac

SEQ ID NO: 216189 - DNA, 748 bp, Zea Mays
gtttattaattctttcatgtcaattttctacaatgcaaatgtgggatttgctctagcaagcttgaaaggggttaacatcccaatgtatattgcaatcaaaaggatcactccccttgctgtgttggtggctgggtgcatgcggggaaaggggaagccaccgacacaggtcattctttcagttatctgcaccgccaatggtgtcctcgttgcagcacttggagatttttcctttgacctatatggatactacatggctctaacatcagtcttcttccagactatgtatttgattctggtggagaaatcaggtgccgaggatggtctttcctcggtggacttgatgttttacaacagcatattgtcacttccatttctgtttttcctcattatagcaacaggagaattcccccattctcttacagtattatctgcaaaggcagcctctctgatgttcggtgtcgttctcgttatctcgctgatgatgggaatcgttctcaatttcactatgttttggtgcacaattgtgaactctgctctgactacaacaatagtaggagttctcaagggtgtcggatcaacgaccctcggtttcgatctgttgggaggtgtcgaagtacatgctctgaatgttactggactggtgatcaacacatttggtggcctatggtactcttatgcgaagtataagcagaaaaggaaaacaccacggaagatccaacatgatgtagagtcgcatgcccacaagtag

SEQ ID NO: 216190 - DNA, 3051 bp, Zea Mays
gagagctcaccggtgggccactcatttcgctttcggcctttggccaccaccatgcaagaagcgtcacgaatcatgagccaagggaccgacggggaggttgccggcgttgtaaacagccatgacgacaaggaccatgtccatggcacgatcagacgcgtggccgaagccgattccgagaaagacgaagtgcatggtggtggccaggagccaatattctttcagtgccttgatcaggagcaaccccccgatccggtgcatttggaggacgctagggtcgaatttccctccgacgaggatggtgacggtgatgacgtccgcgtctcctttgcaaccgccgatggtgatcgcctcctcgaggagcaggcggagctggacctggacgtggaggaggagcaagaggacacatccaggtatgactacgttacgtggatggcgccggagcccgtgtccatccacgagcgccgccgccggctgctccaggggatgggcctcacgagcagcaaggacctcctccgcagccggaacgcgagggcgaggcttccgcctgacatccctcgctacgtaccccggagacagcagcagctacccgcggccgaagcgccgagcacaacgagggccgcgccggccgtggccgcggcacttcccgagttcgcggaacaccaccctaacgacgccgtcttgacccggtcatgctccgacagccgtctcgtcgtccgcggaggcggcgtaaggaagatgcaaccgttccgccgcgtgtgctcgctgccgcactctctgcaaggatcgccagcccacaaggcactcagcgcggctgcccggtgtccgttatcatcagcgccgtcaaaggacggaggaactagcaaaaccactgccggtgacacgggtggtggtgggttcaggaacccgaacaacgacagggaattccaggcgaacagccaattgaacagtgctcagcgcagtgctccgctgaacaaagacgagctcgagcagttcatcagccacgctccgctcgtgacgcagcccgtgcgccgcagccagagccagccggtgccgggggctggaacggccaagggcgacgaaaaaccggctgagaagagaagaacacggtggctgaggaacatcaagctcgtcgcgtctgctgccgggctcagaaacgacaaggacggcggcggcggcagcagatcggcccggacgccttcggtgaccatgtccaagtcggcttcgaccaccgctgccatgtcgtcggccgccacgggccccgagcggctcaaggtgcaccactacggcaagtccagcagggagctgaccgggctgtacatgcggcaggaggtgcgcgcgcacgagggctcgatatggagcatcaagttcagccccgacggccggttcctcgccagcggcggagaggacagcgtggtgcgcgtctgggaggttctggacgtggacgcctcctcgtccgccgtggcgcatgagatggagatgtccacctccctgcctccgcagccgccgcctgcatccaccgacggcggcaggtcggtggcagcgccctggctggcagcgcagctgtccaggaaggtgaggagggggaggagcagcaaggacgcgctcccggagcacgtcatcgtgccggagtccgttttcgcgctcgccgagcagccgtcgtgcgctttggagggccaccaggatgacgtgctcgatctgtcgtggtccaagtcccagcagctgctgtcgtcatccatggaccacacggtgcggctctggaacgtggacacgaagacgtgcctgagggtgttcccgcacagtgactacgttacctgcgtgcagttcaatccagcggacgatggctacttcatcagcggctcgctggactgcaaggtgcgcatctggagcgtaccagaccggcaggtcgtcgactggagcgacctcaacgacatggtcaccgcggcgtgctacaccccagacggccaggctgcgattattggttcgcacagggggagctgccgattctacaagacaacagattgtaagcttaaccaggaggcacaaatcgacatgagcataacgaagaaacgcaggtcccaggccaagaagatcaccggattccattttgcgccggggaacccgtcagagatcttggttacatcggcggactcgcagataagggtgttcaacggcatcagcgtcctccagaaattcaaaggcttcaagaacaccagcagccagatctcggcgtcctacaccgccgacggccgctacgtcgtgtgcgccagcgaggactccaacgtctacgtgtggcgccgcgtccccggcagcgtcggcggcacgggcggtgccagcatcagcgtcagggccaagacgtggctcaccagccggtcctacgagtacttcttctgccgagacgtgtctgtggccgtgccgtggcccggttcgccgtgcatcccgtgcgacgcgtcccggcgcgtcaacggcaacggcaacagcgacacgcccaggagacagacctcgtcgcgccgcgacgacgacgtcgttggcgctggctgcgtaccgcgggggaccatgtccgggacgatggcgtaccatggggggcagttgttgcagccggagctgtcccgtcgtgagtcacagtcgtccgctcggtggcacggcggcgctgagggcggcaacgcgtggggtatggtcttggtgaccgcgagccgtggcggtgagattcgggtgtaccagaacttcggcctgcctttgaccaatctcttccactagctagaaaggatagccagagtttgctggtgctgtctcgtttctggtctaatatttccaaaggaatagattttgcagatgagctgatgtacaggctgatataccagaagaacattttcaggaaaaaaatagacgggaaggatagaagtgcagtgtaaacccctatacctgagagtagaaaatttgcgtggcattatatttgataacgtaggaagaacacatagattacatgtcccaagcatagcagaaacatcggcaaatatacataaactaattaaacatctatttcataaggaacac

SEQ ID NO: 216191 - DNA, 1248 bp, Zea Mays
ttagctaaagtgtggcagtgaatttcagtttcaatggcaacattataaatgtctctatggagctgaagtgttatgtattggcagcgtgactggtacttgacaatactctagattaaccgaacaacagtttgagccagggattatagccaaaagggattatacccccaaggggttcaagtgacaaagaggggattaactcaatccctcctggattcaatacctctctggaataaaaacctgtaaaccgaacatgcccctagggaagtaatccattgcaaacgaacatgccctcagggtttactattgtgtccgctcccaccgggtctgcgcatcagagaccgacaagactgggaaatccagagatgcatttttctaccgatcagctgatcggctcggcgttcattgcctttgggctcacattgttcgtgtgtttcttctacgttgccgtcgtgtccaagctgcttccgccacatcaaaatggattcctggccgccatccaaaacgactggtattactgtctgcttgtgccgttgacgcttcctgtaataatcgtggctgtctacctgcactggctcagcatgaagatgttcaagcacgcatgaagcagtcatgcagcttccttccggtttcagaatcctggtcaaaatcgaggatgcattcacaatcccaaggcataggaagtgctgcagggaacgccctaattccaccgcagcttcgtggaaggagcaatgttgttactgaagacatgagcaaactctttgtggctaaacgaaaagagtagcatcttaaccttttctggacctgaacctctgtttggactccatagactgataaacgcatgtactggtcccatagtgcaatggatgtgccggcatgatccaaggttgttgctgaatcctaaagaaccggacgaaggatgctaacggtaggacgacctggtctcttagcctacagtgggctgttgtcagatgtcaaaaatgccctcttagaagtttagaacatttctttggtgctcactcgcgtttcatgttcaacggtgctacatgactggtgctggatgcatgtaaactctgcaaccctatcatgttatggcagctagatgctactacgtctatcttttgatcggtgattacaaccatgtattacgtctagtagtggtaatacatcgcgatccaaatgcttcttaataaaatagtagaaccctaaataattatagttaaaaaatgaatagaaataagattctgatat

SEQ ID NO: 216192 - DNA, 2553 bp, Zea Mays
tttagctaaagtgtggcagtgaatttcagtttcaatggcaacattataaatgtctctatggagctgaagtgttatgtattggcagcgtgactggtacttgacaatactctagattaaccgaacaacagtttgagccagggattatagccaaaagggattatacccccaaggggttcaagtgacaaagaggggattaactcaatccctcctggattcaatacctctctggaataaaaacctgtaaaccgaacatgcccctagggaagtaatccattgcaaacgaacatgccctcagggtttactattgtgtccgctcccaccgggtctgcgcatcagagaccgacaagactgggaaatccagagatgcatttttctaccgatcagctgatcggctcggcgttcattgcctttgggctcacattgttcgtgtgtttcttctacgttgccgtcgtgtccaagctgcttccgccacatcaaaatggattcctggccgccatccaaaacgactggtattactgtctgcttgtgccgttgacgcttcctgtaataatcgtggctgtctacctgcactggctcagcatgaagatgttcaagcacgcatgaagcagtcatgcagcttccttccggtttcagaatcctggtcaaaatcgagcttcaaaagtcaaaaccatgggttcttcccttctatacatatctggtcatcagtatgtgcttgcccctctttagagacgagggtacatgtaggccctgtttgggacagctgctgcttgttgaaaaagcagcttatctgataagctggtaaaaagcagcttctgcttgttggctgcttttagttcattttgagaagcagctgaactgataagctgctgcagaagctgcctgtttggcaggacttcagcttaaatttgtgaagaagctgaaaataagctgtaccaaacagggccgtaagacatctccactttacctctttttaccctgtatagatgtagtatattcaatccacaagcttagcagcactcacaactgaacagtgtaactaaatgataaggttagttcagtgacatctcattgatcacgatgttgttccctattttgtaatgtttagaatgcttaatgatggctcaatcgacctcacgtagagtgcattttgtttgtggcggaagtaactgtatgttaactagttagtcacatataacttctggactaatgcatttttcctctactgctactgcattgggttctgcacagtccttcctcctaatgctcaccatgtaccacaagtagatgatcattatgttcttctttagcatgctatcataaatcaatctggaaatattgtacttatctataagacccaactaatttggtggtggtttcggtgtagcgctaaatttctcttatcatggtttatacattctgcttatcatcagaacgagacactaatccactaatatattatgtgcctattctgcttcttctgtacgggcctgatagtttctctaaattttaactagcaagaaagagcatatttgccttgtgccattgtccttgatcttctgcctttttttagaaaaaggaattaaatggtactcctaacaggataagttggattattagatgccctgtgatgctttggtttattgggaaaaaagatcgcaattgatattggttattcaaagcagacacttccctactgcatttaatctttactgtatttcctttgttatgttatatttcattgccccctctttattttggttcctggccttgttcttttgtttcttctgattcattttcagttctagctgtgtgctgaagtgttattctggatgtatacttgattatttgtcagtttcctaaacgcacagcacattactaccattactccccccattgccatctaggtctgatatggtttttgtgagttcttaacttgtcgcgcaataaatttccaaggatgcattcacaatcccaaggcataggaagtgctgcagggaacgccctaattccaccgcagcttcgtggaaggagcaatgttgttactgaagacatgagcaaactctttgtggctaaacgaaaagagtagcatcttaaccttttctggacctgaacctctgtttggactccatagactgataaacgcatgtactggtcccatagtgcaatggatgtgccggcatgatccaaggttgttgctgaatcctaaagaaccggacgaaggatgctaacggtaggacgacctggtctcttagcctacagtgggctgttgtcagatgtcaaaaatgccctcttagaagtttagaacatttctttggtgctcactcgcgtttcatgttcaacggtgctacatgactggtgctggatgcatgtaaactctgcaaccctatcatgttatggcagctagatgctactacgtctatcttttgatcggtgattacaaccatgtattacgtctagtagtggtaatacatcgcgatccaaatgcttcttaataaaatagtagaaccctaaataattatagttaaaaaatgaatagaaataagattctgatat

SEQ ID NO: 216193 - DNA, 782 bp, Zea Mays
caaatccccatgggatctctgtcattttctagattcgaaatgaaaaggctcgccgatacttgggaaacatgaaaacaaagcatccagttccttttacacagaagtttcctggtatagatccaatggctcttcatttgcttgaacgcctactttcttttgatccaaaggaccgaccaactgctgcagaggccttgacagatccatacttcactgggttagcaaattctgcacgtgaaccagtagcacaacctatctcaaaatttgagtttgagtttgaaagaaggaagctggccagagatgatgttcgagaattaatttacagagagacattggaataccatcctcagatgttgcaggagtttcttggtggtggtgtcaaggcgaactttgtgtacccgagtggggtggatcgtttcaagaggcaattcgttcatctcgaagaaattgctgctaagggtgagaagactagcccacaattgcgacaacatacttccttaccaagagaaagagtaaatgacagcggcgacgaccttgagaaaccaagtgcagattactgcataagattgcatgtatgtgatcaactctcaagctctcgtaactttctgaagagcgaaagcatcagtgcttcccagtgtgtggtcatcaaaccgaagcgagagaaagatgaggagcccatatctgagtatgcgagcagtccagttgatggtgtgccaccgaggattgctgaactcaaaacctgagagccttaaggaatagaacttcgtgttcaggttgattttgcc

SEQ ID NO: 216194 - DNA, 1789 bp, Zea Mays
cgctcccgcgctgcccgcgcaccgcgcgcccgctttggtcgggcgtccgctgcccactttgcgcgcttccccgctgctcccccgccgtacgtaaaatggacctatccacaattccacatcacccggcgcctctccgtcttcctcctccctcgccgtcgccgcgcccccaaccgtcactaccgacagcagcacggttcaccccgggcgcgagggcgacgctgccgagggcgaggggtgcgtcccgccggatcggcgcaggagcgacacacgcgacgccatggacgagaagaagggctccgaggaggcgccgttcttcacggactacggcgaggcgagccggtacgaggttaccgaggtggtgggcaagggcagctacggcgtggtcgccgcggccctcgacaccctcaccggcgagcacgtcgccatcaagaagatcaacgacgtcttcgagcacgtctccgacgccacccgcatcctgcgcgagatcaagctgctgcgcctgctgcgccacccggacatcgtccagatcaagcatatcatgctcccgccatcgcgccgcgagttccgcgacatttacgtcgtcttcgagctcatggagtccgacctccaccaggtcatcaaggccaacgacgacctcacgcccgagcaccaccagttcttcctgtaccagctgctccgcggcatgaagtacatccacgccgccaatgtcttccaccgggacctcaagcccaagaacattctcgccaacggcgactgcaagctcaagatttgtgacttcggccttgctcgggtgtctttcaacgatacaccttcagccatattctggacggattatgtggcaacaagatggtatcgtgctccagaattatgcggctccttcttttcaaagtatactcctgcgattgatatctggagcctaggttgtatatttgctgaaatgcttatagggaagcctctctttcctggcaagaatgtggtacatcaactggatctcatgacagatctacttggcactccttcaccagagtcactttcgaggattcgaaatgaaaaggctcgccgatacttgggaaacatgaaaacaaagcatccagttccttttacacagaagtttcctggtatagatccaatggctcttcatttgcttgaacgcctactttcttttgatccaaaggaccgaccaactgctgcagaggccttgacagatccatacttcactgggttagcaaattctgcacgtgaaccagtagcacaacctatctcaaaatttgagtttgagtttgaaagaaggaagctggccagagatgatgttcgagaattaatttacagagagacattggaataccatcctcagatgttgcaggagtttcttggtggtggtgtcaaggcgaactttgtgtacccgagtggggtggatcgtttcaagaggcaattcgttcatctcgaagaaattgctgctaagggtgagaagactagcccacaattgcgacaacatacttccttaccaagagaaagagtaaatgacagcggcgacgaccttgagaaaccaagtgcagattactgcataagattgcatgtatgtgatcaactctcaagctctcgtaactttctgaagagcgaaagcatcagtgcttcccagtgtgtggtcatcaaaccgaagcgagagaaagatgaggagcccatatctgagtatgcgagcagtccagttgatggtgtgccaccgaggattgctgaactcaaaacctgagagccttaaggaatagaacttcgtgttcaggttgattttgcc

SEQ ID NO: 216195 - DNA, 1133 bp, Zea Mays
cccgactggagactgctgttcccctcgaccctcgtccgtccgtccgtccgtcacctgacggctcccaaaccctaccccgcagatccctccccttcctctacccccgcctcgccgccggtcttcgtcacccgtcgccgtgcccgtcggcgcggtgttaagggtccgctacgctgcacctcgcggggagaaaggggtgggcctcggggacctccgccctccgcgcaaggtgcaagtccaaaagaactgactacatcatatatgtaggtcattgaatgaccttctatacgaatatggatttgaatgcatcaccggtgcctgacgatgatgagcaacagccttatgatgattcagttgaggttgggtatgctcagacggaacatgttgaatctgctgttgcaacattgcgccgggagcgtgaagagagacgcaagagactaaagagagagcagcaggatgatgggtcaaggctacattcccagcagattaggaatgattatgctcctcaacccaaaagacatagtcgcattaaagaggcacctcagggctggctggactgccctgcatttggggaaccaatagataaaatcataccatctaaagttcctcttgacgaaacattcaatgagtcagtgcctcctgggaagcggtactcctcaaagcaactagttaacaaacaaagaaaagctggccgcgaagttgtcggtggtgtcgaggattgggaggcagcatccagtggatgacatagatagctagggtgtagacatgtctttagttgattattagtcgctgactgcgctcgtggttgtggttcattggcactcctatttagttctgatatcctatggccatcctctttgcctagagagtagacaccctgcataaatagtggcatgtattcactattccatatgcacataaatgacaaatcacttatgctccgtttggatgtcgatattggagaggatggaattgaattgtgctgaatagcaaatctggcatggtattgaaatgagatgtaattccaattctattgtttggatgccactgaattggagtttggaattgtgttgtctaattccacgcaataccgaggggcgatgctttgtattgggtgaggaggtttctagttatag

SEQ ID NO: 216196 - DNA, 940 bp, Zea Mays
agactgctgttcccctcgaccctcgtccgtccgtccgtccgtcacctgacggctcccaaaccctaccccgcagatccctccccttcctctacccccgcctcgccgccggtcttcgtcacccgtcgccgtgcccgtcggcgcggtgttaagggtccgctacgctgcacctcgcggggagaaaggggtgggcctcggggacctccgccctccgcgcaaggagcgtgaagagagacgcaagagactaaagagagagcagcaggatgatgggtcaaggctacattcccagcagattaggaatgattatgctcctcaacccaaaagacatagtcgcattaaagaggcacctcagggctggctggactgccctgcatttggggaaccaatagataaaatcataccatctaaagttcctcttgacgaaacattcaatgagtcagtgcctcctgggaagcggtactcctcaaagcaactagttaacaaacaaagaaaagctggccgcgaagttgtcggtggtgtcgaggattgggaggcagcatccagtggatgacatagatagctagggtgtagacatgtctttagttgattattagtcgctgactgcgctcgtggttgtggttcattggcactcctatttagttctgatatcctatggccatcctctttgcctagagagtagacaccctgcataaatagtggcatgtattcactattccatatgcacataaatgacaaatcacttatgctccgtttggatgtcgatattggagaggatggaattgaattgtgctgaatagcaaatctggcatggtattgaaatgagatgtaattccaattctattgtttggatgccactgaattggagtttggaattgtgttgtctaattccacgcaataccgaggggcgatgctttgtattgggtgaggaggtttctagttatag

SEQ ID NO: 216197 - DNA, 581 bp, Zea Mays
agactgctgttcccctcgaccctcgtccgtccgtccgtccgtcacctgacggctcccaaaccctaccccgcagatccctccccttcctctacccccgcctcgccgccggtcttcgtcacccgtcgccgtgcccgtcggcgcggtgttaagggtccgctacgctgcacctcgcggggagaaaggggtgggcctcggggacctccgccctccgcgcaaggagcgtgaagagagacgcaagagactaaagagagagcagcaggatgatgggtcaaggctacattcccagcagattaggaatgattatgctcctcaacccaaaagacatagtcgcattaaagaggcacctcagggctggctggactgccctgcatttggggaaccaatagataaaatcataccatctaaagttcctcttgacgaaacattcaatgagtcagtgcctcctgggaagcggtactcctcaaagcaactagttaacaaacaaagaaaagctggccgcgaagtctggtgattgatttgacaaataccacccgatattattcaccagcagaatggacgaagcaaggtactaagtatgcgaa

SEQ ID NO: 216198 - DNA, 852 bp, Zea Mays
tttagatcgttaaggagaatcagaagcttcacaaaggaaatgttgagattgaaggtgacttggctactcttgccgacaagagtatctttcctggggatgttctttgggtcagagactctgaaatctttgagaaccgtgacatagcagatgagatttcagagcagaagggtgatatactgcaggttgaggaaggctttagagggactcttttgacatcaagtgtttcagcacagctttgtcagggcataacatttagtgaatgagtttcttccgtgagatatatggctgcacatacctgttggcataagctagttaaggtctctagaaggtacctgattgcttcagagggtagtcaatcatgtcagttctagcagtcctggcgaaaagttatgtctatgcttctctccatgctgtcacactaaggatgtcaaatgtatcctcgcttgaggaaaacggaagaaggctcttccttcttccctaatgtaatggtgacttaggtataccactgggctacggggctgtgatgcctgcatgcttagtgtttttttttcctgttgttggccatgcgggaccgtgagggctacgagcgacttgcattgtacttggtggttgtgcacacatcggcttattgacaggtagattactatgaaagtctcaaggcgatgcagagcattgtgcagttttttcatgccttttattttaccttagatcctaagggtgtgcaatgccatttgatatatatatacctttatgatcactctggtttgctcacctctcgttgctcatagaacagagttacgaagtcgaaaccttttccttcatttagaaaatcaatcgttattttttctgtga

SEQ ID NO: 216199 - DNA, 3992 bp, Zea Mays
gttaagtgtagcatacacatcttaacccctatgcaccaagggaagtcggatcctcattgctggtacaatgagcaggccgaatacccgcaacaagaacaagaggcctcgcgctgatgaatccaatagcccatctgtggctgttttcaagaagatacattccactggtgatatctcaaaaagcgatatctgtcagctttacatggtgtggaaaccgctttgccacggttgccatggtaactccaaggactcaccaaattgtttctgcgggttgattcccattggcaatggggttcgtaaatctggcctctggcagaaaactcaggaaattatccgtggtcttggtcctaatccatctagtgatcttcgtgattctagcgagacacctgctgggttgactaacctgggagcaacttgttatgcgaatagtattctacagtgcctttacatgaacacatccttccgatctggtattttctcattggatctggatgttttgaagaagcatccagttttagatcagctggttcggttgtttgcacaactacagtctagcaaaatggctttcattgattcaacgccttttattaaggcattggaattagacaatggtgtccagcaggatagccatgaatttctcaccttgtttctgtctctccttgagcaatcactaagtcactccaaggtccctggaactagagaaatagtgcaacatctgtttcgtggcagtgtatctcatgtaacaaggtgctcatcatgtggaaaggattcagcagcatcttcaaaatctgaagacttctatgaactcgagctgaatattaaaggtttcaataatttggaagaaagtctagacgactactttagtgaagaaggactagttggggagaatcaatacttttgtgaatcatgtcagaaaagggtagacgccactcgctgcataaaacttagatcacttcctccagttgttaattttcagctgaagcgttatgtattcctcccgaaggtgatatctggcccatttttttattgaatctgtgcattcttctccttttattgtaaagaattttctaacttttctcattaccagacaacaaccaagaaaaagatttcttcgtctttcagtttcccagggcagcttgatatgggaaaacggttgtcaaaccctacatctagttatacatatgaactagctgctattttaattcacaagggtaccgctgctaatagtgggcactatgtggcacatataaaagatgaaagcaatgggcagtggtgggagtttgatgatgaaaccgtatccaaacttggtttgcacccttttggtgaaaacttaggaaaaacatcaaataaagatgataggaaacctcaaggcatttctatagaaggttctgttacgaacaataacaatggacaccaggaggctgcatcatcttctagccccggggagatgttttcatctacagatgcttatatgctgatgtacaaatgtaccaataaggatggcaatgctactgaaagcaacaaaattatggaattcaataatagtttgcttccacaccattttcttgatgaaattaatgaacaaaatgcatcgtgtatgaaatcctgtgaagaataccaaagcaagaaaggcagccatttggcatatataacagagaggcgccaagaagtaaaatctattctgatagaagcacccgcaaatccagaggacaattcatacttttggatttcaacagactggcttcgccaatgggcagataacatcactcctcccttgtaagttcacaacagatgctccctccatacatccattgacaatggaccaattcaatgtgagcatggaaaagttccagtgtctaaactcacatcaatgaagcgtctatcagctgcagcttggcagaaattattttcaaaatatggaggggggccaacattgagtggtgatgatttttgcatggtgtgtcttaaagatggggcgaaaaatgcagtatctgctgatgtctaccgtgaccgcaaagaatcatttaaaaaccttgcagaagcagctcttgctggtagttgttcagatagtccttcttacttcatctcaaaggcatggttgactcattggctccgcagaaaaaatgctggtatcctttctgatgctgataatggaccaacgagtgctttaagatgtcgccatgggtatctcctgccggagcatgctccaggagcaaagcgggtatccgtaccagagagcctgtggttatttctctatcaaaccatcagcgagaaggttgatgatgttgttacttttccatcagactgtcaaccatgcaaaatctgtagtcaggaattgtctgatgttgcttctgttgagggtaatcttagagcagtgaaacttgagcaacgatacaaacatgaaaagttaatatctgggaagagctttgcacttcgtcctggtgaaaaatattatttggttccttcatcttggttgtcagagtggagagcttatattacaacgacgggaaaaaatatttcttcactaccagaacctcaaagtcttgaagctgttgtcagttcacttatatgtgaaaagcattcgagattgctgcaaaagcctttggatcttgtttgtaagcgcggaagcatcactcagaaaacatcaaataacgatggtttaacaatcatcccagagtatgattggaagttattctctgaggagtggagtgcgacgcctggaaaaggtatatctgctgaaatcgcttttagcaaggacgctcaagataaagtgcacggttcctctgaagcaatgccgattacggatggaaatttggaccagtctctttatggtgcaaatgacgattttggggccagagagccctatgtcagaactgatcctgaggtttgtgaagaatgtgttggagaaagagagagctgtgcattggtgcagaagctcaactaccagaatgaagatatccacgtttattttgtccgtggaaaagcaccaccaaagtctatcaaagaagcatctaaagatgttcctgtatcagatcgtcggatttcaaagcgttccaggaggacaagctctgggaattcaatcagtttgaaagtctctggttccacatccgtctatcagttgaaactcatgatatgggaatctttagggatcgttaaggagaatcagaagcttcacaaaggaaatgttgagattgaaggtgacttggctactcttgccgacaagagtatctttcctggggatgttctttgggtcagagactctgaaatctttgagaaccgtgacatagcagatgagatttcagagcagaagggtgatatactgcaggttgaggaaggctttagagggactcttttgacatcaagtgtttcagcacagctttgtcagggcataacatttagtgaatgagtttcttccgtgagatatatggctgcacatacctgttggcataagctagttaaggtctctagaaggtacctgattgcttcagagggtagtcaatcatgtcagttctagcagtcctggcgaaaagttatgtctatgcttctctccatgctgtcacactaaggatgtcaaatgtatcctcgcttgaggaaaacggaagaaggctcttccttcttccctaatgtaatggtgacttaggtataccactgggctacggggctgtgatgcctgcatgcttagtgtttttttttcctgttgttggccatgcgggaccgtgagggctacgagcgacttgcattgtacttggtggttgtgcacacatcggcttattgacaggtagattactatgaaagtctcaaggcgatgcagagcattgtgcagttttttcatgccttttattttaccttagatcctaagggtgtgcaatgccatttgatatatatatacctttatgatcactctggtttgctcacctctcgttgctcatagaacagagttacgaagtcgaaaccttttccttcatttagaaaatcaatcgttattttttctgtga

SEQ ID NO: 216200 - DNA, 4106 bp, Zea Mays
gtccgctcggcccgtcgccgcgctcgctcctctggtcggtggacggcaccgtgccgagtgccgagtgccgaccggtcggaacggaagaaaccatccgctcatccccgttttctcttgtcccgttcaccacgcctgctctctcccttgtcatcttctggcgacgactgggcgactgccgacggccgctgctgccgccggccgctgctgccgccctagaccaggtggccagctcttgtccgagaccgttgctggcgacgagaatccaatagcttaacccctatgcaccaagggaagtcggatcctcattgctggtacaatgagcaggccgaatacccgcaacaagaacaagaggcctcgcgctgatgaatccaatagcccatctgtggctgttttcaagaagatacattccactggtgatatctcaaaaagcgatatctgtcagctttacatggtgtggaaaccgctttgccacggttgccatggtaactccaaggactcaccaaattgtttctgcgggttgattcccattggcaatggggttcgtaaatctggcctctggcagaaaactcaggaaattatccgtggtcttggtcctaatccatctagtgatcttcgtgattctagcgagacacctgctgggttgactaacctgggagcaacttgttatgcgaatagtattctacagtgcctttacatgaacacatccttccgatctggtattttctcattggatctggatgttttgaagaagcatccagttttagatcagctggttcggttgtttgcacaactacagtctagcaaaatggctttcattgattcaacgccttttattaaggcattggaattagacaatggtgtccagcaggatagccatgaatttctcaccttgtttctgtctctccttgagcaatcactaagtcactccaaggtccctggaactagagaaatagtgcaacatctgtttcgtggcagtgtatctcatgtaacaaggtgctcatcatgtggaaaggattcagcagcatcttcaaaatctgaagacttctatgaactcgagctgaatattaaaggtttcaataatttggaagaaagtctagacgactactttagtgaagaaggactagttggggagaatcaatacttttgtgaatcatgtcagaaaagggtagacgccactcgctgcataaaacttagatcacttcctccagttgttaattttcagctgaagcgttatgtattcctcccgaagacaacaaccaagaaaaagatttcttcgtctttcagtttcccagggcagcttgatatgggaaaacggttgtcaaaccctacatctagttatacatatgaactagctgctattttaattcacaagggtaccgctgctaatagtgggcactatgtggcacatataaaagatgaaagcaatgggcagtggtgggagtttgatgatgaaaccgtatccaaacttggtttgcacccttttggtgaaaacttaggaaaaacatcaaataaagatgataggaaacctcaaggcatttctatagaaggttctgttacgaacaataacaatggacaccaggaggctgcatcatcttctagccccggggagatgttttcatctacagatgcttatatgctgatgtacaaatgtaccaataaggatggcaatgctactgaaagcaacaaaattatggaattcaataatagtttgcttccacaccattttcttgatgaaattaatgaacaaaatgcatcgtgtatgaaatcctgtgaagaataccaaagcaagaaaggcagccatttggcatatataacagagaggcgccaagaagtaaaatctattctgatagaagcacccgcaaatccagaggacaattcatacttttggatttcaacagactggcttcgccaatgggcagataacatcactcctcccttatccattgacaatggaccaattcaatgtgagcatggaaaagttccagtgtctaaactcacatcaatgaagcgtctatcagctgcagcttggcagaaattattttcaaaatatggaggggggccaacattgagtggtgatgatttttgcatggtgtgtcttaaagatggggcgaaaaatgcagtatctgctgatgtctaccgtgaccgcaaagaatcatttaaaaaccttgcagaagcagctcttgctggtagttgttcagatagtccttcttacttcatctcaaaggcatgaaaaaatgctggtatcctttctgatgctgataatggaccaacgagtgctttaagatgtcgccatgggtatctcctgccggagcatgctccaggagcaaagcgggtatccgtaccagagagcctgtggttatttctctatcaaaccatcagcgagaaggttgatgatgttgttacttttccatcagactgtcaaccatgcaaaatctgtagtcaggaattgtctgatgttgcttctgttgagggtaatcttagagcagtgaaacttgagcaacgatacaaacatgaaaagttaatatctgggaagagctttgcacttcgtcctggtgaaaaatattatttggttccttcatcttggttgtcagagtggagagcttatattacaacgacgggaaaaaatatttcttcactaccagaacctcaaagtcttgaagctgttgtcagttcacttatatgtgaaaagcattcgagattgctgcaaaagcctttggatcttgtttgtaagcgcggaagcatcactcagaaaacatcaaataacgatggtttaacaatcatcccagagtatgattggaagttattctctgaggagtggagtgcgacgcctggaaaaggtatatctgctgaaatcgcttttagcaaggacgctcaagataaagtgcacggttcctctgaagcaatgccgattacggatggaaatttggaccagtctctttatggtgcaaatgacgattttggggccagagagccctatgtcagaactgatcctgaggtttgtgaagaatgtgttggagaaagagagagctgtgcattggtgcagaagctcaactaccagaatgaagatatccacgtttattttgtccgtggaaaagcaccaccaaagtctatcaaagaagcatctaaagatgttcctgtatcagatcgtcggatttcaaagcgttccaggaggacaagctctgggaattcaatcagtttgaaagtctctggttccacatccgtctatcagttgaaactcatgatatgggaatctttagggatcgttaaggagaatcagaagcttcacaaaggaaatgttgagattgaaggtgacttggctactcttgccgacaagagtatctttcctggggatgttctttgggtcagagactctgaaatctttgagaaccgtgacatagcagatgagatttcagagcagaagggtgatatactgcaggttgaggaaggctttagagggactcttttgacatcaagtgtttcagcacagctttgtcagggcataacatttagtgaatgagtttcttccgtgagatatatggctgcacatacctgttggcataagctagttaaggtctctagaaggtacctgattgcttcagagggtagtcaatcatgtcagttctagcagtcctggcgaaaagttatgtctatgcttctctccatgctgtcacactaaggatgtcaaatgtatcctcgcttgaggaaaacggaagaaggctcttccttcttccctaatgtaatggtgacttaggtataccactgggctacggggctgtgatgcctgcatgcttagtgtttttttttcctgttgttggccatgcgggaccgtgagggctacgagcgacttgcattgtacttggtggttgtgcacacatcggcttattgacaggtagattactatgaaagtctcaaggcgatgcagagcattgtgcagttttttcatgccttttattttaccttagatcctaagggtgtgcaatgccatttgatatatatatacctttatgatcactctggtttgctcacctctcgttgctcatagaacagagttacgaagtcgaaaccttttccttcatttagaaaatcaatcgttattttttctgtga

SEQ ID NO: 216201 - DNA, 2946 bp, Zea Mays
ccgtggcctacagcccacagtccgctcggcccgtcgccgcgctcgctcctctggtcggtggacggcaccgtgccgagtgccgagtgccgaccggtcggaacggaagaaaccatccgctcatccccgttttctcttgtcccgttcaccacgcctgctctctcccttgtcatcttctggcgacgactgggcgactgccgacggccgctgctgccgccggccgctgctgccgccctagaccaggtggccagctcttgtccgagaccgttgctggcgacgagaatccaatagcttaacccctatgcaccaagggaagtcggatcctcattgctggtacaatgagcaggccgaatacccgcaacaagaacaagaggcctcgcgctgatgaatccaatagcccatctgtggctgttttcaagaagatacattccactggtgatatctcaaaaagcgatatctgtcagctttacatggtgtggaaaccgctttgccacggttgccatggtgctcatcatgtggaaaggattcagcagcatcttcaaaatctgaagacttctatgaactcgagctgaatattaaaggtttcaataatttggaagaaagtctagacgactactttagtgaagaaggactagttggggagaatcaatacttttgtgaatcatgtcagaaaagggtagacgccactcgctgcataaaacttagatcacttcctccagttgttaattttcagctgaagcgttatgtattcctcccgaagatccattgacaatggaccaattcaatgtgagcatggaaaagttccagtgtctaaactcacatcaatgaagcgtctatcagctgcagcttggcagaaattattttcaaaatatggaggggggccaacattgagtggtgatgatttttgcatggtgtgtcttaaagatggggcgaaaaatgcagtatctgctgatgtctaccgtgaccgcaaagaatcatttaaaaaccttgcagaagcagctcttgctggtagttgttcagatagtccttcttacttcatctcaaaggcatggttgactcattggctccgcagaaaaaatgctggtatcctttctgatgctgataatggaccaacgagtgctttaagatgtcgccatgggtatctcctgccggagcatgctccaggagcaaagcgggtatccgtaccagagagcctgtggttatttctctatcaaaccatcagcgagaaggttgatgatgttgttacttttccatcagactgtcaaccatgcaaaatctgtagtcaggaattgtctgatgttgcttctgttgagggtaatcttagagcagtgaaacttgagcaacgatacaaacatgaaaagttaatatctgggaagagctttgcacttcgtcctggtgaaaaatattatttggttccttcatcttggttgtcagagtggagagcttatattacaacgacgggaaaaaatatttcttcactaccagaacctcaaagtcttgaagctgttgtcagttcacttatatgtgaaaagcattcgagattgctgcaaaagcctttggatcttgtttgtaagcgcggaagcatcactcagaaaacatcaaataacgatggtttaacaatcatcccagagtatgattggaagttattctctgaggagtggagtgcgacgcctggaaaaggtatatctgctgaaatcgcttttagcaaggacgctcaagataaagtgcacggttcctctgaagcaatgccgattacggatggaaatttggaccagtctctttatggtgcaaatgacgattttggggccagagagccctatgtcagaactgatcctgaggtttgtgaagaatgtgttggagaaagagagagctgtgcattggtgcagaagctcaactaccagaatgaagatatccacgtttattttgtccgtggaaaagcaccaccaaagtctatcaaagaagcatctaaagatgttcctgtatcagatcgtcggatttcaaagcgttccaggaggacaagctctgggaattcaatcagtttgaaagtctctggttccacatccgtctatcagttgaaactcatgatatgggaatctttagggatcgttaaggagaatcagaagcttcacaaaggaaatgttgagattgaaggtgacttggctactcttgccgacaagagtatctttcctggggatgttctttgggtcagagactctgaaatctttgagaaccgtgacatagcagatgagatttcagagcagaagggtgatatactgcaggttgaggaaggctttagagggactcttttgacatcaagtgtttcagcacagctttgtcagggcataacatttagtgaatgagtttcttccgtgagatatatggctgcacatacctgttggcataagctagttaaggtctctagaaggtacctgattgcttcagagggtagtcaatcatgtcagttctagcagtcctggcgaaaagttatgtctatgcttctctccatgctgtcacactaaggatgtcaaatgtatcctcgcttgaggaaaacggaagaaggctcttccttcttccctaatgtaatggtgacttaggtataccactgggctacggggctgtgatgcctgcatgcttagtgtttttttttcctgttgttggccatgcgggaccgtgagggctacgagcgacttgcattgtacttggtggttgtgcacacatcggcttattgacaggtagattactatgaaagtctcaaggcgatgcagagcattgtgcagttttttcatgccttttattttaccttagatcctaagggtgtgcaatgccatttgatatatatatacctttatgatcactctggtttgctcacctctcgttgctcatagaacagagttacgaagtcgaaaccttttccttcatttagaaaatcaatcgttattttttctgtga

SEQ ID NO: 216202 - DNA, 1914 bp, Zea Mays
gtgcgttgcggcagcgcacttatattagcctggtcagtacacccaccgtagcctcacacttcgctggggagacgaagctgctagccgatcaggggagaattcttttgtaatggagctgctgcgaccacgcggcgatggttgttgcccgcgcgtgctctcggtttctctgctgctcctcgccgccctgctgtggaagcacgtctctgcggcggcgattaccaggggtgatttcccggaggggttcgtcttcggcgccggcgcatcggcttaccaggatattcgattgaccgtgatactggagatgtggctgcggaccagtatcaccattacaaggttctcgattgcctggtcaaggcttattccagatgggcgtggagctgtgaacccaaaggggttggagtactacaacagcctcatagatgagctcctcagatatggtcgtcatttgccgcacgtgaccatctatcacttcgaccttccccaggctctccaggatgaatacaacggcctgctcagtccgagaatcatcgatgattttaccgcttacgcagacgtgtgcttccggagcttcggcgacagggtgaagcactggatcacggtgaacgagcccaacatcgagcccatcggcggctacgaccaaggctacctcccgccgcgccgctgctcctacccgtttggactgggcgtcacctgcacccacggcaactccacgacggagccgtacgccgtcgcccaccacctcctgctcgcgcatgcgtcggctgtgtccctctacagacgcaagtaccagggcgagcaaggaggacggattggactgacgttgctggcctggtggtatgagccagcgacgcagaagcccgaggatgtagaagcagctgccagagcaaatgacttctcgcttggatggttcatgcatcccctggtgtacggcgactatccgcccgtgatgaagaggaacgtgggggcaaggctgccgtcgctgacggcccgagactcggccatggtgcgcggctcgctcgatttcgttgggatcaaccagtacggcgcgatcctggtcgaagcagacctgggccagctcgatcgggacctcagagactactacggcgacatggctaccaacttcgtcacggtaccgtttgagagcacagtaacgaggaaccagcaggtgcctcgacttgggctgcggaaccatgaggcgccgtgggctctgagcaaattgctggaacacctgcagacgcactacgggaaccctccggtgatgatccacgagaacggtgaggccggccaagcgcgcgcgctctctctctctcgtttcagctgccgcgcacatgcacggttcctttcatcccctgagctgatggttccaccaccaccaccaccaccaggagctgggcacgagcccgacccgtccggcgggttcctgtacgacgacgagttcagggcccatttcctgcgggtctacgtcgaggcggcgctcgcttccgtccggaacggctccgacctgcgcggctacttcgtctggtccttcatggacgtgttcgagtttctcttctcctacaggttccgcttcggtctctacggcgtggacttcgccgccgacaaccggacgaggtacgctcggcgctccgcgcgatggtacgccggcttcctccgcggcggcgcggcgacctcacgcccgcctctgtttcaacgcggacacacggctccacctattcggagtgaaaatcagccgcacgtgtctgtgttatagattcatcgcgagtgaacaagtacatgatggatgttcttcaccctcatccatgtctgtcgtatgcggcattttcccgtcagttgtgtatttgtttgcatttgaggaataaattcagttctgtagtaggctgtcggcagatcttggcgattaaaagtatctctaac

SEQ ID NO: 216203 - DNA, 2040 bp, Zea Mays
gtgcgttgcggcagcgcacttatattagcctggtcagtacacccaccgtagcctcacacttcgctggggagacgaagctgctagccgatcaggggagaattcttttgtaatggagctgctgcgaccacgcggcgatggttgttgcccgcgcgtgctctcggtttctctgctgctcctcgccgccctgctgtggaagcacgtctctgcggcggcgattaccaggggtgatttcccggaggggttcgtcttcggcgccggcgcatcggcttaccaggtaggataggagcagtgtgggctacgggcagtgagtggcgcgcgaggcagagaggcaggtaggtggtgttgagatgaatcgtctggtttgtgcagatcgaaggcgcatgggcagaggacgggaagaagcccagcatctgggacacatacacgcacagtggatattcgattgaccgtgatactggagatgtggctgcggaccagtatcaccattacaaggttctcgattgcctggtcaaggcttattccagatgggcgtggagctgtgaacccaaaggggttggagtactacaacagcctcatagatgagctcctcagatatggtcgtcatttggtacttcattaattgcaacgttaattaacggcgcctgattccgaatggttttatttccgcgcgtgtaattaacgtgtggcaggaatacagccgcacgtgaccatctatcacttcgaccttccccaggctctccaggatgaatacaacggcctgctcagtccgagaatcatcgatgattttaccgcttacgcagacgtgtgcttccggagcttcggcgacagggtgaagcactggatcacggtgaacgagcccaacatcgagcccatcggcggctacgaccaaggctacctcccgccgcgccgctgctcctacccgtttggactgggcgtcacctgcacccacggcaactccacgacggagccgtacgccgtcgcccaccacctcctgctcgcgcatgcgtcggctgtgtccctctacagacgcaagtaccagggcgagcaaggaggacggattggactgacgttgctggcctggtggtatgagccagcgacgcagaagcccgaggatgtagaagcagctgccagagcaaatgacttctcgcttggatggttcatgcatcccctggtgtacggcgactatccgcccgtgatgaagaggaacgtgggggcaaggctgccgtcgctgacggcccgagactcggccatggtgcgcggctcgctcgatttcgttgggatcaaccagtacggcgcgatcctggtcgaagcagacctgggccagctcgatcgggacctcagagactactacggcgacatggctaccaacttcacgaacaatctcttgtggtgcacgtgcaaggtgcctcgacttgggctgcggaaccatgaggcgccgtgggctctgagcaaattgctggaacacctgcagacgcactacgggaaccctccggtgatgatccacgagaacggagctgggcacgagcccgacccgtccggcgggttcctgtacgacgacgagttcagggcccatttcctgcgggtctacgtcgaggcggcgctcgcttccgtccggaacggctccgacctgcgcggctacttcgtctggtccttcatggacgtgttcgagtttctcttctcctacaggttccgcttcggtctctacggcgtggacttcgccgccgacaaccggacgaggtacgctcggcgctccgcgcgatggtacgccggcttcctccgcggcggcgcggcgacctcacgcccgcctctgtttcaacgcggacacacggctccacctattcggagtgaaaatcagccgcacgtgtctgtgttatagattcatcgcgagtgaacaagtacatgatggatgttcttcaccctcatccatgtctgtcgtatgcggcattttcccgtcagttgtgtatttgtttgcatttgaggaataaattcagttctgtagtaggctgtcggcagatcttggcgattaaaagtatctctaac

SEQ ID NO: 216204 - DNA, 2057 bp, Zea Mays
gtgcgttgcggcagcgcacttatattagcctggtcagtacacccaccgtagcctcacacttcgctggggagacgaagctgctagccgatcaggggagaattcttttgtaatggagctgctgcgaccacgcggcgatggttgttgcccgcgcgtgctctcggtttctctgctgctcctcgccgccctgctgtggaagcacgtctctgcggcggcgattaccaggggtgatttcccggaggggttcgtcttcggcgccggcgcatcggcttaccagatcgaaggcgcatgggcagaggacgggaagaagcccagcatctgggacacatacacgcacagtggatattcgattgaccgtgatactggagatgtggctgcggaccagtatcaccattacaaggaagatgtgaagctaatgcatgacatgggcttggacgcgtacaggttctcgattgcctggtcaaggcttattccagatgggcgtggagctgtgaacccaaaggggttggagtactacaacagcctcatagatgagctcctcagatatggtcgtcatttggtacttcattaattgcaacgttaattaacggcgcctgattccgaatggttttatttccgcgcgtgtaattaacgtgtggcaggaatacagccgcacgtgaccatctatcacttcgaccttccccaggctctccaggatgaatacaacggcctgctcagtccgagaatcatcgatgattttaccgcttacgcagacgtgtgcttccggagcttcggcgacagggtgaagcactggatcacggtgaacgagcccaacatcgagcccatcggcggctacgaccaaggctacctcccgccgcgccgctgctcctacccgtttggactgggcgtcacctgcacccacggcaactccacgacggagccgtacgccgtcgcccaccacctcctgctcgcgcatgcgtcggctgtgtccctctacagacgcaagtaccagcgacgcagaagcccgaggatgtagaagcagctgccagagcaaatgacttctcgcttggatggttcatgcatcccctggtgtacggcgactatccgcccgtgatgaagaggaacgtgggggcaaggctgccgtcgctgacggcccgagactcggccatggtgcgcggctcgctcgatttcgttgggatcaaccagtacggcgcgatcctggtcgaagcagacctgggccagctcgatcgggacctcagagactactacggcgacatggctaccaacttcgtcacggtaccgtttgagagcacagtaacgaggaaccagcaggtgcctcgacttgggctgcggaaccatgaggcgccgtgggctctgagcaaattgctggaacacctgcagacgcactacgggaaccctccggtgatgatccacgagaacggtgaggccggccaagcgcgcgcgctctctctctctcgtttcagctgccgcgcacatgcacggttcctttcatcccctgagctgatggttccaccaccaccaccaccaccaggagctgggcacgagcccgacccgtccggcgggttcctgtacgacgacgagttcagggcccatttcctgcgggtctacgtcgaggcggcgctcgcttccgtccggaacggctccgacctgcgcggctacttcgtctggtccttcatggacgtgttcgagtttctcttctcctacaggttccgcttcggtctctacggcgtggacttcgccgccgacaaccggacgaggtacgctcggcgctccgcgcgatggtacgccggcttcctccgcggcggcgcggcgacctcacgcccgcctctgtttcaacgcggacacacggctccacctattcggagtgaaaatcagccgcacgtgtctgtgttatagattcatcgcgagtgaacaagtacatgatggatgttcttcaccctcatccatgtctgtcgtatgcggcattttcccgtcagttgtgtatttgtttgcatttgaggaataaattcagttctgtagtaggctgtcggcagatcttggcgattaaaagtatctctaac

SEQ ID NO: 216205 - DNA, 862 bp, Zea Mays
aaagattgccctgtcggaatgataggtccttgattcattcaaatttcaaaggttttagtaaagcagtctgtgcatattacatgatcatgacagcatttcattaactttctgccttgatcatagtagtatgcagaagcagctcccaattgattgggtcataggggcgatgatttaattctcgggcttatgcatttggaaactttgcgattttgagtaggtaaaataatgaccttaatggcaggtatcattgttcgtaatacacttgtgacctatgaccgtcacaatgaaaagattgggttctggaaaactaactgttcagagttgtgggagaggttacatatcggtgacactccttcaccagccccttcaagtgatacaagttcagaacatgatatgtcgcctgctcctgcccctagtaatttgccagcaactcttttggtgcttatatgaatatgaagcttgatagggcttaagcttttatataaagcgaggcagacaatgagtctgcttctctgaaaggtccttcaagcagtagcagcaacaacaacaaagccttttagtcccaaacaagttggatacataggttgaaggtccttcaagcaaagttaaaaaaaggtctttcaagccgcaatttgacccatgttttactcaattttgtttacctacttagatctttgagtttgagggcacactcaccattctttcttgcctgtacaataatcatgttcatatttcacatgcctagtatttttgttaataaccagtaagattactgtaagctaaagcaagaattaaatattttcgtaattggtgttaattttctttttgcaatgacagggcactttgtttttaggaacaattg

SEQ ID NO: 216206 - DNA, 823 bp, Zea Mays
aaagattgccctgtcggaatgataggtccttgattcattcaaatttcaaaggttttagtaaagcagtctgtgcatattacatgatcatgacagcatttcattaactttctgccttgatcatagtagtatgcagaagcagctcccaattgattgggtcataggggcgatgatttaattctcgggcttatgcatttggaaactttgcgattttgagtaggtaaaataatgaccttaatggcaggtatcattgttcgtaatacacttgtgacctatgaccgtcacaatgaaaagattgggttctggaaaactaactgttcagagttgtgggagaggttacatatcggtgacactccttcaccagccccttcaagtgatacaagttcagaacatgatatgtcgcctgctcctgcccctagtaatttgccagggcttaagcttttatataaagcgaggcagacaatgagtctgcttctctgaaaggtccttcaagcagtagcagcaacaacaacaaagccttttagtcccaaacaagttggatacataggttgaaggtccttcaagcaaagttaaaaaaaggtctttcaagccgcaatttgacccatgttttactcaattttgtttacctacttagatctttgagtttgagggcacactcaccattctttcttgcctgtacaataatcatgttcatatttcacatgcctagtatttttgttaataaccagtaagattactgtaagctaaagcaagaattaaatattttcgtaattggtgttaattttctttttgcaatgacagggcactttgtttttaggaacaattg

SEQ ID NO: 216207 - DNA, 2601 bp, Zea Mays
cgaccttgggaccggaagcgaccaactgacggatcgacaggcccgtgatgccgtcgcggcggcgccgacgcggcgacctcgccgtcgcggtggcggtgctggcgacggtggccctagcggccggggccgacggcggcgcggagttcgactacaggaagctctcggggataatcatcccggggttcgcgtccacgcagctgcgcgcgtggtcggttctcgattgcccctactcgcccttcgacttcaaccccctcgactccgtctggctcgacaccgccaagcttttctctgcggtaaattgctggcttaaatgcatgctgcttgaaccctataatcagacagaccatcccgaatgcaagtcaaggcctgatagtggtctttctgcaattacagagctggaccctggttatataacaggtcctctctcttcagtatggaaagaatgggtcaaatggtgtgtagagtttggcattgaagctaatgcaattatcgctgttccgtatgattggagactgcccccatcaatgcttgaggagagagatctgtactttcacaaattaaagctaacatttgaaattgctttgaaactccgaggagggccatctttggtatttgcgcattcgatgggaaataacgtgtttcgctattttttggaatggttgaaactggaaattgctcccaagcactatatccagtggcttgatgagcatatacatgcatattttgcagttggcgctcctcttcttggatctactgaagcagttagaggcgctctttctggaacaacttttggtcttccagtcagtgagggcacagcacggttgatgtttaatgcatttggttcttctctatggcttatgccattctcaaaacactgcaaagctgataatatctactggaagcatttttttgagggaaaaggaggttgtcctcacaaacaacaatgtgatgaagatgaatatatttcagactacggcggatggcccacagaccttgttaatatcgagatatgggggcatacccatccatcacagatataaccgagaacataacatccattatggagtgtggaaagccaactctcctgtcattttctgccagagaggtttcagatggtactttgttcaaaacgatagaggattatgaccctcagagcaaggcacttgtttatcagcttgagaagtattatcagggtgatccagttctgaaccctctcacaccatgggagagacccccaataaagaacgtattttgcatttacgggattgattcaaagactgaggtaggatattactttgcaccaagtggcaaaccatatccagacaactggataataactgatattatttatgagcttgaaggttccctactttcaagatcaggtaattctgtttctgggaagcctaacaattccagtggtgatggaacagtatcatacaactccctctcatggtgcaagaattggcttggaccaaaagtgaacataacgagggctccacaggcagaacatgatggatctgatctgcaaacagccatgaatattgatcatcatcatggtgacgacatactaccaaacatgacgagggttccgcatgtgaagtacataacctactatgaggatgctgaaagtcttccaggatggagaacagcagtctgggagctcgataaagcaaaccacaggaatattgttaggacgccagtattaatgcgtgagttatggcttgaaatgtggcacgatttgcatcctgattcaaaatcgaaatttgtgacgaaagctttccgaggtccactaagaaacgaagactgtcgctgggactatggaaaggctcgatgtggctttccagaacactgtgaatacaggtatacatttggcgatgtccatctgggaatgagctgcagactgagaaatacgtccgctaaccttcttcaacagtatctctgaaatgtcgtgggccgagtaattttgtgttttgttgctcgcatggaaatggtatctgattccccattttgacctgccaatgaaattagccatcaacaaggtagatacagtatcaaccggaggccctcgaatgacaggtcaactcttattcttgtcaccattttggcacacttaaatctttgaagtcgacatatgcaaagctgaaacaacacgttcgcatgacaaattttggttgaagatggaggccaacgtccccaggagtgtcggcagagttttcctcttgtctgtagcactggcaccttcggcgtcctgaaggtgccatgagatcatacactgatgtacactgtagcatggttttgtaaatcaagccgtcacaaattgacttagtcttacaaaaacgataccctatagattggcagtgttaaaattctttacgactcccaattaaccaccttgattgtaatgtgcccttaaagagatgaaaggatgaactctgctcaatattagaccttgtttggttagggtgactagattttactaaaatacaaaagagggtgactaaggtttcctcctaaagtttagggtctgtttgattgtgtttgttgtggctgtgaaaaaaaatgtgtgagctgtgaaaaaaactgttgtggactatggactgc

SEQ ID NO: 216208 - DNA, 2621 bp, Zea Mays
cgaccttgggaccggaagcgaccaactgacggatcgacaggcccgtgatgccgtcgcggcggcgccgacgcggcgacctcgccgtcgcggtggcggtgctggcgacggtggccctagcggccggggccgacggcggcgcggagttcgactacaggaagctctcggggataatcatcccggggttcgcgtccacgcagctgcgcgcgtggtcggttctcgattgcccctactcgcccttcgacttcaaccccctcgactccgtctggctcgacaccgccaagcttttctctgcggtaaattgctggcttaaatgcatgctgcttgaaccctataatcagacagaccatcccgaatgcaagtcaaggcctgatagtggtctttctgcaattacagagctggaccctggttatataacaggtcctctctcttcagtatggaaagaatgggtcaaatggtgtgtagagtttggcattgaagctaatgcaattatcgctgttccgtatgattggagactgcccccatcaatgcttgaggagagagatctgtactttcacaaattaaagctaacatttgaaattgctttgaaactccgaggagggccatctttggtatttgcgcattcgatgggaaataacgtgtttcgctattttttggaatggttgaaactggaaattgctcccaagcactatatccagtggcttgatgagcatatacatgcatattttgcagttggcgctcctcttcttggatctactgaagcagttagaggcgctctttctggaacaacttttggtcttccagtcagtgagggcacagcacggttgatgtttaatgcatttggttcttctctatggcttatgccattctcaaaacactgcaaagctgataatatctactggaagcatttttttgagggaaaaggaggttgtcctcacaaacaacaatgtgatgaagatgaatatatttcagactacggcggatggcccacagaccttgttaatatcgaggttccttcagctcgagatatgggggcatacccatccatcacagatataaccgagaacataacatccattatggagtgtggaaagccaactctcctgtcattttctgccagagaggtttcagatggtactttgttcaaaacgatagaggattatgaccctcagagcaaggcacttgtttatcagcttgagaagtattatcagggtgatccagttctgaaccctctcacaccatgggagagacccccaataaagaacgtattttgcatttacgggattgattcaaagactgaggtaggatattactttgcaccaagtggcaaaccatatccagacaactggataataactgatattatttatgagcttgaaggttccctactttcaaggcagatcaggtaattctgtttctgggaagcctaacaattccagtggtgatggaacagtatcatacaactccctctcatggtgcaagaattggcttggaccaaaagtgaacataacgagggctccacaggcagaacatgatggatctgatctgcaaacagccatgaatattgatcatcatcatggtgacgacatactaccaaacatgacgagggttccgcatgtgaagtacataacctactatgaggatgctgaaagtcttccaggatggagaacagcagtctgggagctcgataaagcaaaccacaggaatattgttaggacgccagtattaatgcgtgagttatggcttgaaatgtggcacgatttgcatcctgattcaaaatcgaaatttgtgacgaaagctttccgaggtccactaagaaacgaagactgtcgctgggactatggaaaggctcgatgtggctttccagaacactgtgaatacaggtatacatttggcgatgtccatctgggaatgagctgcagactgagaaatacgtccgctaaccttcttcaacagtatctctgaaatgtcgtgggccgagtaattttgtgttttgttgctcgcatggaaatggtatctgattccccattttgacctgccaatgaaattagccatcaacaaggtagatacagtatcaaccggaggccctcgaatgacaggtcaactcttattcttgtcaccattttggcacacttaaatctttgaagtcgacatatgcaaagctgaaacaacacgttcgcatgacaaattttggttgaagatggaggccaacgtccccaggagtgtcggcagagttttcctcttgtctgtagcactggcaccttcggcgtcctgaaggtgccatgagatcatacactgatgtacactgtagcatggttttgtaaatcaagccgtcacaaattgacttagtcttacaaaaacgataccctatagattggcagtgttaaaattctttacgactcccaattaaccaccttgattgtaatgtgcccttaaagagatgaaaggatgaactctgctcaatattagaccttgtttggttagggtgactagattttactaaaatacaaaagagggtgactaaggtttcctcctaaagtttagggtctgtttgattgtgtttgttgtggctgtgaaaaaaaatgtgtgagctgtgaaaaaaactgttgtggactatggactgc

SEQ ID NO: 216209 - DNA, 2619 bp, Zea Mays
cgaccttgggaccggaagcgaccaactgacggatcgacaggcccgtgatgccgtcgcggcggcgccgacgcggcgacctcgccgtcgcggtggcggtgctggcgacggtggccctagcggccggggccgacggcggcgcggagttcgactacaggaagctctcggggataatcatcccggggttcgcgtccacgcagctgcgcgcgtggtcggttctcgattgcccctactcgcccttcgacttcaaccccctcgactccgtctggctcgacaccgccaagcttttctctgcggtaaattgctggcttaaatgcatgctgcttgaaccctataatcagacagaccatcccgaatgcaagtcaaggcctgatagtggtctttctgcaattacagagctggaccctggttatataacaggtttcaggtcctctctcttcagtatggaaagaatgggtcaaatggtgtgtagagtttggcattgaagctaatgcaattatcgctgttccgtatgattggagactgcccccatcaatgcttgaggagagagatctgtactttcacaaattaaagctaacatttgaaattgctttgaaactccgaggagggccatctttggtatttgcgcattcgatgggaaataacgtgtttcgctattttttggaatggttgaaactggaaattgctcccaagcactatatccagtggcttgatgagcatatacatgcatattttgcagttggcgctcctcttcttggatctactgaagcagttagaggcgctctttctggaacaacttttggtcttccagtcagtgagggcacagcacggttgatgtttaatgcatttggttcttctctatggcttatgccattctcaaaacactgcaaagctgataatatctactggaagcatttttttgagggaaaaggaggttgtcctcacaaacaacaatgtgatgaagatgaatatatttcagactacggcggatggcccacagaccttgttaatatcgaggttccttcagctcgagatatgggggcatacccatccatcacagatataaccgagaacataacatccattatggagtgtggaaagccaactctcctgtcattttctgccagagaggtttcagatggtactttgttcaaaacgatagaggattatgaccctcagagcaaggcacttgtttatcagcttgagaagtattatcagggtgatccagttctgaaccctctcacaccatgggagagacccccaataaagaacgtattttgcatttacgggattgattcaaagactgaggtaggatattactttgcaccaagtggcaaaccatatccagacaactggataataactgatattatttatgagcttgaaggttccctactttcaaggtaattctgtttctgggaagcctaacaattccagtggtgatggaacagtatcatacaactccctctcatggtgcaagaattggcttggaccaaaagtgaacataacgagggctccacaggcagaacatgatggatctgatctgcaaacagccatgaatattgatcatcatcatggtgacgacatactaccaaacatgacgagggttccgcatgtgaagtacataacctactatgaggatgctgaaagtcttccaggatggagaacagcagtctgggagctcgataaagcaaaccacaggaatattgttaggacgccagtattaatgcgtgagttatggcttgaaatgtggcacgatttgcatcctgattcaaaatcgaaatttgtgacgaaagctttccgaggtccactaagaaacgaagactgtcgctgggactatggaaaggctcgatgtggctttccagaacactgtgaatacaggtatacatttggcgatgtccatctgggaatgagctgcagactgagaaatacgtccgctaaccttcttcaacagtatctctgaaatgtcgtgggccgagtaattttgtgttttgttgctcgcatggaaatggtatctgattccccattttgacctgccaatgaaattagccatcaacaaggtagatacagtatcaaccggaggccctcgaatgacaggtcaactcttattcttgtcaccattttggcacacttaaatctttgaagtcgacatatgcaaagctgaaacaacacgttcgcatgacaaattttggttgaagatggaggccaacgtccccaggagtgtcggcagagttttcctcttgtctgtagcactggcaccttcggcgtcctgaaggtgccatgagatcatacactgatgtacactgtagcatggttttgtaaatcaagccgtcacaaattgacttagtcttacaaaaacgataccctatagattggcagtgttaaaattctttacgactcccaattaaccaccttgattgtaatgtgcccttaaagagatgaaaggatgaactctgctcaatattagaccttgtttggttagggtgactagattttactaaaatacaaaagagggtgactaaggtttcctcctaaagtttagggtctgtttgattgtgtttgttgtggctgtgaaaaaaaatgtgtgagctgtgaaaaaaactgttgtggactatggactgc

SEQ ID NO: 216210 - DNA, 2568 bp, Zea Mays
cgaccttgggaccggaagcgaccaactgacggatcgacaggcccgtgatgccgtcgcggcggcgccgacgcggcgacctcgccgtcgcggtggcggtgctggcgacggtggccctagcggccggggccgacggcggcgcggagttcgactacaggaagctctcggggataatcatcccggggttcgcgtccacgcagctgcgcgcgtggtcggttctcgattgcccctactcgcccttcgacttcaaccccctcgactccgtctggctcgacaccgccaagcttttctctgcggtaaattgctggcttaaatgcatgctgcttgaaccctataatcagacagaccatcccgaatgcaagtcaaggcctgatagtggtctttctgcaattacagagctggaccctggttatataacaggtcctctctcttcagtatggaaagaatgggtcaaatggtgtgtagagtttggcattgaagctaatgcaattatcgctgttccgtatgattggagactgcccccatcaatgcttgaggagagagatctgtactttcacaaattaaagctaacatttgaaattgctttgaaactccgaggagggccatctttggtatttgcgcattcgatgggaaataacgtgtttcgctattttttggaatggttgaaactggaaattgctcccaagcactatatccagtggcttgatgagcatatacatgcatattttgcagttggcgctcctcttcttggatctactgaagcagttagaggcgctctttctggaacaacttttggtcttccagtcagtgagggcacagcacggttgatgtttaatgcatttggttcttctctatggcttatgccattctcaaaacactgcaaagctgataatatctactggaagcatttttttgagggaaaaggaggttgtcctcacaaacaacaatgtgatgaagatgaatatatttcagactacggcggatggcccacagaccttgttaatatcgaggttccttcagctcgagatatgggggcatacccatccatcacagatataaccgagaacataacatccattatggagtgtggaaagccaactctcctgtcattttctgccagagaggtttcagatggtactttgttcaaaacgatagaggattatgaccctcagagcaaggcacttgtttatcagcttgagaagtattatcagggtgatccagttctgaaccctctcacaccatgggagagacccccaataaagaacgtattttgcatttacgggattgattcaaagactgaggtaggatattactttgcaccaagtggcaaaccatatccagacaactggataataactgatattatttatgagcttgaaggttccctactttcaagatcaggtaattctgtttctgggaagcctaacaattccagtggtgatggaacagtatcatacaactccctctcatggtgcaagaattggcttggaccaaaagtgaacataacgagggctccacagtatattgcaacattaagtcgccctctctaattatcctcttgtactcttcaaggcagaacatgatggatctgatctgcaaacagccatgaatattgatcatcatcatggtgacgacatactaccaaacatgacgagggttccgcatgtgaagtacataacctactatgaggatgctgaaagtcttccaggatggagaacagcagtctgggagctcgataaagcaaaccacaggaatattgttaggacgccagtattaatgcgtgagttatggcttgaaatgtggcacgatttgcatcctgattcaaaatcgaaatttgtgacgaaagctttccgaggtccactaagaaacgaagactgtcgctgggactatggaaaggctcgatgtggctttccagaacactgtgaatacaggtatacatttggcgatgtccatctgggaatgagctgcagactgagaaatacgtccgctaaccttcttcaacagtatctctgaaatgtcgtgggccgagtaattttgtgttttgttgctcgcatggaaatggtatctgattccccattttgacctgccaatgaaattagccatcaacaaggtagatacagtatcaaccggaggccctcgaatgacagatggaggccaacgtccccaggagtgtcggcagagttttcctcttgtctgtagcactggcaccttcggcgtcctgaaggtgccatgagatcatacactgatgtacactgtagcatggttttgtaaatcaagccgtcacaaattgacttagtcttacaaaaacgataccctatagattggcagtgttaaaattctttacgactcccaattaaccaccttgattgtaatgtgcccttaaagagatgaaaggatgaactctgctcaatattagaccttgtttggttagggtgactagattttactaaaatacaaaagagggtgactaaggtttcctcctaaagtttagggtctgtttgattgtgtttgttgtggctgtgaaaaaaaatgtgtgagctgtgaaaaaaactgttgtggactatggactgc

SEQ ID NO: 216211 - DNA, 2661 bp, Zea Mays
tcgccgttcgcgcacgcgcacgcgcacgcgagccatccgaccttgggaccggaagcgaccaactgacggatcgacaggcccgtgatgccgtcgcggcggcgccgacgcggcgacctcgccgtcgcggtggcggtgctggcgacggtggccctagcggccggggccgacggcggcgcggagttcgactacaggaagctctcggggataatcatcccggggttcgcgtccacgcagctgcgcgcgtggtcggttctcgattgcccctactcgcccttcgacttcaaccccctcgactccgtctggctcgacaccgccaagcttttctctgcggtaaattgctggcttaaatgcatgctgcttgaaccctataatcagacagaccatcccgaatgcaagtcaaggcctgatagtggtctttctgcaattacagagctggaccctggttatataacaggtttcaggtcctctctcttcagtatggaaagaatgggtcaaatggtgtgtagagtttggcattgaagctaatgcaattatcgctgttccgtatgattggagactgcccccatcaatgcttgaggagagagatctgtactttcacaaattaaagctaacatttgaaattgctttgaaactccgaggagggccatctttggtatttgcgcattcgatgggaaataacgtgtttcgctattttttggaatggttgaaactggaaattgctcccaagcactatatccagtggcttgatgagcatatacatgcatattttgcagttggcgctcctcttcttggatctactgaagcagttagaggcgctctttctggaacaacttttggtcttccagtcagtgagggcacagcacggttgatgtttaatgcatttggttcttctctatggcttatgccattctcaaaacactgcaaagctgataatatctactggaagcatttttttgagggaaaaggaggttgtcctcacaaacaacaatgtgatgaagatgaatatatttcagactacggcggatggcccacagaccttgttaatatcgaggttccttcagctcgagatatgggggcatacccatccatcacagatataaccgagaacataacatccattatggagtgtggaaagccaactctcctgtcattttctgccagagaggtttcagatggtactttgttcaaaacgatagaggattatgaccctcagagcaaggcacttgtttatcagcttgagaagtattatcagggtgatccagttctgaaccctctcacaccatgggagagacccccaataaagaacgtattttgcatttacgggattgattcaaagactgaggtaggatattactttgcaccaagtggcaaaccatatccagacaactggataataactgatattatttatgagcttgaaggttccctactttcaagatcaggtaattctgtttctgggaagcctaacaattccagtggtgatggaacagtatcatacaactccctctcatggtgcaagaattggcttggaccaaaagtgaacataacgagggctccacaggcagaacatgatggatctgatctgcaaacagccatgaatattgatcatcatcatggtgacgacatactaccaaacatgacgagggttccgcatgtgaagtacataacctactatgaggatgctgaaagtcttccaggatggagaacagcagtctgggagctcgataaagcaaaccacaggaatattgttaggacgccagtattaatgcgtgagttatggcttgaaatgtggcacgatttgcatcctgattcaaaatcgaaatttgtgacgaaagctttccgaggtccactaagaaacgaagactgtcgctgggactatggaaaggctcgatgtggctttccagaacactgtgaatacaggtatacatttggcgatgtccatctgggaatgagctgcagactgagaaatacgtccgctaaccttcttcaacagtatctctgaaatgtcgtgggccgagtaattttgtgttttgttgctcgcatggaaatggtatctgattccccattttgacctgccaatgaaattagccatcaacaaggtagatacagtatcaaccggaggccctcgaatgacaggtcaactcttattcttgtcaccattttggcacacttaaatctttgaagtcgacatatgcaaagctgaaacaacacgttcgcatgacaaattttggttgaagatggaggccaacgtccccaggagtgtcggcagagttttcctcttgtctgtagcactggcaccttcggcgtcctgaaggtgccatgagatcatacactgatgtacactgtagcatggttttgtaaatcaagccgtcacaaattgacttagtcttacaaaaacgataccctatagattggcagtgttaaaattctttacgactcccaattaaccaccttgattgtaatgtgcccttaaagagatgaaaggatgaactctgctcaatattagaccttgtttggttagggtgactagattttactaaaatacaaaagagggtgactaaggtttcctcctaaagtttagggtctgtttgattgtgtttgttgtggctgtgaaaaaaaatgtgtgagctgtgaaaaaaactgttgtggactatggactgc

SEQ ID NO: 216212 - DNA, 3305 bp, Zea Mays
aaacaggacctttagtcctttactcatcctcgttagtcttgactcttgcgcgtccacccctgcgcttttcactagtttggattcggacttcctgcgctccgccaattgcttcctactccacctcctcttctccctccccaagccgccgccgccgccgccgcctcatctcatccccatcacccactcccggcggatcgtcgatggcggcgccggcgatatggcagccacaggagcaggggctccacgagatctgcaccctcctggaggcgcacatctcccccaactccgaccaggcccgcatctggcagcagctccagcactacagccagttccccgacttcaataattacctaaccttcatcctggcccgcggagaggggaaatcaattgaagttagacaggcagctggtctactactgaaaaacaatctgcgaacgactttcatctctatgcaaccttcgtcccagcattatgttaagtctgagctgttaccatgtataggggcaaccaatagggctattagatccacagttggaacagtgatcagtgtacttttccaaattgtacgagtcgctggatggattgagttgtttcaggcactccataagtgtttggagagtaatgacctggatcacatggaaggtgctatggatgcgatatacaagatctgtgaggatgtccctgaagagctcgatgttgatgttcctggtttgtctgaacgaccgatcaatgtgtttatgccaaaaatactgcagttcttccagtcaccacatgcaagtttgagaaaactatcgttgggttgtataaatcagtacatagtagtgatgccatcggcactctacatgtctatggatcagtatattcagggattattcaaccttgcaaaggacccttcagcagatgttcggaaactggtttgttcagcctgggttcagctcattgaagttcgcccatctattttggagtcacatcttaaaaatgttactgaattgattctgcaagctaataaagatccagatgatgaagtcgctctggaagcttgcgagttctggtctgcatactgtgatgtgagcatgcctcctgaaggtttacgggagttcttgccacgcttaatcccgactttgttgtcgaacatggtatatgctgatgatgatgagtcccttgatgatgctgaggaagatgaatcctttccggacagggaccaggatttgaagccccgctttcatgcctctcgattgcatggatcacaaactggagatgatgatgatgatgatgatgctgtaaatgtctggaacctgcggaagtgtagtgctgctgggttggatgttctctctaatgtgtttggtgacagcatccttccaactttaatgccattgattgagcaaaacttggctcgaacagatgacaattcttggaaggagagggaaactgctgttttgtgtctaggcgctatagcagaggggtgcattggtggtctatacccacaccttcctcagattgttgccttcctaatcccacttcttgatgataaatttcctcttatacggagtattacgtgttggacgctctctcgatatagcaaattcattgttcagagccttgatcatccaaatggacgtgaacaatttgataagattctcatgggattgctaagaaggatattggatactaacaaaagagtgcaagaggctgcttgttcagcgtttgcaactcttgaagaggaagcttctgaagaattagtaccccacttggaagtaattttgcagcacctcatgtgtgcctatggaaaataccagagacgaaatcttcggatactctatgatgcccttggtaccctggctgatgctgttggagcagaattaaatcaggcattgggaccaggatttgctcagtttgcggaaccagtgtttcaaaggtgcatcaatcttatccaatcgcaacagttggcaaagattgatcctactgcagctggtgcggtgtatgatagagaattcattgtttgttcgttggacctactgtctggacttgcagaaggtcttggcgctggtattgaaagtcttgttgcacagagcagtttgagagatctgcttttgcaatgctgcatggatgaagcagctgatgttcgacaaagtgcccttgcccttcttggagacctttctagggtttgcccaatacatttgcatccacgtcttcaagaatttcttactgttgcagcaaagcaactgaaccctcagtctgtgaaggatgcggtatcagtagctaacaatgcctgttgggctattggagaattagcaatcaagattggcaaagaaatagcacctgtggtgatcaccgttgtttcgtgcttgattaccatcctaaaatccccagagggtttgaacaagtcacttgttgaaaatagtgcgatcactcttgggaggcttagctgggtctgtccagacatcgtggcccctcatatggagcatttcatgcaagcatggtgcagtgccttgtgcacgatcagagatgattttgagaaagaggacgcgtttcatggactgtgtgcaatggtggcagcaaaccctacaggagccgctggttcattagcttacatctgccaggcctgtgcaagttggactgagataaaaagcgaaggtcttcacaatgaggtgtgccagattctgaatggctacaagcagctgcttggaaacaacggtgggtgggaacaatgcatggccgccctgaaaccagacgttgtgcagaaattagctagatacggagtatgatgagaagcaagctcgtgtggtttattcacctcatacaccgaccatcatctttatggcggagacaagagaggagcagaaaggggtgggggtcgtcgagagtgtctctgctgctgatgcatcatctttacatgtgtggcacttgagagtcgattcggttcgttggtacgccattgtccgttcgttcattgttatactggttggtgcacagcatttccagagcgagagtaggatgtcttggtaaaccccccatgtgtattggttggttgggccagtggacttggttttggtttttttgtcattcctactggcaaacacaacaaggccaccaccctcttgctcgccccaccccggcaacattgagaaaacagaaaggttttgtagcgtgtaattctctctcttttcttggtttcttattattattaggtgtaggattgttttcgagtcttgtttggcaggaagggtttgtacgagaaatcaattgattgctcactcaccacaaaataataaaaaagatcgatcgatggggcttgtatctcctgc

SEQ ID NO: 216213 - DNA, 3067 bp, Zea Mays
tatctgggctctagtttcgtccctggaggggaaatcaattgaagttagacaggcagctggtctactactgaaaaacaatctgcgaacgactttcatctctatgcaaccttcgtcccagcattatgttaagtctgagctgttaccatgtataggggcaaccaatagggctattagatccacagttggaacagtgatcagtgtacttttccaaattgtacgagtcgctggatggattgagttgtttcaggcactccataagtgtttggagagtaatgacctggatcacatggaaggtgctatggatgcgatatacaagatctgtgaggatgtccctgaagagctcgatgttgatgttcctggtttgtctgaacgaccgatcaatgtgtttatgccaaaaatactgcagttcttccagtcaccacatgcaagtttgagaaaactatcgttgggttgtataaatcagtacatagtagtgatgccatcggcactctacatgtctatggatcagtatattcagggattattcaaccttgcaaaggacccttcagcagatgttcggaaactggtttgttcagcctgggttcagctcattgaagttcgcccatctattttggagtcacatcttaaaaatgttactgaattgattctgcaagctaataaagatccagatgatgaagtcgctctggaagcttgcgagttctggtctgcatactgtgatgtgagcatgcctcctgaaggtttacgggagttcttgccacgcttaatcccgactttgttgtcgaacatggtatatgctgatgatgatgagtcccttgatgatgctgaggaagatgaatcctttccggacagggaccaggatttgaagccccgctttcatgcctctcgattgcatggatcacaaactggagatgatgatgatgatgatgatgctgtaaatgtctggaacctgcggaagtgtagtgctgctgggttggatgttctctctaatgtgtttggtgacagcatccttccaactttaatgccattgattgagcaaaacttggctcgaacagatgacaattcttggaaggagagggaaactgctgttttgtgtctaggcgctatagcagaggggtgcattggtggtctatacccacaccttcctcagattgttgccttcctaatcccacttcttgatgataaatttcctcttatacggagtattacgtgttggacgctctctcgatatagcaaattcattgttcagagccttgatcatccaaatggacgtgaacaatttgataagattctcatgggattgctaagaaggatattggatactaacaaaagagtgcaagaggctgcttgttcagcgtttgcaactcttgaagaggaagcttctgaagaattagtaccccacttggaagtaattttgcagcacctcatgtgtgcctatggaaaataccagagacgaaatcttcggatactctatgatgcccttggtaccctggctgatgctgttggagcagaattaaatcaggcaaaatatctagatatatttatgccgcctttgatcacgaagtggcagcaactttccaattctgacaaagatctatttccactccttgaatgctttacatctattgcacaggcattgggaccaggatttgctcagtttgcggaaccagtgtttcaaaggtgcatcaatcttatccaatcgcaacagttggcaaagattgatcctactgcagctggtgcggtgtatgatagagaattcattgtttgttcgttggacctactgtctggacttgcagaaggtcttggcgctggtattgaaagtcttgttgcacagagcagtttgagagatctgcttttgcaatgctgcatggatgaagcagctgatgttcgacaaagtgcccttgcccttcttggagacctttctagggtttgcccaatacatttgcatccacgtcttcaagaatttcttactgttgcagcaaagcaactgaaccctcagtctgtgaaggatgcggtatcagtagctaacaatgcctgttgggctattggagaattagcaatcaagattggcaaagaaatagcacctgtggtgatcaccgttgtttcgtgcttgattaccatcctaaaatccccagagggtttgaacaagtcacttgttgaaaatagtgcgatcactcttgggaggcttagctgggtctgtccagacatcgtggcccctcatatggagcatttcatgcaagcatggtgcagtgccttgtgcacgatcagagatgattttgagaaagaggacgcgtttcatggactgtgtgcaatggtggcagcaaaccctacaggagccgctggttcattagcttacatctgccaggcctgtgcaagttggactgagataaaaagcgaaggtcttcacaatgaggtgtgccagattctgaatggctacaagcagctgcttggaaacaacggtgggtgggaacaatgcatggccgccctgaaaccagacgttgtgcagaaattagctagatacggagtatgatgagaagcaagctcgtgtggtttattcacctcatacaccgaccatcatctttatggcggagacaagagaggagcagaaaggggtgggggtcgtcgagagtgtctctgctgctgatgcatcatctttacatgtgtggcacttgagagtcgattcggttcgttggtacgccattgtccgttcgttcattgttatactggttggtgcacagcatttccagagcgagagtaggatgtcttggtaaaccccccatgtgtattggttggttgggccagtggacttggttttggtttttttgtcattcctactggcaaacacaacaaggccaccaccctcttgctcgccccaccccggcaacattgagaaaacagaaaggttttgtagcgtgtaattctctctcttttcttggtttcttattattattaggtgtaggattgttttcgagtcttgtttggcaggaagggtttgtacgagaaatcaattgattgctcactcaccacaaaataataaaaaagatcgatcgatggggcttgtatctcctgc

SEQ ID NO: 216214 - DNA, 3027 bp, Zea Mays
ctgggctctagtttcgtccctggaggggaaatcaattgaagttagacaggcagctggtctactactgaaaaacaatctgcgaacgactttcatctctatgcaaccttcgtcccagcattatgttaagtctgagctgttaccatgtataggggcaaccaatagggctattagatccacagttggaacagtgatcagtgtacttttccaaattgtacgagtcgctggatggattgagttgtttcaggcactccataagtgtttggagagtaatgacctggatcacatggaaggtgctatggatgcgatatacaagatctgtgaggatgtccctgaagagctcgatgttgatgttcctggtttgtctgaacgaccgatcaatgtgtttatgccaaaaatactgcagttcttccagtcaccacatgcaagtttgagaaaactatcgttgggttgtataaatcagtacatagtagtgatgccatcggcactctacatgtctatggatcagtatattcagggattattcaaccttgcaaaggacccttcagcagatgttcggaaactggtttgttcagcctgggttcagctcattgaagttcgcccatctattttggagtcacatcttaaaaatgttactgaattgattctgcaagctaataaagatccagatgatgaagtcgctctggaagcttgcgagttctggtctgcatactgtgatgtgagcatgcctcctgaaggtttacgggagttcttgccacgcttaatcccgactttgttgtcgaacatggtatatgctgatgatgatgagtcccttgatgatgctgaggaagatgaatcctttccggacagggaccaggatttgaagccccgctttcatgcctctcgattgcatggatcacaaactggagatgatgatgatgatgatgatgctgtaaatgtctggaacctgcggaagtgtagtgctgctgggttggatgttctctctaatgtgtttggtgacagcatccttccaactttaatgccattgattgagcaaaacttggctcgaacagatgacaattcttggaaggagagggaaactgctgttttgtgtctaggcgctatagcagaggggtgcattggtggtctatacccacaccttcctcagattgttgccttcctaatcccacttcttgatgataaatttcctcttatacggagtattacgtgttggacgctctctcgatatagcaaattcattgttcagagccttgatcatccaaatggacgtgaacaatttgataagattctcatgggattgctaagaaggatattggatactaacaaaagagtgcaagaggctgcttgttcagcgtttgcaactcttgaagaggaagcttctgaagaattagtaccccacttggaagtaattttgcagcacctcatgtgtgcctatggaaaataccagagacgaaatcttcggatactctatgatgcccttggtaccctggctgatgctgttggagcagaattaaatcaggcaaaatatctagatatatttatgccgcctttgatcacgaagtggcagcaactttccaattctgacaaagatctatttccactccttgaatgctttacatctattgcacaggcattgggaccaggatttgctcagtttgcggaaccagtgtttcaaagattgatcctactgcagctggtgcggtgtatgatagagaattcattgtttgttcgttggacctactgtctggacttgcagaaggtcttggcgctggtattgaaagtcttgttgcacagagcagtttgagagatctgcttttgcaatgctgcatggatgaagcagctgatgttcgacaaagtgcccttgcccttcttggagacctttctagggtttgcccaatacatttgcatccacgtcttcaagaatttcttactgttgcagcaaagcaactgaaccctcagtctgtgaaggatgcggtatcagtagctaacaatgcctgttgggctattggagaattagcaatcaagattggcaaagaaatagcacctgtggtgatcaccgttgtttcgtgcttgattaccatcctaaaatccccagagggtttgaacaagtcacttgttgaaaatagtgcgatcactcttgggaggcttagctgggtctgtccagacatcgtggcccctcatatggagcatttcatgcaagcatggtgcagtgccttgtgcacgatcagagatgattttgagaaagaggacgcgtttcatggactgtgtgcaatggtggcagcaaaccctacaggagccgctggttcattagcttacatctgccaggcctgtgcaagttggactgagataaaaagcgaaggtcttcacaatgaggtgtgccagattctgaatggctacaagcagctgcttggaaacaacggtgggtgggaacaatgcatggccgccctgaaaccagacgttgtgcagaaattagctagatacggagtatgatgagaagcaagctcgtgtggtttattcacctcatacaccgaccatcatctttatggcggagacaagagaggagcagaaaggggtgggggtcgtcgagagtgtctctgctgctgatgcatcatctttacatgtgtggcacttgagagtcgattcggttcgttggtacgccattgtccgttcgttcattgttatactggttggtgcacagcatttccagagcgagagtaggatgtcttggtaaaccccccatgtgtattggttggttgggccagtggacttggttttggtttttttgtcattcctactggcaaacacaacaaggccaccaccctcttgctcgccccaccccggcaacattgagaaaacagaaaggttttgtagcgtgtaattctctctcttttcttggtttcttattattattaggtgtaggattgttttcgagtcttgtttggcaggaagggtttgtacgagaaatcaattgattgctcactcaccacaaaataataaaaaagatcgatcgatggggcttgtatctcctgc

SEQ ID NO: 216215 - DNA, 2273 bp, Zea Mays
gaaattgttagtggctgaaaccctaaccctaaaccagggttgggtgatgtattataatagaggatttgaagccccgctttcatgcctctcgattgcatggatcacaaactggagatgatgatgatgatgatgatgctgtaaatgtctggaacctgcggaagtgtagtgctgctgggttggatgttctctctaatgtgtttggtgacagcatccttccaactttaatgccattgattgagcaaaacttggctcgaacagatgacaattcttggaaggagagggaaactgctgttttgtgtctaggcgctatagcagaggggtgcattggtggtctatacccacaccttcctcagattgttgccttcctaatcccacttcttgatgataaatttcctcttatacggagtattacgtgttggacgctctctcgatatagcaaattcattgttcagagccttgatcatccaaatggacgtgaacaatttgataagattctcatgggattgctaagaaggatattggatactaacaaaagagtgcaagaggctgcttgttcagcgtttgcaactcttgaagaggaagcttctgaagaattagtaccccacttggaagtaattttgcagcacctcatgtgtgcctatggaaaataccagagacgaaatcttcggatactctatgatgcccttggtaccctggctgatgctgttggagcagaattaaatcaggcaaaatatctagatatatttatgccgcctttgatcacgaagtggcagcaactttccaattctgacaaagatctatttccactccttgaatgctttacatctattgcacaggcattgggaccaggatttgctcagtttgcggaaccagtgtttcaaaggtgcatcaatcttatccaatcgcaacagttggcaaagattgatcctactgcagctggtgcggtgtatgatagagaattcattgtttgttcgttggacctactgtctggacttgcagaaggtcttggcgctggtattgaaagtcttgttgcacagagcagtttgagagatctgcttttgcaatgctgcatggatgaagcagctgatgttcgacaaagtgcccttgcccttcttggagacctttctagggtttgcccaatacatttgcatccacgtcttcaagaatttcttactgttgcagcaaagcaactgaaccctcagtctgtgaaggatgcggtatcagtagctaacaatgcctgttgggctattggagaattagcaatcaagattggcaaagaaatagcacctgtggtgatcaccgttgtttcgtgcttgattaccatcctaaaatccccagagggtttgaacaagtcacttgttgaaaatagtgcgatcactcttgggaggcttagctgggtctgtccagacatcgtggcccctcatatggagcatttcatgcaagcatggtgcagtgccttgtgcacgatcagagatgattttgagaaagaggacgcgtttcatggactgtgtgcaatggtggcagcaaaccctacaggagccgctggttcattagcttacatctgccaggcctgtgcaagttggactgagataaaaagcgaaggtcttcacaatgaggtgtgccagattctgaatggctacaagcagctgcttggaaacaacggtgggtgggaacaatgcatggccgccctgaaaccagacgttgtgcagaaattagctagatacggagtatgatgagaagcaagctcgtgtggtttattcacctcatacaccgaccatcatctttatggcggagacaagagaggagcagaaaggggtgggggtcgtcgagagtgtctctgctgctgatgcatcatctttacatgtgtggcacttgagagtcgattcggttcgttggtacgccattgtccgttcgttcattgttatactggttggtgcacagcatttccagagcgagagtaggatgtcttggtaaaccccccatgtgtattggttggttgggccagtggacttggttttggtttttttgtcattcctactggcaaacacaacaaggccaccaccctcttgctcgccccaccccggcaacattgagaaaacagaaaggttttgtagcgtgtaattctctctcttttcttggtttcttattattattaggtgtaggattgttttcgagtcttgtttggcaggaagggtttgtacgagaaatcaattgattgctcactcaccacaaaataataaaaaagatcgatcgatggggcttgtatctcctgc

SEQ ID NO: 216216 - DNA, 2243 bp, Zea Mays
gaattgtaaagcacatagcatattgaagattggatttgaagccccgctttcatgcctctcgattgcatggatcacaaactggagatgatgatgatgatgatgatgctgtaaatgtctggaacctgcggaagtgtagtgctgctgggttggatgttctctctaatgtgtttggtgacagcatccttccaactttaatgccattgattgagcaaaacttggctcgaacagatgacaattcttggaaggagagggaaactgctgttttgtgtctaggcgctatagcagaggggtgcattggtggtctatacccacaccttcctcagattgttgccttcctaatcccacttcttgatgataaatttcctcttatacggagtattacgtgttggacgctctctcgatatagcaaattcattgttcagagccttgatcatccaaatggacgtgaacaatttgataagattctcatgggattgctaagaaggatattggatactaacaaaagagtgcaagaggctgcttgttcagcgtttgcaactcttgaagaggaagcttctgaagaattagtaccccacttggaagtaattttgcagcacctcatgtgtgcctatggaaaataccagagacgaaatcttcggatactctatgatgcccttggtaccctggctgatgctgttggagcagaattaaatcaggcaaaatatctagatatatttatgccgcctttgatcacgaagtggcagcaactttccaattctgacaaagatctatttccactccttgaatgctttacatctattgcacaggcattgggaccaggatttgctcagtttgcggaaccagtgtttcaaaggtgcatcaatcttatccaatcgcaacagttggcaaagattgatcctactgcagctggtgcggtgtatgatagagaattcattgtttgttcgttggacctactgtctggacttgcagaaggtcttggcgctggtattgaaagtcttgttgcacagagcagtttgagagatctgcttttgcaatgctgcatggatgaagcagctgatgttcgacaaagtgcccttgcccttcttggagacctttctagggtttgcccaatacatttgcatccacgtcttcaagaatttcttactgttgcagcaaagcaactgaaccctcagtctgtgaaggatgcggtatcagtagctaacaatgcctgttgggctattggagaattagcaatcaagattggcaaagaaatagcacctgtggtgatcaccgttgtttcgtgcttgattaccatcctaaaatccccagagggtttgaacaagtcacttgttgaaaatagtgcgatcactcttgggaggcttagctgggtctgtccagacatcgtggcccctcatatggagcatttcatgcaagcatggtgcagtgccttgtgcacgatcagagatgattttgagaaagaggacgcgtttcatggactgtgtgcaatggtggcagcaaaccctacaggagccgctggttcattagcttacatctgccaggcctgtgcaagttggactgagataaaaagcgaaggtcttcacaatgaggtgtgccagattctgaatggctacaagcagctgcttggaaacaacggtgggtgggaacaatgcatggccgccctgaaaccagacgttgtgcagaaattagctagatacggagtatgatgagaagcaagctcgtgtggtttattcacctcatacaccgaccatcatctttatggcggagacaagagaggagcagaaaggggtgggggtcgtcgagagtgtctctgctgctgatgcatcatctttacatgtgtggcacttgagagtcgattcggttcgttggtacgccattgtccgttcgttcattgttatactggttggtgcacagcatttccagagcgagagtaggatgtcttggtaaaccccccatgtgtattggttggttgggccagtggacttggttttggtttttttgtcattcctactggcaaacacaacaaggccaccaccctcttgctcgccccaccccggcaacattgagaaaacagaaaggttttgtagcgtgtaattctctctcttttcttggtttcttattattattaggtgtaggattgttttcgagtcttgtttggcaggaagggtttgtacgagaaatcaattgattgctcactcaccacaaaataataaaaaagatcgatcgatggggcttgtatctcctgc

SEQ ID NO: 216217 - DNA, 1498 bp, Zea Mays
atggcggcggcgcggcggatcgacctggccgaccgttggcgcaggatgcaggaggacgaggacgccgatgacggcggcgagtcgtccgccgccaagcaccggcgactcatccgcgccaaggaggagtggttttcacattgctatacctttctgataaatttaccaaaagaagatcatatttggtgtggatatgctgatatcatgagccccttcatggagacattccatggcttctttgatgatgaagatgagaactcatctcttcgaataatgtggacaagagtttcccgagaaatgggcatttgcacacaatgtgtatgtgaacaccaccaggcacaaggatttttcaataccgaatatcagtcagatactgttgatccccttctgaaagtattgcggcttcttgatgaagagaggataacaggacatcttatacatatcaacacaaagcttcagctcaaagaatatgacccttcatgccatggtgcagaagttgttagcataatgtttgaagttctgatgtatcctgttctgttggatgaccaatcattggctaatcaatttcagatgttcattgaaaaaattgatgagacgtacgaagtgagcctttcaactaatcagcaataccccggtgtctatgccctacttttcttcaaaagctgtaaagctcgggctattgggcttcgattagctcgatccatggggaagctgaggagggcagttgatttggagccattgcaacccttattacaaaagtatattatctttttggaagcggaagtccttccatctacttcagaacattcgagacctagggtgcagctcaaaagagccgatgtatggcttggatttaaatcactgtatccttggatttcttgaggctccagcttttgaagatggaattctggaaaagtacccattcctgaatattgtacttaaccatgtcagtgatgacacatctgatttgtcgtgtgctgtaagttgcctcaaggcatcatttgaaatgctcggttgcaagctttggctgagaacaacactatcacctagtgttatgcggaacacattattgggtcactgttttcatacgcataccgagaaaagtcacaaagaaatttttgatcttttcctcccatttcttcagtcacttgaagcgctacaagacggtgaacatgaaaagcaaaggaggaacattttgtattttcttcttcatcaagttactcggagtagtaatttcagtgccttgatgagaaaaactgcgactaagattgcacttcttattgtacaaagaggctacacaatgaaccctccatgcccaccttccgaatgcgcccatatgtggggcccatctttgatcagttcggtagaggatacatccttacatgtttcattgcggcagcctgcacttgttctcatttatattatcataatttctgatgcttctgcgttgatttactataaattgaaatatggagctgttcaaaaggtcaatgtaagcaat

SEQ ID NO: 216218 - DNA, 1655 bp, Zea Mays
gcccggcagataccataccattcgcaaatccttccgttccgaaaccgcactcccgcgctctcgcattcacgtctctatcccgcgcgctcgctcgccgtcttgccgaaaccctagaaccacgccgggccggcaccgatcacggaccggcgccgtccgcggcgatggcggcggcgcggcggatcgacctggccgaccgttggcgcaggatgcaggaggacgaggacgccgatgacggcggcgagtcgtccgccgccaagcaccggcgactcatccgcgccaaggaggagtggttttcacattgctatacctttctgataaatttaccaaaagaagatcatatttggtgtggatatgctgatatcatgagccccttcatggagacattccatggcttctttgatgatgaagatgagaactcatctcttcgaataatgtggacaagagtttcccgagaaatgggcatttgcacacaatgtgtatgtgaacaccaccaggcacaaggatttttcaataccgaatatcagtcagatactgttgatccccttctgaaagtattgcggcttcttgatgaagagaggataacaggacatcttatacatatcaacacaaagcttcagctcaaagaatatgacccttcatgccatggtgcagaagttgttagcataatgtttgaagttctgatgtatcctgttctgttggatgaccaatcattggctaatcaatttcagatgttcattgaaaaaattgatgagacgtacgaagtgagcctttcaactaatcagcaataccccggtgtctatgccctacttttcttcaaaagctgtaaagctcgggctattgggcttcgattagctcgatccatggggaagctgaggagggcagttgatttggagccattgcaacccttattacaaaagtatattatctttttggaagcggaagtccttccatctacttcagaacattcgagacctagggtgcagctcaaaagagccgatgtatggcttggatttaaatcactccttggatttcttgaggctccagcttttgaagatggaattctggaaaagtacccattcctgaatattgtacttaaccatgtcagtgatgacacatctgatttgtcgtgtgctgtaagttgcctcaaggcatcatttgaaatgctcggttgcaagctttggctgagaacaacactatcacctagtgttatgcggaacacattattgggtcactgttttcatacgcataccgagaaaagtcacaaagaaatttttgatcttttcctcccatttcttcagtcacttgaagcgctacaagacggtgaacatgaaaagcaaaggaggaacattttgtattttcttcttcatcaagttactcggagtagtaatttcagtgccttgatgagaaaaactgcgactaagattgcacttcttattgtacaaagaggctacacaatgaaccctccatgcccaccttccgaatgcgcccatatgtggggcccatctttgatcagttcggtagaggatacatccttacatgtttcattgcggcagcctgcacttgttctcatttatattatcataatttctgatgcttctgcgttgatttactataaattgaaatatggagctgttcaaaaggtcaatgtaagcaat

SEQ ID NO: 216219 - DNA, 2622 bp, Zea Mays
ctggctggtggccatggctacgtgagcaagtgagcaacgcgtgttccgccgcccctccgctccggagtgcagagaccacacaagacaagagggagagagccgagaaaggaaaacgaaaaaaaaaacggcctttccttccccccgcccaaaccaagaaagtgagagcgcgcagcgagcccctgccggcgactcggcagtccgcactgaggagtgaggacgattcgttcagcttgctcccaacaaattcgttggaggacaggggaggggcggggtcgtccgccgctggttctgtagtcagccaggtatcagcgtttgaggctaaaaaatggagcactgtacagcttttatatgtacttcagcacagtggcctcactcaataacgaccactcgacgagtggcataccatagatctgcaaattcaagtttctcagcaccccaaaggagaaggcggtcaacactctatgtcatgaatgccgcatcaaccagtgctccaatttcacctcaaaacataacccaacttccacggacgaacagcacagttatcaaaagtatatccagcgacaaacccagcagtgcaatggagcaacttgatattgaacgtggtgtctgtattccgttccgaaagtacactcctgaaatggtcaggaaaaaagtattggattcaagaggttccatactgtcccttgcgagccggggagtggagataatttggaaacttggattttactggtcatctcttgtgtatgactttttggttggacaggatgaagaaattgttccatatcgtgcccggcagctccgtaatcttttatgtgatctgggcccatctttcataaaagcaggacaggttctagccaacaggcctgacattattcgagaggattatatgaatgaactttgcatcttgcaagatgatgtccctccattccctaaccaggtggctttttccataatcgaggaggagcttggccagcctatagagagattgttcagcaaaatttcatcagagacaatagcagctgctagtttgggccaagtttaccgagccacacttagagaaactggcgaggatgtcgctattaaggttcagagaccagggattgaaccaataatataccgagatctattcttgttccgcactttggcttcatttttgaatgggattagtcttcagaaactagggtgcaatgcggagcttattgttgatgaatttggcgaaaaacttttggaagaacttgattacactcttgaagctacaaatattgaggacttcctagaaaattttaaggatgatccaactgtcaagatacctcaagtgtataagcagctttcaggttcccgtgttctggtgatggagtggatagatggaattagatgtacggacccacaggctataaaagaagctggaatcgatatggaaggttttctcacggttggagtgagtgctgctttgcgtcagttacttgaatttggtcttttccatggagatccacatcctggaaatatttttgcaatgcgtgatggtcgtattgcttatgtcgacttcggaaatgtggccgttcttagccagcaaaacaaacaaatcctaatagacgctgttgttcatgctgttaacgaagactatgctgaaatggcaaatgacttcacaaggttgggtttccttgctagtggaacagatgtagccccaattattccagctctggaatctatttggcaaaactcagcaggaaaaggcttggcggacttcaatttccggagtgtgactggtgctattcaaggatggggcattccagtggaaacgactagaaaaccttatagttcttgccaaggagaatgtgtccaagatgagtagcaaccccgcactgaaaaagaatagtttgcaagctgtaagaaatcgacagttggagagcaaacttgatctcactgaaacaataaaagatggagcacggatgttccttatcgatgctggtatcaggagacaacttatactggctttcaccgaagactccagattgcacgtagaagagcttattgatgtatacagactggttgaagatcaaatagatatgccttcagttgccgtcgaggttcttcaagatttaccatctgttgcgcgtgatttcatgctttcctggagtgattccatcctgtcagatcgccagtactaacgatcttttacaactagaagagaaagcaagcagagtgaatagggccctgcatggttatggtatctcgatataatctatacaagaaaaatggctagacaagaattcctcctcgctgtatacagtttctttttcctttgatttttgtatagcaaaatatgcaatgcgcagttaaattttttcgttttgccttgatcttgtcgatttctcagcacaagccatttgtttagtatagcgaatgggatcttttatgtaaatgagctcgtgattggaatgtaatagaaatagatgtatacagctagcattcaaatcaaatatatgcgcaagcatcaaaggcgtctgaagtgtgtttatcaatggcacatgattgtaccgaggaaatagttacttcttcggaacaaaacatttgtttaccttttctccactattgcattttatcaatggcactgtttttttc

SEQ ID NO: 216220 - DNA, 2600 bp, Zea Mays
aaattcgttggaggacaggggaggggcggggtcgtccgccgctggttctgtagtcagccaggtatcagcgtttgaggctaaaaaatggagcactgtacagcttttatatgtacttcagcacagtggcctcactcaataacgaccactcgacgagtggcataccatagatctgcaaattcaagtttctcagcaccccaaaggagaaggcggtcaacactctatgtcatgaatgccgcatcaaccagtgctccaatttcacctcaaaacataacccaacttccacggacgaacagcacagttatcaaaagtatatccagcgacaaacccagcagtgcaatggagcaacttgatattgaacgtggtgtctgtattccgttccgaaagtacactcctgaaatggtactgcaatctgcattcttttatgtttatagagtcaggaaaaaagtattggattcaagaggttccatactgtcccttgcgagccggggagtggagataatttggaaacttggattttactggtcatctcttgtgtatgactttttggttggacaggatgaagaaattgttccatatcgtgcccggcagctccgtaatcttttatgtgatctgggcccatctttcataaaagcaggacaggttctagccaacaggcctgacattattcgagaggattatatgaatgaactttgcatcttgcaagatgatgtccctccattccctaaccaggtggctttttccataatcgaggaggagcttggccagcctatagagagattgttcagcaaaatttcatcagagacaatagcagctgctagtttgggccaagtttaccgagccacacttagagaaactggcgaggatgtcgctattaaggttcagagaccagggattgaaccaataatataccgagatctattcttgttccgcactttggcttcatttttgaatgggattagtcttcagaaactagggtgcaatgcggagcttattgttgatgaatttggcgaaaaacttttggaagaacttgattacactcttgaagctacaaatattgaggacttcctagaaaattttaaggatgatccaactgtcaagatacctcaagtgtataagcagctttcaggttcccgtgttctggtgatggagtggatagatggaattagatgctataaaagaagctggaatcgatatggaaggttttctcacggttggagtgagtgctgctttgcgtcagttacttgaatttggtcttttccatggagatccacatcctggaaatatttttgcaatgcgtgatggtcgtattgcttatgtcgacttcggaaatgtggccgttcttagccagcaaaacaaacaaatcctaatagacgctgttgttcatgctgttaacgaagactatgctgaaatggcaaatgacttcacaaggttgggtttccttgctagtggaacagatgtagccccaattattccagctctggaatctatttggcaaaactcagcaggaaaaggcttggcggacttcaatttccggagtgtgactgggaagttcaatcagcttgtctacaactttccaatccgtattccagaaaggttttctttggttattcgttcattgttgacacaagaaggaatctgctttacactaaagcctgattttaagtttcttgaggttgcctatccatatgtagcaaagcgtctgttgacagatccaaaccctgctcttcgtgaacgcctgattcaggtgctattcaaggatggggcattccagtggaaacgactagaaaaccttatagttcttgccaaggagaatgtgtccaagatgagtagcaaccccgcactgaaaaagaatagtttgcaagctgtaagaaatcgacagttggagagcaaacttgatctcactgaaacaataaaagatggagcacggatgttccttatcgatgctggtatcaggagacaacttatactggctttcaccgaagactccagattgcacgtagaagagcttattgatgtatacagactggttgaagatcaaatagatatgccttcagttgccgtcgaggttcttcaagatttaccatctgttgcgcgtgatttcatgctttcctggagtgattccatcctgtcagatcgccagtactaacgatcttttacaactagaagagaaagcaagcagagtgaatagggccctgcatggttatggtatctcgatataatctatacaagaaaaatggctagacaagaattcctcctcgctgtatacagtttctttttcctttgatttttgtatagcaaaatatgcaatgcgcagttaaattttttcgttttgccttgatcttgtcgatttctcagcacaagccatttgtttagtatagcgaatgggatcttttatgtaaatgagctcgtgattggaatgtaatagaaatagatgtatacagctagcattcaaatcaaatatatgcgcaagcatcaaaggcgtctgaagtgtgtttatcaatggcacatgattgtaccgaggaaatagttacttcttcggaacaaaacatttgtttaccttttctccactattgcattttatcaatggcactgtttttttc

SEQ ID NO: 216221 - DNA, 1112 bp, Zea Mays
ggctccacgcgtcagcccccgaaggtaactgcagacgaacgtttaccttggccactccttcacgtccatggccacacccttccggttcgcgcgtgcacccagccacccaccaacccctgcctccgccgcagtgcctgccatcaccgtcgtgcgccattcccaatcttgctggcgtttcttatccacgagttttcttctctagtgactactttcttccatgctgtgctgtgtctaaccccggccgagctttcttcattgattctctccatgccgagctgacattgttgggccctgcgacatcatctttttcctaccactgctggttgttccctggttcaaaggacgacactggtggccgcgctctacccaagttcggcgagtgggacgtgaacaacccggcgtccgcggacgggttcacggtcatcttcagcaaggccagggacgagaagaaagctcccccgacccaaggccacatcaggaacaacaggtcggtgtcggctgacagcaaggactccagggccgagaagatgacctcctacaacgccaggaccaacgcgtcgagaaatggttctgctgtgtctcgcccagccccacacaatcttgaggaagctaacgacagagaaatggtccattgcatcgctgcggctggcagaccggccgcgagtgaactctccggatacttgccagtgacagtgtatagccgccgttgcaaatgacagtgtatagcgttcttagctgcctgtgcataccgtcagttcaggttgatgtctgcttgtaatttttcttttctcgcctcttctctacggtgtgtaacccttcctcagcgttaatcctcctgctgcattttgctgtaacttgggcgagggtggatttgtttcggctctgaccaaaaccaggtcacagcgaattctcagattgctgcagtgaccgccaccaacctgacaaacaaaaatgctgcgacgttttcagagctgtagaggatgttctcatggaaatacgttatatattcatataattcttataactttcactatcggatttcaactttcaccagcttcacatctgcaagttggttggcagtatactgaatggtaatacaatgcggagcgaaa

SEQ ID NO: 216222 - DNA, 953 bp, Zea Mays
atcagaggctgctgaattcgttgcctccctgttgtttgtggttgtggccaatccttctcctatctcgtcccggagtcccgggggaaattttgccccagaaacactagcgcgtcggatcacaagcaagggcgaaaattttctgtggctccagcggctgaaggacgctgcggcacccatgtcggacgacactggtggccgcgctctacccaagttcggcgagtgggacgtgaacaacccggcgtccgcggacgggttcacggtcatcttcagcaaggccagggacgagaagaaagctcccccgacccaaggccacatcaggaacaacaggtcggtgtcggctgacagcaaggactccagggccgagaagatgacctcctacaacgccaggaccaacgcgtcgaagaaatggttctgctgtgtctcgcccagccccacacaatcttgaggaagctaacgacagagaaatggtccattgcatcgctgcggctggcagaccggccgcgagtgaactctccggatacttgccagtgacagtgtatagccgccgttgcaaatgacagtgtatagcgttcttagctgcctgtgcataccgtcagttcaggttgatgtctgcttgtaatttttcttttctcgcctcttctctacggtgtgtaacccttcctcagcgttaatcctcctgctgcattttgctgtaacttgggcgagggtggatttgtttcggctctgaccaaaaccaggtcacagcgaattctcagattgctgcagtgaccgccaccaacctgacaaacaaaaatgctgcgacgttttcagagctgtagaggatgttctcatggaaatacgttatatattcatataattcttataactttcactatcggatttcaactttcaccagcttcacatctgcaagttggttggcagtatactgaatggtaatacaatgcggagcgaaa

SEQ ID NO: 216223 - DNA, 2345 bp, Zea Mays
cgccccccccctcgtgccccaaatcgcaacccgacccgagacgagttcctccagatcagcgggcagggtgccgtagcaaggatctcgccgggccccggccatgaccgaggtcgccgacgcgtcccctccccctccgaccgccggcggcggagaccgcaagcggggccgcgcctcgcccgtgcccccgctgccgggccagcacaagaggcgtagggaggagggcggcggcggcggcttcgaccggcgccggctcggcccggttggcggcggagggcacgagcaggacgacaggaggtatggaaatggtcttggtggcataggaggaagaggtggtgacagtcgatatacaaatcgtgcaccagattctggacgcggtggatggaatgagggttctgggaacagtcgtagggaaggactgatgtcatacaagcagttcatccaggaacttgaagatgatgtttcaccagttgaagcgcaaagcagatatgaggagtacaagtcagagtacatcacaactcagaagaaagcttactttgccctccataaggatgaagattggttaagaaataaataccatcctacaaaccttgaaaatgtcattgaaagaaggaatgaactggcaagaactactgcagatgatttcttcctacaattgcaaagtggaagtctggacaccggtccaggtttgactggttcggcagtgagcaaatcaggaaataacagcagtaaaaatctagatgctgtggaaggggatggtaaaaaggggaaacttggaaaaggttccgacgattcatattatgctgctcccaaggctcacccagttagttctgaagttcgtcgaattcgaattgatattgagcaagctcaaggtctcatttgtaaacttgattctgagaagggtattgaaaacaacatcctctcaagtagtaatcatgaaaagccagacatggataagtcacatggttcaatggggccaattgttatagtacaaggatcatctactgtgaagggtcttgagggtactgagttgctggacactcttgttacttatttatggcgtatccatggtgtggattattatggtatgtctgagacaaacgaacctaaaggcctaaggcatgtgaaagcagatgcgaggacatataatggggctagctcaagtgccaccgaatgggagaataagcttgattcattctggcaagatagaattcaaggtcaggatccattagaaatattgaaagcgaaggagaagatcgatggagctgctactgaagtattggatccatatgtgaggaaaataagggatgagaagtatgggtggaaatatggatgtggagccaagggctgcacgaaacttttccatgccgctgagtttgtccagaagcatattaaactgaagcacacagacttggtggttgatctaacttcaaaagcaagagaagatatttactttgaaaactatatgaatgacccaaaggcgcctggtggtacgcctatcatgcagcaacctgctccaaggggaaaaggcagacaaaggccaccaatagagagtcggctgagggatgagcgtggtaatcataggctcgacagtgatgggtccggtgaaaatcccgacgatcctgtttatgattcgtttggtgatccaactatgcatggcgccttccctccagatattcctgctccccctgttctaatgcctgtgcctggtgccggtccgcttggaccgtttattcccgcaccgccggaagttgccatgcatatgttgagggatcagggcgcgccacctccttttgagcccagtggaggtccacatcctaggaaagcagggaggggcagcggcggcggcggtcctccaatgcgtggtccgtccccagtcttcagtgctcctccgcctcatcatatgcatgaccctcgtcgaatacgaagctaccaagacctggatgctcccgaggacgaagtgaccgtcatggactaccgaagcttgtaggcttgcctccagatactcgtttaggtaaacattacagtgcgaaatcaaaacatcttgctctgtctaaaatcaccgcggaggaaccccagcaggcatctcagcacctgtgtctcgactcctgagctgtcatcttctcactgtttgtgaaacgaaacacactacaggacgctcgacaaaataggccaccgtgaaacacggtgttagctcagtctgtgcaacgcgaaagattttcgtccatgtttgagcactgtaaaacactgttcccaacataacgtccagctggacagagtagagtttaaatatggttagtgagatggatagtttgatggagataagatttattaggggattatctctt

SEQ ID NO: 216224 - DNA, 1967 bp, Zea Mays
tagtcgtctatcttccaccgcctcctgcattagccactactagtgcaccttcacggccagctccggcggccggaatacatactgagcgatggctctttaacaggctcctccgatccaccgccaggtcccggcgtatcgatccatagccataatgggggaagcagaggagcgttgctcggccggggccggctgctccttctccctcacgtgcctggaggacggcgccgacctcgacaccggtggctccgcggcggagagcgccgatggcggcaagctggctgcctctctttacggcgacgccgaggaggaccaggagtacatcgaccacctcgtgtccaaggagagcagcttctgccgctccccttcctcgtccctgtgctcgcccgtcgtctccgacgtctccgatgctggcgccgagacgtgcccgtgcccttcgtccatggcggcctcatcccacgagtggttccgttgtgcacgccgcgccaccgtcgagtgggtcttcgagacgcaggcttacttcggcttctcccaccgcacggcgtacctggccgtctcctacatggaccgcttctgcctccaccggtgcatggacaggtcagtgatgccctgggcggcgcggctgctggcggtggcgtgcgtgtccctggcggcgaagatggaggagtaccgcgcgccggcgctgccggagttccgcgccgacgacgagtacgacttcagcagcgtctccatccggcgcatggagctgctggtgctgtccacgctggggtggcgcatgggcgacgtcacgccgctggactaccttccctgcctctcctccagcaggctacgccggggcggcgatggcggcctcgtcgccgccaaggccgccgcgcttatcttctccaccgcggaagccgccagcgtgctcgactaccggccgtccaccgttgccgtcgccgccgtcctggcggcagcccacggtgccgtgacaaaggaagcgctggagtccaagatgagcagcctgtctccgtccagcctgctcgacaaggacgacgtgcacgcctgctacagcacgatgatgctgaacgagagctcgtcggcgacgccgagcaagctgttggcggccaagagaccggcgccatcagcctccggctccacaggcgccggcagtccatacgagtccgtcgacgcggactcctcctcgttcgcggccgcggcggacagcaacaagagggcgcggctggtggagctgccggccgtcggccgatgagaagcaccgccggtcaatgtagtcttcgcttcttccagctttgaattttcagttgtttgattggtcacgcgccgcgccgcgcgcactgccggagaaacggtgaccggcaatgcggcggtgttgtggagacggcgagcttcggtttggttccttgtgaggttcgatggcgagagaggacgaaaggagagctcgatcgagaaaatagcgagtgcgactgtgcccacacgatcacgactcagcagacaatgtatagcgcaaggcggtgagcagtgagctccagcgccacccgcccacccgtccacgcacccgggatgggaagcctgaagccgccgcgcaggcgcatcagcagtagacgggtcagcgccggccattctccatggtgctgctgctggttggcggtagctgcagcgtcgcaagcgagcgccatggccgcccatggccatggcccatgcctgccgaaagtggatgtgtacatgcatgccctgtgcgtgaggatggtgaccgaggggtggtttcgtggcagagctgtaccgcgctttagtcacgtgattcgcttgctcttgctgctgggttgcttgctactagctaggactacttgctattgcaccagcactgcctcttgatctgtacactagcaagttgtaagtgtaaccctacatctacatgcatggccctgagaattgaaatgcattgggtagtgggtatcaggcatttctgg

SEQ ID NO: 216225 - DNA, 1160 bp, Zea Mays
ctcttctccccttctcccgacggcgccaccataccgcctccgccctcaaccctagccgtatcgcgccctcgccctgcctccagccccgcgcagtatgctgctcgctcgtcgttggctactcgcctgctcccatgctccctccggatctgctgctctcggggatttggcgcagcggctttgcgcctccacacttggtcgccggcctcctcacctccacaagcccacgtcatcgccgtctcctcttcgccatcgccccgctcgcctcctgtgccaacgacccgaccaacctcgccgccaagcagggccacaccgtgatataaaaaagttgaaactttcatagcttacctgccgagaatgcattgttgaagttgcaaagatgtatgtctaagtttattttcacataatagtatatttttttctattatcaagaattgtttctcaatacattcatgagttggaaattgtactgtgagcctttctatattatatagtctagctagctctacaatagagctctagtacagacagaacacatgctttcatactcctatggaatagtagaatcaggtagcagaattaggtgttcattaaccatgcaaataattaattcaagttatctaaataggcccttagtttataatgctgaaagtataaaaagtgttccactctcaataccgagaataggaagactccaccatgtatatgtgttcttatcaggtgctcttctttcccgataaaataaaaatcctttgcttcaatatgctacatgatactttgtgtatagataaaggaatacatccatatgatgttcctgggagttagtttgatgtccatatactccatgcttgctgattggaaaggaaactagttatttcgtttgaagtcatatgctgcttggcgtcattctaatccaagtagctgaggggtcaacagtggctaacttccctgtcactttattccaaagagcaaaagggaatcccaccctagctgtgatattttccctggattatggttgtccaggaatcctacatggagtggaatttatctccgggttaattaaccttggttgccaaactagccctcaatgtgcgggacaagaagggaaatactgctttgcacatagctacacggaaatggaggccccagctgtctatcttgtt

SEQ ID NO: 216226 - DNA, 7348 bp, Zea Mays
aaactattgcttgcctgaatgaatttgcactagtctgatgatgaatgggagtagcatcgtggtggtctgaacttcacagggtgaaataatggcggagccctaccaactgaacggcatactgaacgggatgcctaatttgagtcatccatcctctccatcagaggtcgatgaattctgtaaggcacttggtggtaactcgccaatacacagcgtgctagtcgctaacaatgggatggccgcggtcaagttcatgcgcagcatccggatatgggccctggagacctttgggacagagaaggccattcttttggttgctatggcaactccagaggacttgaagataaacgctgagcacataagaatcgctgatcagttcatagaagttcctggaggaacaaacaataacaactatgcgaatgtacagcttatagtggagattgcagagagaactcgcgtatctgcagtttggcctggctggggtcatgcgtctgagaacccagaacttccagatgctctagatgagaaaggaatcatttttctcggaccaccatcagctgcaatggctgcactgggtgataagattggttcttctcttattgcacaagcagctggagttccaactcttccatggagtggatcacatgtaaaagttccaccagaaagctgccattcaattcccgaggagttatataggaatgcttgtgtttccaccacagaggaagcagtggctagttgtcaggtggttgggtaccctgccatgatcaaggcatcatggggaggcggtggtaaaggaataaggaaggttcataacgatgatgaggtgagggcgctgttcaagcaagttcaaggagaagtccctggctcacctatatttattatgaaagtggcatctcagagccgacatctggaggttcaattgctctgtgataaacatggcaatgtggcagcactgcacagtcgagattgcagtgttcaaagaagacaccaaaagattattgaagaggggccaatcacaattgctgctccagacactgttaaagagcttgagcaggcagcaaggcagcttgctaagtgtgttcaatacgttggtgctgctactgtagaatatctgtacagcatggaaacgggcgagtactattttctggagcttaatccacggttgcaggtagaacatcctgtgactgaatggatagctgaaataaacttgccagcagcccaagttgcagtcggaatgggcatacccctttataacattccagagattagacgcttttatggaatggatcatgggggcggctaccataattggaggacaatatctgctgttgcaactaagtttgatttggataaagcacagtcagtgaggccaaagggccattgtgttgcagttagagttacaagtgaggatcctgatgatgggtttaagcctacaagtggaagagtggaggagttaaactttaaaagcaaaccaaatgtttgggcctatttctctgttaagtctggaggagcaattcatgaattttctgattcacagtttggtcatgtttttgcatttggggaatctagatctttggccatagccaatatggtacttgggctgaaagagattcagatccgtggagagatacgcacaaatgttgattacacagtggatctcttgaatgcaacagaataccgcgaaaataagatccatactggttggcttgacagcagaatagctatgcgtgttagagccgagaggcccccatggtacctctcagttgttggaggagctctatatgaagcatcaagcaggagctcaagcgttattactgattatgttggttatctcagcaaaggtcagataccaccaaagcacatatcgcttgtcaatttaactgtaactctgaacatagaggggagcaaatacacgattgagacagtaaggggtggaccccgcagctacaaattaagaatgaatggatcagaaattgaaacagagatacattcactgcgagatggtggacttttaatgcagttggatggaaacagtcatgtaatttatgcagagacagaggctgctggtacacgccttctcattaatggtagaacatgcttactacagaaagaacacgatccttcaaagctattggctgatacaccttgcaaacttttgcggttcttggttgcggatggctctcatgtggatgctgatacaccatatgctgaggtggaagtcatgaaaatgtgcatgccactgttgctgcctgcctctggtgtcattcactttgttatgcctgagggtcaggccatgaaggcgaatgacctgatagcaagattggaccttgatgacccatcttctgtgaggagagccgaaccatttcatggttcctttcccaaactgggacctcctactgctatctctggcaaagttcatcaaaaatttgctgcaagtgtgaattctgcacacatgatccttgcaggatatgaacataatatcaatgaagttgtacaagacctgctaaactgcctagacaaccctgagctcccttttctacaatggcaagaacttatgtctgttttagcaacacgacttccaaaagatcttaggaatgagttggatggtaagtacaaggagtatgaattgaatcctgacttctgcaagagcaaggatttccctgcaaggttgctgaggggggttattgaggcaaatcttgcatactgttcggagaaagatagggttacaaatgagaggcttgtggaaccacttatgagcctggtcaagtcatacgagggtggaagagaaagccatgctcgtgttgttgttaaatctctatttgaggagtatctgtcggttgaagagctcttcaatgataaccttcagtctgatgttatagagcgtctacgccttcaacatgcaaaagaccttgagaaggttgtatacattgtgttctcacatcagggtgtgagaagcaaaaataaattaatactgcggcttatggaagcattggtatatccaaacccatctgcttacagggatcagttgattcgcttctctgccttgaaccatacatcatattctgaactggcacttaaagcaagccaacttcttgagcacactaaattgagtgaacttcgcaccagcatagcaagaagcctttcagagctggagatgtttactgaggaaggagagcgtctgtcaacacctaggagaaagatggcgataaatgagagaatggaagatttagtttgtgctccactggcagctgaagatgcccttgtagctttgttcgatcacagcgatcctactcttcaacggagagtagttgagacatacatacgcagattgtatcagccatatcttgtaagtggaagtatccggatgcaatggcaccgagctggcctaattgccttatgggagttctctgaagagcatcttaagcaaagaagtgggcaagatgtgcccctacagcaagtagaaaatcccattgagaagagttggggcgtcatggttgtaatcaagtctctccagtttgtagcaactgcaattgatgttgcactgaaggagacttcacagtacggaattggtgtcagaagtgtctctaacagtaaccatgtacattctaatcaaagcaatatgcttcatattgctttggttggtatcaataatcagatgagtactctgcaagacagtggtgatgaggatcaaacacaagaaagggtcaacaaactattcaagattttgaaggataatactattacatcacatcttaatggcgctagtgttaaggttgtcagctgtattatccaaagggatgaagggcgtccaccaatgcgacactccttccaatggtctgttgacaaactttattatgaggaggatccaatgcttcgccatgtggaacccccgttgtctacattccttgagctggaaaaagtaaacttagaaggttacaatgaagtaaaatacactccatcacgtgatcgtcagtggcatatttatacgcttatcaagaacaagaaagatcagagattaaatgaccagaggatgttccttcgtaccatagtcagacaaccaagtgcaacaaatagtttcctgacaggtaatattgacaatgaagtagggcacacacaagcttcgtcatcgttcacatcaaacagcattctcagatcattgatgggagcactagaagaaatagagctacatgctcatagtgagactgtgagatcaggccactcacacatgtatctgtgcttactgagagaacaacaattgcatgaactaatcccgttttcaaggatgactggtaaaattgataaggatgaaggaactgtgtgcacacttttgaagcatatggtattgaatttatatgaacatgttggggtcaggatgcatcgtctttctgtgtgccagtgggaagtcaagctctggttggtttgtgatgggcaagctagtggtgcttggagagttgttgttaccaatgttactggccacacatgcaccattgatatttaccgagaagtggaagaccccaccacacatcagcttctctaccactctgccacaacctcggctggtcctttgcatggtgttgcattgaatgaaccatacaagcctttggatgctattgacctcaaacgttatgctgctaggaaaaatgaaaccacatactgctatgattttcccctggcatttgaaacagcgctgaagagatcatggaaatcaagtagctatggtgttagcgaagctaatgagcacaatcgattctatgctgaagtgaaagagcttatatttgctgattcggttggagcatggggcactccattggtttcagttgaacgtcctccaggcatcaatgatattggcatcgttgcttggaacatgaagctgtccacgccagaattcccacgtggccgggagattatagttgttgccaatgatgtgacatttaaagctgggtcctttggtccaagagaagatgcattttttgatgctgttaccaatcttgcctgtgagaggaaacttcctcttatctatctggcagcaactgctggtgccaggcttggtgtagcagaggaaataaagtcatgcttccatgtcggctggtctgattatgagagccctgaacgtgggtttcagtacatttacctcactacacaagattactcacgtctaagctcttcagtaatagctcacgagctgcaactaaaaaatggagaaaccagatgggtggttgataccattgttggtaaagaggatggacttggttgtgagaatctccacggcagtggggcgattgccagcgcatattctaaggcatacaaagagacctttactctgacatttgtgactggaagagctgttggcattggggcttatctggctcgtttaggcatgaggtgtatacaacgtcttgatcaaccaattattttgactgggttttcggcactaaacaagctcctggggcgggaggtgtacagttctcatatgcaattgggtggccccaaaatcatggctacaaatggcgttgtccaccaaactgtgtcagatgaccttgaaggtgtttctgctatcctgaaatggctcagttatgttcctccatatgttggtggtcctcttcccattatgaaacccctggacccacccgaaagaccagtaacatacctccctgagaatgcttgtgatgctcttgcagccatctgtggcattcaggatggtgaagggaggtggttgggtggtatgtttgatagggaaagctttgtggaaacattggaaggttgggcaaaaacagttatcaccggaagagcaaagcttggtggaataccagttggtgtcatagctgtagaaacccagactgtgatgcaagtcatcccagctgatccaggtcagcttgattccgctgagcgcgtagtccctcaagcaggtcaggtttggttcccagattctgcaaccaaaacagctcaggcattactggatttcaaccgtgaggagcttccgctgttcatcctagcaaactggagaggtttctctggtgggcaaagggatttatttgaaggaatccttcaggctggttcaacaattgttgagaatctgaggacatacaagcagcctgcttttgtatatatcccaatgggtggagagctacggggaggggcctgggttgtggtggacagcaagatcaatccagaccacatcgagatgtatgccgagaggactgcgaaagggaatgtccttgagcccgaaggattggtggagatcaaattcaggccaaaggaactggaagattgcatgctaaggcttgacccagaattgattggtctgaatactaggctgaaagagatgaagaaacaaaatgccagcatctcggaaatggagaccatacggaggagtatgactattcggatgaagcagttgatgcctatttatactcaggttgccacacgatttgccgaattgcatgacacctctgctagaatggccgccaaaggtgtgatcggtaaggttgttgattggaaagagtctcgggccttcttctacaggagattgcgaaggagagttgctgaggatgccctggccaaggaagttaaagaagctgctggcgagcagctttcccacagatcagcattagactgtatcaagaaatggtatctagcgtccaaaggaactgaaggtgatggtgaaatgtggaatgatgatgaatctttctttgcttggaaggatgatcccaaaaactatgagaattatcttgaggagttgaaggctgaaagagtatcgaactggttctcgcatcttgctgaaagttcagacgtgaaagctctaccaaacggtctttcgctgctccttaacaagatgaatcctttgaagagggagcaggtcattgatggcctcaggcagcttcttggttgatcgatggtggcaaagtggagcatgaagccctgtttagttgggaacggattgttctggttgtagtcatgtatttagctgtttaacatgtatttaattgggtggcgttactccacgtcatacggtacaacagcaatcctgatcaagtgattatttattcttcaatcgaagtagtacatgattttcatcagtaagctttgtgcttgcaattagggataaaatcggatggaaatgaactgaaaaacactcattttcgtttctatattttttttataaaaatggattctaattcagaaaaaccgtgagcaaaaacataaggttctcggtaaagaagggatttggacagcgcatatattgaaagaccggtaggagatgcaatagagacccgattctcgatttcttgtggaggatttctctattaggaataaaaaacggggaagtttctttctccacatgaatataaac

SEQ ID NO: 216227 - DNA, 7509 bp, Zea Mays
gcacaagcggcgtcgccacggcccggggcgtaccaccacctccttctgtcgcgcccccctctcccttcccgcggtggctgggagggagcacgcgctgctgtagctcaacggcacgcatttaaggcgccccttggatcgcactgctgcccatatcctactcctccttcctctcctcctcctcctccccctcggcggcgatcggccgaacgcaagccacgcctctgcaactgcgtgcgtggtctgaacttcacagggtgaaataatggcggagccctaccaactgaacggcatactgaacgggatgcctaatttgagtcatccatcctctccatcagaggtcgatgaattctgtaaggcacttggtggtaactcgccaatacacagcgtgctagtcgctaacaatgggatggccgcggtcaagttcatgcgcagcatccggatatgggccctggagacctttgggacagagaaggccattcttttggttgctatggcaactccagaggacttgaagataaacgctgagcacataagaatcgctgatcagttcatagaagttcctggaggaacaaacaataacaactatgcgaatgtacagcttatagtggagattgcagagagaactcgcgtatctgcagtttggcctggctggggtcatgcgtctgagaacccagaacttccagatgctctagatgagaaaggaatcatttttctcggaccaccatcagctgcaatggctgcactgggtgataagattggttcttctcttattgcacaagcagctggagttccaactcttccatggagtggatcacatgtaaaagttccaccagaaagctgccattcaattcccgaggagttatataggaatgcttgtgtttccaccacagaggaagcagtggctagttgtcaggtggttgggtaccctgccatgatcaaggcatcatggggaggcggtggtaaaggaataaggaaggttcataacgatgatgaggtgagggcgctgttcaagcaagttcaaggagaagtccctggctcacctatatttattatgaaagtggcatctcagagccgacatctggaggttcaattgctctgtgataaacatggcaatgtggcagcactgcacagtcgagattgcagtgttcaaagaagacaccaaaagattattgaagaggggccaatcacaattgctgctccagacactgttaaagagcttgagcaggcagcaaggcagcttgctaagtgtgttcaatacgttggtgctgctactgtagaatatctgtacagcatggaaacgggcgagtactattttctggagcttaatccacggttgcaggtagaacatcctgtgactgaatggatagctgaaataaacttgccagcagcccaagttgcagtcggaatgggcatacccctttataacattccagagattagacgcttttatggaatggatcatgggggcggctaccataattggaggacaatatctgctgttgcaactaagtttgatttggataaagcacagtcagtgaggccaaagggccattgtgttgcagttagagttacaagtgaggatcctgatgatgggtttaagcctacaagtggaagagtggaggagttaaactttaaaagcaaaccaaatgtttgggcctatttctctgttaagtctggaggagcaattcatgaattttctgattcacagtttggtcatgtttttgcatttggggaatctagatctttggccatagccaatatggtacttgggctgaaagagattcagatccgtggagagatacgcacaaatgttgattacacagtggatctcttgaatgcaacagaataccgcgaaaataagatccatactggttggcttgacagcagaatagctatgcgtgttagagccgagaggcccccatggtacctctcagttgttggaggagctctatatgaagcatcaagcaggagctcaagcgttattactgattatgttggttatctcagcaaaggtcagataccaccaaagcacatatcgcttgtcaatttaactgtaactctgaacatagaggggagcaaatacacgattgagacagtaaggggtggaccccgcagctacaaattaagaatgaatggatcagaaattgaaacagagatacattcactgcgagatggtggacttttaatgcagttggatggaaacagtcatgtaatttatgcagagacagaggctgctggtacacgccttctcattaatggtagaacatgcttactacagaaagaacacgatccttcaaagctattggctgatacaccttgcaaacttttgcggttcttggttgcggatggctctcatgtggatgctgatacaccatatgctgaggtggaagtcatgaaaatgtgcatgccactgttgctgcctgcctctggtgtcattcactttgttatgcctgagggtcaggccatgaaggcgaatgacctgatagcaagattggaccttgatgacccatcttctgtgaggagagccgaaccatttcatggttcctttcccaaactgggacctcctactgctatctctggcaaagttcatcaaaaatttgctgcaagtgtgaattctgcacacatgatccttgcaggatatgaacataatatcaatgaagttgtacaagacctgctaaactgcctagacaaccctgagctcccttttctacaatggcaagaacttatgtctgttttagcaacacgacttccaaaagatcttaggaatgagttggatggtaagtacaaggagtatgaattgaatcctgacttctgcaagagcaaggatttccctgcaaggttgctgaggggggttattgaggcaaatcttgcatactgttcggagaaagatagggttacaaatgagaggcttgtggaaccacttatgagcctggtcaagtcatacgagggtggaagagaaagccatgctcgtgttgttgttaaatctctatttgaggagtatctgtcggttgaagagctcttcaatgataaccttcagtctgatgttatagagcgtctacgccttcaacatgcaaaagaccttgagaaggttgtatacattgtgttctcacatcagggtgtgagaagcaaaaataaattaatactgcggcttatggaagcattggtatatccaaacccatctgcttacagggatcagttgattcgcttctctgccttgaaccatacatcatattctgaactggcacttaaagcaagccaacttcttgagcacactaaattgagtgaacttcgcaccagcatagcaagaagcctttcagagctggagatgtttactgaggaaggagagcgtctgtcaacacctaggagaaagatggcgataaatgagagaatggaagatttagtttgtgctccactggcagctgaagatgcccttgtagctttgttcgatcacagcgatcctactcttcaacggagagtagttgagacatacatacgcagattgtatcagccatatcttgtaagtggaagtatccggatgcaatggcaccgagctggcctaattgccttatgggagttctctgaagagcatcttaagcaaagaagtgggcaagatgtgcccctacagcaagtagaaaatcccattgagaagagttggggcgtcatggttgtaatcaagtctctccagtttgtagcaactgcaattgatgttgcactgaaggagacttcacagtacggaattggtgtcagaagtgtctctaacagtaaccatgtacattctaatcaaagcaatatgcttcatattgctttggttggtatcaataatcagatgagtactctgcaagacagtggtgatgaggatcaaacacaagaaagggtcaacaaactattcaagattttgaaggataatactattacatcacatcttaatggcgctagtgttaaggttgtcagctgtattatccaaagggatgaagggcgtccaccaatgcgacactccttccaatggtctgttgacaaactttattatgaggaggatccaatgcttcgccatgtggaacccccgttgtctacattccttgagctggaaaaagtaaacttagaaggttacaatgaagtaaaatacactccatcacgtgatcgtcagtggcatatttatacgcttatcaagaacaagaaagatcagagattaaatgaccagaggatgttccttcgtaccatagtcagacaaccaagtgcaacaaatagtttcctgacaggtaatattgacaatgaagtagggcacacacaagcttcgtcatcgttcacatcaaacagcattctcagatcattgatgggagcactagaagaaatagagctacatgctcatagtgagactgtgagatcaggccactcacacatgtatctgtgcttactgagagaacaacaattgcatgaactaatcccgttttcaaggatgactggtaaaattgataaggatgaaggaactgtgtgcacacttttgaagcatatggtattgaatttatatgaacatgttggggtcaggatgcatcgtctttctgtgtgccagtgggaagtcaagctctggttggtttgtgatgggcaagctagtggtgcttggagagttgttgttaccaatgttactggccacacatgcaccattgatatttaccgagaagtggaagaccccaccacacatcagcttctctaccactctgccacaacctcggctggtcctttgcatggtgttgcattgaatgaaccatacaagcctttggatgctattgacctcaaacgttatgctgctaggaaaaatgaaaccacatactgctatgattttcccctgcgctgaagagatcatggaaatcaagtagctatggtgttagcgaagctaatgagcacaatcgattctatgctgaagtgaaagagcttatatttgctgattcggttggagcatggggcactccattggtttcagttgaacgtcctccaggcatcaatgatattggcatcgttgcttggaacatgaagctgtccacgccagaattcccacgtggccgggagattatagttgttgccaatgatgtgacatttaaagctgggtcctttggtccaagagaagatgcattttttgatgctgttaccaatcttgcctgtgagaggaaacttcctcttatctatctggcagcaactgctggtgccaggcttggtgtagcagaggaaataaagtcatgcttccatgtcggctggtctgattatgagagccctgaacgtgggtttcagtacatttacctcactacacaagattactcacgtctaagctcttcagtaatagctcacgagctgcaactaaaaaatggagaaaccagatgggtggttgataccattgttggtaaagaggatggacttggttgtgagaatctccacggcagtggggcgattgccagcgcatattctaaggcatacaaagagacctttactctgacatttgtgactggaagagctgttggcattggggcttatctggctcgtttaggcatgaggtgtatacaacgtcttgatcaaccaattattttgactgggttttcggcactaaacaagctcctggggcgggaggtgtacagttctcatatgcaattgggtggccccaaaatcatggctacaaatggcgttgtccaccaaactgtgtcagatgaccttgaaggtgtttctgctatcctgaaatggctcagttatgttcctccatatgttggtggtcctcttcccattatgaaacccctggacccacccgaaagaccagtaacatacctccctgagaatgcttgtgatgctcttgcagccatctgtggcattcaggatggtgaagggaggtggttgggtggtatgtttgatagggaaagctttgtggaaacattggaaggttgggcaaaaacagttatcaccggaagagcaaagcttggtggaataccagttggtgtcatagctgtagaaacccagactgtgatgcaagtcatcccagctgatccaggtcagcttgattccgctgagcgcgtagtccctcaagcaggtcaggtttggttcccagattctgcaaccaaaacagctcaggcattactggatttcaaccgtgaggagcttccgctgttcatcctagcaaactggagaggtttctctggtgggcaaagggatttatttgaaggaatccttcaggctggttcaacaattgttgagaatctgaggacatacaagcagcctgcttttgtatatatcccaatgggtggagagctacggggaggggcctgggttgtggtggacagcaagatcaatccagaccacatcgagatgtatgccgagaggactgcgaaagggaatgtccttgagcccgaaggattggtggagatcaaattcaggccaaaggaactggaagattgcatgctaaggcttgacccagaattgattggtctgaatactaggctgaaagagatgaagaaacaaaatgccagcatctcggaaatggagaccatacggaggagtatgactattcggatgaagcagttgatgcctatttatactcaggttgccacacgatttgccgaattgcatgacacctctgctagaatggccgccaaaggtgtgatcggtaaggttgttgattggaaagagtctcgggccttcttctacaggagattgcgaaggagagttgctgaggatgccctggccaaggaagttaaagaagctgctggcgagcagctttcccacagatcagcattagactgtatcaagaaatggtatctagcgtccaaaggaactgaaggtgatggtgaaatgtggaatgatgatgaatctttctttgcttggaaggatgatcccaaaaactatgagaattatcttgaggagttgaaggctgaaagagtatcgaactggttctcgcatcttgctgaaagttcagacgtgaaagctctaccaaacggtctttcgctgctccttaacaagatgaatcctttgaagagggagcaggtcattgatggcctcaggcagcttcttggttgatcgatggtggcaaagtggagcatgaagccctgtttagttgggaacggattgttctggttgtagtcatgtatttagctgtttaacatgtatttaattgggtggcgttactccacgtcatacggtacaacagcaatcctgatcaagtgattatttattcttcaatcgaagtagtacatgattttcatcagtaagctttgtgcttgcaattagggataaaatcggatggaaatgaactgaaaaacactcattttcgtttctatattttttttataaaaatggattctaattcagaaaaaccgtgagcaaaaacataaggttctcggtaaagaagggatttggacagcgcatatattgaaagaccggtaggagatgcaatagagacccgattctcgatttcttgtggaggatttctctattaggaataaaaaacggggaagtttctttctccacatgaatataaac

SEQ ID NO: 216228 - DNA, 7630 bp, Zea Mays
gtctcctcctcatcacgccttccgccttctctctctacccggcagctctctggtccaccgctgcgggcagttaaaagccccccgctggcgcggcagctgctgcaggcagcacaagcggcgtcgccacggcccggggcgtaccaccacctccttctgtcgcgcccccctctcccttcccgcggtggctgggagggagcacgcgctgctgtagctcaacggcacgcatttaaggcgccccttggatcgcactgctgcccatatcctactcctccttcctctcctcctcctcctccccctcggcggcgatcggccgaacgcaagccacgcctctgcaactgcgtgcgtggtctgaacttcacagggtgaaataatggcggagccctaccaactgaacggcatactgaacgggatgcctaatttgagtcatccatcctctccatcagaggtcgatgaattctgtaaggcacttggtggtaactcgccaatacacagcgtgctagtcgctaacaatgggatggccgcggtcaagttcatgcgcagcatccggatatgggccctggagacctttgggacagagaaggccattcttttggttgctatggcaactccagaggacttgaagataaacgctgagcacataagaatcgctgatcagttcatagaagttcctggaggaacaaacaataacaactatgcgaatgtacagcttatagtggagattgcagagagaactcgcgtatctgcagtttggcctggctggggtcatgcgtctgagaacccagaacttccagatgctctagatgagaaaggaatcatttttctcggaccaccatcagctgcaatggctgcactgggtgataagattggttcttctcttattgcacaagcagctggagttccaactcttccatggagtggatcacatgtaaaagttccaccagaaagctgccattcaattcccgaggagttatataggaatgcttgtgtttccaccacagaggaagcagtggctagttgtcaggtggttgggtaccctgccatgatcaaggcatcatggggaggcggtggtaaaggaataaggaaggttcataacgatgatgaggtgagggcgctgttcaagcaagttcaaggagaagtccctggctcacctatatttattatgaaagtggcatctcagagccgacatctggaggttcaattgctctgtgataaacatggcaatgtggcagcactgcacagtcgagattgcagtgttcaaagaagacaccaaaagattattgaagaggggccaatcacaattgctgctccagacactgttaaagagcttgagcaggcagcaaggcagcttgctaagtgtgttcaatacgttggtgctgctactgtagaatatctgtacagcatggaaacgggcgagtactattttctggagcttaatccacggttgcaggtagaacatcctgtgactgaatggatagctgaaataaacttgccagcagcccaagttgcagtcggaatgggcatacccctttataacattccagagattagacgcttttatggaatggatcatgggggcggctaccataattggaggacaatatctgctgttgcaactaagtttgatttggataaagcacagtcagtgaggccaaagggccattgtgttgcagttagagttacaagtgaggatcctgatgatgggtttaagcctacaagtggaagagtggaggagttaaactttaaaagcaaaccaaatgtttgggcctatttctctgttaagtctggaggagcaattcatgaattttctgattcacagtttggtcatgtttttgcatttggggaatctagatctttggccatagccaatatggtacttgggctgaaagagattcagatccgtggagagatacgcacaaatgttgattacacagtggatctcttgaatgcaacagaataccgcgaaaataagatccatactggttggcttgacagcagaatagctatgcgtgttagagccgagaggcccccatggtacctctcagttgttggaggagctctatatgaagcatcaagcaggagctcaagcgttattactgattatgttggttatctcagcaaaggtcagataccaccaaagcacatatcgcttgtcaatttaactgtaactctgaacatagaggggagcaaatacacgattgagacagtaaggggtggaccccgcagctacaaattaagaatgaatggatcagaaattgaaacagagatacattcactgcgagatggtggacttttaatgcagttggatggaaacagtcatgtaatttatgcagagacagaggctgctggtacacgccttctcattaatggtagaacatgcttactacagaaagaacacgatccttcaaagctattggctgatacaccttgcaaacttttgcggttcttggttgcggatggctctcatgtggatgctgatacaccatatgctgaggtggaagtcatgaaaatgtgcatgccactgttgctgcctgcctctggtgtcattcactttgttatgcctgagggtcaggccatgaaggcgaatgacctgatagcaagattggaccttgatgacccatcttctgtgaggagagccgaaccatttcatggttcctttcccaaactgggacctcctactgctatctctggcaaagttcatcaaaaatttgctgcaagtgtgaattctgcacacatgatccttgcaggatatgaacataatatcaatgaagttgtacaagacctgctaaactgcctagacaaccctgagctcccttttctacaatggcaagaacttatgtctgttttagcaacacgacttccaaaagatcttaggaatgagttggatggtaagtacaaggagtatgaattgaatcctgacttctgcaagagcaaggatttccctgcaaggttgctgaggggggttattgaggcaaatcttgcatactgttcggagaaagatagggttacaaatgagaggcttgtggaaccacttatgagcctggtcaagtcatacgagggtggaagagaaagccatgctcgtgttgttgttaaatctctatttgaggagtatctgtcggttgaagagctcttcaatgataaccttcagtctgatgttatagagcgtctacgccttcaacatgcaaaagaccttgagaaggttgtatacattgtgttctcacatcagggtgtgagaagcaaaaataaattaatactgcggcttatggaagcattggtatatccaaacccatctgcttacagggatcagttgattcgcttctctgccttgaaccatacatcatattctgaactggcacttaaagcaagccaacttcttgagcacactaaattgagtgaacttcgcaccagcatagcaagaagcctttcagagctggagatgtttactgaggaaggagagcgtctgtcaacacctaggagaaagatggcgataaatgagagaatggaagatttagtttgtgctccactggcagctgaagatgcccttgtagctttgttcgatcacagcgatcctactcttcaacggagagtagttgagacatacatacgcagattgtatcagccatatcttgtaagtggaagtatccggatgcaatggcaccgagctggcctaattgccttatgggagttctctgaagagcatcttaagcaaagaagtgggcaagatgtgcccctacagcaagtagaaaatcccattgagaagagttggggcgtcatggttgtaatcaagtctctccagtttgtagcaactgcaattgatgttgcactgaaggagacttcacagtacggaattggtgtcagaagtgtctctaacagtaaccatgtacattctaatcaaagcaatatgcttcatattgctttggttggtatcaataatcagatgagtactctgcaagacagtggtgatgaggatcaaacacaagaaagggtcaacaaactattcaagattttgaaggataatactattacatcacatcttaatggcgctagtgttaaggttgtcagctgtattatccaaagggatgaagggcgtccaccaatgcgacactccttccaatggtctgttgacaaactttattatgaggaggatccaatgcttcgccatgtggaacccccgttgtctacattccttgagctggaaaaagtaaacttagaaggttacaatgaagtaaaatacactccatcacgtgatcgtcagtggcatatttatacgcttatcaagaacaagaaagatcagagattaaatgaccagaggatgttccttcgtaccatagtcagacaaccaagtgcaacaaatagtttcctgacaggtaatattgacaatgaagtagggcacacacaagcttcgtcatcgttcacatcaaacagcattctcagatcattgatgggagcactagaagaaatagagctacatgctcatagtgagactgtgagatcaggccactcacacatgtatctgtgcttactgagagaacaacaattgcatgaactaatcccgttttcaaggatgactggtaaaattgataaggatgaaggaactgtgtgcacacttttgaagcatatggtattgaatttatatgaacatgttggggtcaggatgcatcgtctttctgtgtgccagtgggaagtcaagctctggttggtttgtgatgggcaagctagtggtgcttggagagttgttgttaccaatgttactggccacacatgcaccattgatatttaccgagaagtggaagaccccaccacacatcagcttctctaccactctgccacaacctcggctggtcctttgcatggtgttgcattgaatgaaccatacaagcctttggatgctattgacctcaaacgttatgctgctaggaaaaatgaaaccacatactgctatgattttcccctggcatttgaaacagcgctgaagagatcatggaaatcaagtagctatggtgttagcgaagctaatgagcacaatcgattctatgctgaagtgaaagagcttatatttgctgattcggttggagcatggggcactccattggtttcagttgaacgtcctccaggcatcaatgatattggcatcgttgcttggaacatgaagctgtccacgccagaattcccacgtggccgggagattatagttgttgccaatgatgtgacatttaaagctgggtcctttggtccaagagaagatgcattttttgatgctgttaccaatcttgcctgtgagaggaaacttcctcttatctatctggcagcaactgctggtgccaggcttggtgtagcagaggaaataaagtcatgcttccatgtcggctggtctgattatgagagccctgaacgtgggtttcagtacatttacctcactacacaagattactcacgtctaagctcttcagtaatagctcacgagctgcaactaaaaaatggagaaaccagatgggtggttgataccattgttggtaaagaggatggacttggttgtgagaatctccacggcagtggggcgattgccagcgcatattctaaggcatacaaagagacctttactctgacatttgtgactggaagagctgttggcattggggcttatctggctcgtttaggcatgaggtgtatacaacgtcttgatcaaccaattattttgactgggttttcggcactaaacaagctcctggggcgggaggtgtacagttctcatatgcaattgggtggccccaaaatcatggctacaaatggcgttgtccaccaaactgtgtcagatgaccttgaaggtgtttctgctatcctgaaatggctcagttatgttcctccatatgttggtggtcctcttcccattatgaaacccctggacccacccgaaagaccagtaacatacctccctgagaatgcttgtgatgctcttgcagccatctgtggcattcaggatggtgaagggaggtggttgggtggtatgtttgatagggaaagctttgtggaaacattggaaggttgggcaaaaacagttatcaccggaagagcaaagcttggtggaataccagttggtgtcatagctgtagaaacccagactgtgatgcaagtcatcccagctgatccaggtcagcttgattccgctgagcgcgtagtccctcaagcaggtcaggtttggttcccagattctgcaaccaaaacagctcaggcattactggatttcaaccgtgaggagcttccgctgttcatcctagcaaactggagaggtttctctggtgggcaaagggatttatttgaaggaatccttcaggctggttcaacaattgttgagaatctgaggacatacaagcagcctgcttttgtatatatcccaatgggtggagagctacggggaggggcctgggttgtggtggacagcaagatcaatccagaccacatcgagatgtatgccgagaggactgcgaaagggaatgtccttgagcccgaaggattggtggagatcaaattcaggccaaaggaactggaagattgcatgctaaggcttgacccagaattgattggtctgaatactaggctgaaagagatgaagaaacaaaatgccagcatctcggaaatggagaccatacggaggagtatgactattcggatgaagcagttgatgcctatttatactcaggttgccacacgatttgccgaattgcatgacacctctgctagaatggccgccaaaggtgtgatcggtaaggttgttgattggaaagagtctcgggccttcttctacaggagattgcgaaggagagttgctgaggatgccctggccaaggaagttaaagaagctgctggcgagcagctttcccacagatcagcattagactgtatcaagaaatggtatctagcgtccaaaggaactgaaggtgatggtgaaatgtggaatgatgatgaatctttctttgcttggaaggatgatcccaaaaactatgagaattatcttgaggagttgaaggctgaaagagtatcgaactggttctcgcatcttgctgaaagttcagacgtgaaagctctaccaaacggtctttcgctgctccttaacaagatgaatcctttgaagagggagcaggtcattgatggcctcaggcagcttcttggttgatcgatggtggcaaagtggagcatgaagccctgtttagttgggaacggattgttctggttgtagtcatgtatttagctgtttaacatgtatttaattgggtggcgttactccacgtcatacggtacaacagcaatcctgatcaagtgattatttattcttcaatcgaagtagtacatgattttcatcagtaagctttgtgcttgcaattagggataaaatcggatggaaatgaactgaaaaacactcattttcgtttctatattttttttataaaaatggattctaattcagaaaaaccgtgagcaaaaacataaggttctcggtaaagaagggatttggacagcgcatatattgaaagaccggtaggagatgcaatagagacccgattctcgatttcttgtggaggatttctctattaggaataaaaaacggggaagtttctttctccacatgaatataaac

SEQ ID NO: 216229 - DNA, 3671 bp, Zea Mays
ggcggctgacgaggtgacgcgtgcgtgcgtggcgtccagcgtccccctcccccgtctctctccctttctctctgcagtctgcacgccaaaaaaaaaaaagtcttcagccatctcgacggctcgtcggctcgaccacttcgcctccccaccccgccggaaccctaaccccagccgcgagagctccacccgccgcgccgtgccgatgggacggtcgttgtgaattgaagtagcttggaagagcagtgttatgcacagcgatgggagacaatgtcctaaaactcagggtgggcttctcagggtaaactgcattatggattctggcaacagttcatgctctagaacacgaagtgggcttctaagattaaagggcttactggattccagtggtgtttcgagttctagaactcgaagtggccttttaaggataaagagctttgtggattccagtgatggttcatgttcgaggtcacaaagtgaccatgtaagatgtagccctcctattgtcgaggctataataaatgacgaagcagtcttgaaggagtctcctgatggattgatgaaaaaagagatacctgttaggactcaaaatgagtttgttagacagaactctgctgacaaggctgtaaccaaggacgattcaggcatgcggacgcttcccaatgggagtttgagtgaagatatgccttctagaacacggagtgggctggtcaggagaagccctactgttaagactcctgatggatggatgaagaatgacaaggctgctggaacacggagtggtcttggtggtggaagattggtagccaagactgtaagcaaggacaaaagggctgttgagggtttgcctgatggatggcgaaaagaatacaggccaaggaagaatggttcatttctggatgtgtactacattgatccagtcagtggatatgaatttcgctcttttaaggatgtgcaccgttatcttgaaactggagatattagacagtgcgccgtgagaccaaagaagagtaccatctgcgaagttcatataatagaaagtcaaactcatgcaagtgcatcaccacaacacacgaggcctggtactgcggataagggtattcagtgtgaaatattaacttcggatggtatcatggtaccattgggggaactgattgctccatataatggaaatgatactgaacatactgtgttaccagagcctgagaacttgaaagcaattcaagggtctgacaacaagcttgagacttcggaacacgtgagtgttcaaccggtttctgcacgtaatggttcaaggcaaaccaaatctgttaaaaggaaagaacgaaatgcagaggtcaaatccaagaagcgcaaaaccagttctgctgtgactgctgttcgagcgtcgccccgcttagctgcattgaaggttcagcttgaagtgagcatcaaacatgaagatgccatggttagcataaatcatgtggaccaggtacagactatagaagagagcgccattgatcaggcacacaaaagccaatcgggctctgttgatgagatacatggtaatctggaaagcactttcagtcagttacagttgagccaagcagacactgctaatggaatgcaggctatgcaggaaaacactaccattcattcacaaccaagccaattggatactctgaatcctacacacagaagccaggagaatagtggcaatcagttacaatcggtgctcacagattcttcgattccaaaacgaaccacacaggaatgcactatagacgagccaagccagccaggcataaatcatatacacacagatcaggagttcactgggaatcaatttcggtcgaacctaccagatgacactgttatttcattaagggatattgaagaatgcacagcccactcaaagccaagcaataccgacagtactggacaaattcaggccaatgaggaaaacactgccaatcaagtacagtcgagcctaacagacacagttattccagtaccggttattcaggaatatgctactggttattcacagctgagcaaagctaacacctcaaataaaaaacaggccaatcaggaatacatagctgatcaagtacaatcgagcctaacagacactgtcattccagtacaagttattaaggaatacacaactggttatccacatattaataaagctgacatttcaaatcaaatgcaggccaatcaagaaaacactgatgatcacttatatttaagtcaagtaggctgtgtcactcaaatgcagataattgaggaaaatttgcccaagcaacctcagctgagccaatcaggcactgggggtagaatacaaattgatctggaaagcactaccaatcacttgctaccaaactatgatgaaaattctatgttgcaatgtggtttatcttgggctcctgaacagaacagcggagcccttagtacagatttctggaaaaatgttgaaactcaggcttcatcggtttccatgccaataaatggagcacctgttgcaagctttccagcaaatgttagattccacaatgcagcagcagcagcagaacctgctttaccgccacaggttgctccagctgaagcaggttctgatcagtcggggttggcctttcaatctgttttcggaaacatctggtcggatccttgcatcgagtttgcttttaagacccttacaggtgacattcctgttctggacgacacaacggctgtcacagactactttccggagcaacaagacttgaataaaggcccagcaccaaaccgtgcaggttctgttgataattccagaaaccacacacaagtcgatgtgaaccttccaccacctgctctggatgatttctacaatggcaattggttccctccccaatgaattcagtatgggaggaaacaaatgcaataacattttgtacctgtgaaaaacaaatcagagaaggctaatggccagattacaaagcaatggtcgtgcgctaatgatttctacaatgacagttggttccctcccccaatgaattccgtgtagggaggggaaaaatgcaatgacatttttttagctgcggaaaggcaaatcagagaaggctagcggccaaatcccaaagaatcaatcgtgcactctgaactgaatgtgtcatcccggaggacacattttgtaaaaaaaaaaaaacagtagctttatagccttattagactgttaaaacacactcgactgatctggttccatcaacaaggcttcacggagactgtcgagtacctgatctgggtcatgttttccatagtttgcttctgtgcagttgcctaataagcccattcgttgtaaactagctagttctaacttaagaaagctccctcagggcctatgcatgggtctctgattattgtgcagatgaactgttgttctggacattttgaacatgcaaatgtggaagcgtcactgtcagttgaattatgtttcagccgaattgagaagcgctaatccgctgtttgtgtagagtttgctgaatgttgatgcttgtgcttggttacttggatcagtgttttttagggggctcggcttgcagtaacgatgcaccttgttatatatccagaaaaccttggttgtcactgttttactttcatcacttacaacttgacgtatctcgttttgctatattttaagcatttgttttttt

SEQ ID NO: 216230 - DNA, 2187 bp, Zea Mays
cttaaataggagaaatttttagccctctgcttcaagattcaatcccgaagcttgtatgtcttagtcacttctttgcaaattcaaaagcttatacatggtgatgaccttccacagttctgcccccagtccccagttagaaggaggtagtttgcatcttccgttgctggaccctaacatgcgtgcgacaccattgactccatcagagtggaaggaaagacttgaagctaggacatgccttgatgtgtcctcaggcgaaacatctggaagggggcttttgctgcttgatgtgaggaatgattatgaatgggatgttgggcactttgaaggtgctcagcggcctaatgtggactgcttcagaagcacttcctttggactttcgggagagacagatcctctaaatggtgtagacaaagagaggacagatatactaatgtactgcaccggggggataagatgtgatgtgtattcaacaattcttaggaagaagggctttcggaatctgtatacactggagggaggagtgtcgaactatctcaaggtggaggggccagcagggtgggtgggaaatctctttgtctttgatggccggctctcgttgccaccagcgacattcaatgaggaagaagatgaggaggaacagcaggagaacaagaggtgggtggggtgctgctacgtgtgcggatcagaggtggtggagctgcggcaccgcaactgcgccaacatagactgcaaccgcctttatctgtgctgcggttggtgtgcggaggagctgtgcggctgctgctgctccgactgcaaggtcgcccctcggctgcggccgctgctgccaggccaccagagatacttgaaatggcatgtctaccgcgacggacggacggacgatgaaaacaaactttatggttttgttgacgatgacagcagtggcctgtgaggttgagatagttcacgactgaaaatccaacatcccaggagggaatactttgtcttgtcgtgtgcctacctacttttatacttggacagatgagtgagtgagagttcagagttgagccggctatgtttagagtcacatgaagcgttcagatgcaacaaactttatggttttgttgggtttcttacaaattccattccactttagacctcttgtttctaaaccatatggtatttttctcgaaaacaaaagagaactgcgcatcattgtattaagaagagaaaaaggtctaaaccgacaagtagaaaccagaaatttggagggattttatcaaacacatagcggttccgatgattccataggatccaaaaccctaaaataattagagaattgagaccctctttggctacaccttgcagctggtcacttaatctctcccaccactgcatactgctagattcacctggttgggggctgaatccctgcaaattaacctgaccgagcaaacgaaaccagaaatgcctagcaaagacacatccaacctgtcctcaggctcttgcggacaactttctggatggataagacctctcttttggagtcgatccgctgtccaacatctcttaaaagcagccaaccattgaaaaaaaaattgcatttgggaggggcccaagaatgccaaattctctcccagtgcccaaaattagtagaaccaatgaaaagactttcgtatgcagctttggcagaatactttccatctgttgcaaatctgaatatatgtttatcttcctgattctgcagcaggttaatggagcttaaaatgtcccaaaggtccaggaaatcaactagcactccaactgaaactgcacctctaatatctgtcaaccatcttctatctgtcaaagcctcctggactgatctagtgttcaaatttctcttgggcacagcagcaaatagtctaggagccaaatcctttttccttgcagccagcgatccttccagaaaagggttgaagaaccatttccaatttccgttataacagccacagaaaagaaagccttcactgttccagggatctgcatagggaacaaggaccatggcttatcaggatcagttcttgtcatccataaccatctcattcttaaagcccagccaagttccttaaaggctgaagattcctagtcctccaagctcaagaggatgacaaactcttccccaagctactaaatagtgtccccctctgacatcctttcttccccgct

SEQ ID NO: 216231 - DNA, 2489 bp, Zea Mays
ccgcccatggcgtccactgtccaccacaacagccaccaggcgctcctcctccggcctctccccactccgtctcgccacccccgcctctccttctcgccgcgcccagccggcctccgttccttcttcccggcttctggttgccgccttggcacgcatggcgttgcgcttgcagagccagagttcgttcccctacaggaggaggaggaggaggaggaggacgcccgattcgtcgtggtgaccttctacaaattcgtgcccctctttgacccccacgccgaggtcgccagacacctcaacttcctccagggacgcgacatacatggtcgcatttacttgaatgagaagggaatcaatgctcagtggccctcacaaagatgcagtggcatatgcagactgggttaagaaacatcatcagttttctgatatgcttgttcaaacctcaccagctgtaactgggcatgcctttcctagactgaaactacggtacaaaccatcacttgttcagagtggaaggaaagacttgaagctaggacatgccttgatgtgtcctcaggcgaaacatctggaagggggcttttgctgcttgatgtgaggaatgattatgaatgggatgttgggcactttgaaggtgctcagcggcctaatgtggactgcttcagaagcacttcctttggactttcgggagagacagatcctctaaatggtgtagacaaagagaggacagatatactaatgtactgcaccggggggataagatgtgatgtgtattcaacaattcttaggaagaagggctttcggaatctgtatacactggagggaggagtgtcgaactatctcaaggtggaggggccagcagggtgggtgggaaatctctttgtctttgatggccggctctcgttgccaccagcgacattcaatgaggaagaagatgaggaggaacagcaggagaacaagaggtgggtggggtgctgctacgtgtgcggatcagaggtggtggagctgcggcaccgcaactgcgccaacatagactgcaaccgcctttatctgtgctgcggttggtgtgcggaggagctgtgcggctgctgctgctccgactgcaaggtcgcccctcggctgcggccgctgctgccaggccaccagagatacttgaaatggcatgtctaccgcgacggacggacggacgatgaaaacaaactttatggttttgttgacgatgacagcagtggcctgtgaggttgagatagttcacgactgaaaatccaacatcccaggagggaatactttgtcttgtcgtgtgcctacctacttttatacttggacagatgagtgagtgagagttcagagttgagccggctatgtttagagtcacatgaagcgttcagatgcaacaaactttatggttttgttgggtttcttacaaattccattccactttagacctcttgtttctaaaccatatggtatttttctcgaaaacaaaagagaactgcgcatcattgtattaagaagagaaaaaggtctaaaccgacaagtagaaaccagaaatttggagggattttatcaaacacatagcggttccgatgattccataggatccaaaaccctaaaataattagagaattgagaccctctttggctacaccttgcagctggtcacttaatctctcccaccactgcatactgctagattcacctggttgggggctgaatccctgcaaattaacctgaccgagcaaacgaaaccagaaatgcctagcaaagacacatccaacctgtcctcaggctcttgcggacaactttctggatggataagacctctcttttggagtcgatccgctgtccaacatctcttaaaagcagccaaccattgaaaaaaaaattgcatttgggaggggcccaagaatgccaaattctctcccagtgcccaaaattagtagaaccaatgaaaagactttcgtatgcagctttggcagaatactttccatctgttgcaaatctgaatatatgtttatcttcctgattctgcagcaggttaatggagcttaaaatgtcccaaaggtccaggaaatcaactagcactccaactgaaactgcacctctaatatctgtcaaccatcttctatctgtcaaagcctcctggactgatctagtgttcaaatttctcttgggcacagcagcaaatagtctaggagccaaatcctttttccttgcagccagcgatccttccagaaaagggttgaagaaccatttccaatttccgttataacagccacagaaaagaaagccttcactgttccagggatctgcatagggaacaaggaccatggcttatcaggatcagttcttgtcatccataaccatctcattcttaaagcccagccaagttccttaaaggctgaagattcctagtcctccaagctcaagaggatgacaaactcttccccaagctactaaatagtgtccccctctgacatcctttcttccccgct

SEQ ID NO: 216232 - DNA, 2526 bp, Zea Mays
tcctagaaatccgaagaagagtagagcagagcagacagaggatagcgtgcgtgaaagccgcccatggcgtccactgtccaccacaacagccaccaggcgctcctcctccggcctctccccactccgtctcgccacccccgcctctccttctcgccgcgcccagccggcctccgttccttcttcccggcttctggttgccgccttggcacgcatggcgttgcgcttgcagagccagagttcgttcccctacaggaggaggaggaggaggaggaggacgcccgattcgtcgtggtgaccttctacaaattcgtgcccctctttgacccccacgccgaggtcgccagacacctcaacttcctccagggacgcgacatacatggtcgcatttacttgaatgagaagggaatcaatgctcagtacagtggccctcacaaagatgcagtggcatatgcagactgggttaagaaacatcatcagttttctgatatgcttgttcaaacctcaccagctgtaactgggcatgcctttcctagactgaaactacggtacaaaccatcacttgttcagttagaaggaggtagtttgcatcttccgttgctggaccctaacatgcgtgcgacaccattgactccatcagagtggaaggaaagacttgaagctaggacatgccttgatgtgtcctcaggcgaaacatctggaagggggcttttgctgcttgatgtgaggaatgattatgaatgggatgttgggcactttgaaggtgctcagcggcctaatgtggactgcttcagaagcacttcctttggactttcgggagaggaagaagggctttcggaatctgtatacactggagggaggagtgtcgaactatctcaaggtggaggggccagcagggtgggtgggaaatctctttgtctttgatggccggctctcgttgccaccagcgacattcaatgaggaagaagatgaggaggaacagcaggagaacaagaggtgggtggggtgctgctacgtgtgcggatcagaggtggtggagctgcggcaccgcaactgcgccaacatagactgcaaccgcctttatctgtgctgcggttggtgtgcggaggagctgtgcggctgctgctgctccgactgcaaggtcgcccctcggctgcggccgctgctgccaggccaccagagatacttgaaatggcatgtctaccgcgacggacggacggacgatgaaaacaaactttatggttttgttgacgatgacagcagtggcctgtgaggttgagatagttcacgactgaaaatccaacatcccaggagggaatactttgtcttgtcgtgtgcctacctacttttatacttggacagatgagtgagtgagagttcagagttgagccggctatgtttagagtcacatgaagcgttcagatgcaacaaactttatggttttgttgggtttcttacaaattccattccactttagacctcttgtttctaaaccatatggtatttttctcgaaaacaaaagagaactgcgcatcattgtattaagaagagaaaaaggtctaaaccgacaagtagaaaccagaaatttggagggattttatcaaacacatagcggttccgatgattccataggatccaaaaccctaaaataattagagaattgagaccctctttggctacaccttgcagctggtcacttaatctctcccaccactgcatactgctagattcacctggttgggggctgaatccctgcaaattaacctgaccgagcaaacgaaaccagaaatgcctagcaaagacacatccaacctgtcctcaggctcttgcggacaactttctggatggataagacctctcttttggagtcgatccgctgtccaacatctcttaaaagcagccaaccattgaaaaaaaaattgcatttgggaggggcccaagaatgccaaattctctcccagtgcccaaaattagtagaaccaatgaaaagactttcgtatgcagctttggcagaatactttccatctgttgcaaatctgaatatatgtttatcttcctgattctgcagcaggttaatggagcttaaaatgtcccaaaggtccaggaaatcaactagcactccaactgaaactgcacctctaatatctgtcaaccatcttctatctgtcaaagcctcctggactgatctagtgttcaaatttctcttgggcacagcagcaaatagtctaggagccaaatcctttttccttgcagccagcgatccttccagaaaagggttgaagaaccatttccaatttccgttataacagccacagaaaagaaagccttcactgttccagggatctgcatagggaacaaggaccatggcttatcaggatcagttcttgtcatccataaccatctcattcttaaagcccagccaagttccttaaaggctgaagattcctagtcctccaagctcaagaggatgacaaactcttccccaagctactaaatagtgtccccctctgacatcctttcttccccgct

SEQ ID NO: 216233 - DNA, 3672 bp, Zea Mays
ttatttgattgcgtaggggaaatcgaagcctgtcgcgtaggacagttcggctaggccagagacatgccggcgtgacgaagagttgatgcatatctgatctcgcagcaacgttgaagtagagcgtgctgataacgtgttgagaactacgttaccatggatcaccagatctgctcccttccctcccgtcagcagtagaggcgcaagaagctgtagcgaacacgtctcccttcccataagcacgacagaagaaacacacaagacacaggatataaggttgggcctctggccctttctcttctctgtcttatgagagggtgtacatgttccttatatagagatgtgagatccctcaaaggcaaagcacccacattccctttagttaaaagacgccagggattcgagccctccccgcgtttccgtgagcatgagcatgtccgcgtgtaacacctggcgtaccggacccgaaaattttcttcgaacgagctctgagcagtgtagccctcctgtccgctgttcggtgcccgctgcccacctccctctcctccttccgacctcgccgcctccctccctaaactctaaaccctccaccagccgaagctactgccgcggccgcaacagaggtcgcgacgacgaacgctgaagaagcgccggcgagggagagtcctttactttttcctatgctgtagcaaaacaagcctatatcatcttccaaatatactcgttccgtgccggcggcctcccctcctacgcccctgccgattcttcaatcttcaccaacgtctgcgcgtagcaggctagcagtcggcacgacttcctcagatctgccggacgacttgctgttcgtcaccgactcaccagcaaccaacgtcagccatcagccggcagcaggggaagctgggcggagggtcattgcggcacggcgtccaggcgtacagcaggcaccagcaacagcccatggcaaacgccgcagatgaccctatggcagatgaagccagagtagaagatgccttcacacaggagatcaccgattattcgtacgtccctagataccatgtgttgagttggatggaaactgtggaggggatggtggccggtgtggcggcgcttccgccggtgtatttgatactgaacagagatcttcttgagacgggatggggatggaagaggctggtgccctacagacctggttatgttgagtggcatgtgttcaagaaataccttggggactatttcgaccataatcgtgaagcttttctttgtgccgagcagaagcctgatccatttggatggattattgctaaaaagagtgccctgattgctgcagccaaattgtgcctcaagatggagaaggcacttctcaggtactgtgctagctttctcactcctgacgacaaaaggttgatcctccggatcaaggaccaggcaaagcaaatgatccaatcagagggtgatcaatctttggttgtaactatatgcttggaggttgtcggtgccgagcgcgcggtcgtcgtgcagctcgtgggaccagtccgccgagcggctgctagaggcggacgcagccctcgtgcggaagaagtgcgccgagaagagcgcgccgaggccgaggacgccgccgggcagcaggtcctccagcgcggcgaggtcttggtcttggtcttggagcagggtcttggtcttggagcactgcacgaggagcacatcggcatggtgcttcaagcaatggttcaaatgggtgtccttgttcctactggagatatgactgttgtcagaagaaccgctcaatttttccttaatagctttcaagagtgcctaacagcacaaaggaaggagagagaaatggcaaccgcagaactgggtttcaaaaagcaattaactaaggaggagaagtttgaaaagaggaagcagagacttgctgcaatcggagaggatcttttggcgattgctgctgatcaaccatttcgcttccctgccacatttacatttgtggtcagagcattctcagttctagatggtactgggaaaggccttgatcctaggtttcatattacagagattgctaagccaaatgccaaggaattgctaagatttaatgacgctggtgttgaaatagttgtgaaggtgtgtggagagacatgtgtattcctcctatgacgaattccttaggctccatgaaggtaagcctgtcttaatgggcttgattgttgaacctgacttagtacttttatccatgtcacggcattgaactagacagtcactcatgtccttaggatattaacggtatacatcaacaattcattctattttaattgcttgcaaaacttttttggcccttcaaatgagttccacgcatcaagaagtcaagattccaggaggcctaaaataggagaggagggcgcagcttgattcaatccatgtcaagtcagaggctgctgcgaggtttgcacatgcaagtagaatttagatggtcctgcttcgctttcatgtggatttatcttgcaaatggtatgtggatccgttccagaggcaatgagccttgcagccagtttgcagtataaaaaacccaattatgtccactgttggttcgacgcagcgtgtgccgaggatttctactgccaagcataagaaagtatttgaaatcaagaacttgcattcattcaatcataatgtgtttcctatcaagcataagtgtgtgtgttttgtttgatatctgctttaataggagattgttcttgtcaccccaaaaatgttcccattctactttcgggcaggtgaattgcagataaatggtctgttcgcaactggtgctctcgggcgactccatcactgagcaacccttcgccccggtggctgcggtgtcgcactggctgacacctgctcgcagttgcattacaagttttactgactatgtattttcaggtttattcaatttcagttgtaatgcttctgacagcagttgtatcagtcctcttgttcagcttccataataatgtactaaacttcagtttggtgtctatctcagtgtacctacactcagttggaaaacttcaaccacactgcaacaaggtttataaaaggtactgttactattgttaaaattagtcattttagctatccgcttctatttcaccgtgcttgcaggtttgctatgaggaaaaacaaatttatgggctcaaacaaagtgtgatagtgaaagtcattttgcttccagcttaagaaccaagccaagaaaacagatatcaactgtgacgccacactcaaaagcttgtttggtgagagggataaggttgggatgctggagatctctaagcttttgagccgtggcttcccgaaaatctccaagcttttgtggtccatggagccagggatggctctttggtaaaagacttcgttgtggatggcctcttttatggtccatgttaagtcccaagtcccactaggtggttaagcagaaaaatcttgtgatggcattaagactttcagactttgtttttgggtctgatgcatgtaaaaaggattcccagtgtttctgttgctcttgcgatcctgtgaggacacatatgagagaaatatttagtttgttgatggcaaatcttgtcttatgttcatgcctgtacctatctgatcaagcgttatgatatgatcccatgcgtggtactgtgttctttagagatg

SEQ ID NO: 216234 - DNA, 3874 bp, Zea Mays
ttatttgattgcgtaggggaaatcgaagcctgtcgcgtaggacagttcggctaggccagagacatgccggcgtgacgaagagttgatgcatatctgatctcgcagcaacgttgaagtagagcgtgctgataacgtgttgagaactacgttaccatggatcaccagatctgctcccttccctcccgtcagcagtagaggcgcaagaagctgtagcgaacacgtctcccttcccataagcacgacagaagaaacacacaagacacaggatataaggttgggcctctggccctttctcttctctgtcttatgagagggtgtacatgttccttatatagagatgtgagatccctcaaaggcaaagcacccacattccctttagttaaaagacgccagggattcgagccctccccgcgtttccgtgagcatgagcatgtccgcgtgtaacacctggcgtaccggacccgaaaattttcttcgaacgagctctgagcagtgtagccctcctgtccgctgttcggtgcccgctgcccacctccctctcctccttccgacctcgccgcctccctccctaaactctaaaccctccaccagccgaagctactgccgcggccgcaacagaggtcgcgacgacgaacgctgaagaagcgccggcgagggagagtcctttactttttcctatgctgtagcaaaacaagcctatatcatcttccaaatatactcgttccgtgccggcggcctcccctcctacgcccctgccgattcttcaatcttcaccaacgtctgcgcgtagcaggctagcagtcggcacgacttcctcagatctgccggacgacttgctgttcgtcaccgactcaccagcaaccaacgtcagccatcagccggcagcaggggaagctgggcggagggtcattgcggcacggcgtccaggcgtacagcaggcaccagcaacagcccatggcaaacgccgcagatgaccctatggcagatgaagccagagtagaagatgccttcacacaggagatcaccgattattcgtacgtccctagataccatgtgttgagttggatggaaactgtggaggggatggtggccggtgtggcggcgcttccgccggtgtatttgatactgaacagaggtgcgattttcttttatatttcttccagttcatgttctccttgtgtggctggtgctggattcaaccgatctagggaagagatgttagttgatttgctgtaaaaatcaatatgttaacagagatatatgatacatgctcctgcttgctcatgatgccggtttggtgccaaggctgtatgccccccttcctatctgtgttttttgttctataatttggaggtttcttagttttttactacagtatttgcctattacgtatcacgttgcatctaattagctcttcttcgttgcccatgccaagatcttcttgagacgggatggggatggaagaggctggtgccctacagacctggttatgttgagtggcatgtgttcaagaaataccttggggactatttcgaccataatcgtgaagcttttctttgtgccgagcagaagcctgatccatttggatggattattgctaaaaagagtgccctgattgctgcagccaaattggtgcttcaagcaatggttcaaatgggtgtccttgttcctactggagatatgactgttgtcagaagaaccgctcaatttttccttaatagctttcaagagtgcctaacagcacaaaggaaggagagagaaatggcaaccgcagaactgggtttcaaaaagcaattaactaaggaggagaagtttgaaaagaggaagcagagacttgctgcaatcggagaggatcttttggcgattgctgctgatcaaccatttcgcttccctgccacatttacatttgtggtcagagcattctcagttctagatggtactgggaaaggccttgatcctaggtttcatattacagagattgctaagccgtgagtactttttgcattactagcatctgaatacttattcaaaaacacgcaaagcttgcacatcttcacttattatgtactgtctatattttcatcttgaacttttctggtactgacttgaaatgtctgttaaatttgctagaaatgccaaggaattgctaagatttaatgacgctggtgttgaaatagttgtgaaggcaagtttcaacatttggtcaaagctgttaacctatctctatgatagcacatctcctaagggttagggcttgtttggctaggagcggattgaaggggattggaggagcctattaagcattgaacaatttacccatgcttgtttcctattctttggtcgtgataacgtttgcaaccatgaatagtacatattgcttttccaggtgtgtggagagacatgtgtattcctcctatgacgaattccttaggctccatgaaggtaagcctgtcttaatgggcttgattgttgaacctgacttagtacttttatccatgtcacggcattgaactagacagtcactcatgtccttaggatattaacggtatacatcaacaattcattctattttaattgcttgcaaaacttttttggcccttcaaatgagttccacgcatcaagaagtcaagattccaggaggcctaaaataggagaggagggcgcagcttgattcaatccatgtcaagtcagaggctgctgcgaggtttgcacatgcaagtagaatttagatggtcctgcttcgctttcatgtggatttatcttgcaaatggtatgtggatccgttccagaggcaatgagccttgcagccagtttgcagtataaaaaacccaattatgtccactgttggttcgacgcagcgtgtgccgaggatttctactgccaagcataagaaagtatttgaaatcaagaacttgcattcattcaatcataatgtgtttcctatcaagcataagtgtgtgtgttttgtttgatatctgctttaataggagattgttcttgtcaccccaaaaatgttcccattctactttcgggcaggtgaattgcagataaatggtctgttcgcaactggtgctctcgggcgactccatcactgagcaacccttcgccccggtggctgcggtgtcgcactggctgacacctgctcgcagttgcattacaagttttactgactatgtattttcagaataatgtactaaacttcagtttggtgtctatctcagtgtacctacactcagttggaaaacttcaaccacactgcaacaaggtttataaaaggtactgttactattgttaaaattagtcattttagctatccgcttctatttcaccgtgcttgcaggtttgctatgaggaaaaacaaatttatgggctcaaacaaagtgtgatagtgaaagtcattttgcttccagcttaagaaccaagccaagaaaacagatatcaactgtgacgccacactcaaaagcttgtttggtgagagggataaggttgggatgctggagatctctaagcttttgagccgtggcttcccgaaaatctccaagcttttgtggtccatggagccagggatggctctttggtaaaagacttcgttgtggatggcctcttttatggtccatgttaagtcccaagtcccactaggtggttaagcagaaaaatcttgtgatggcattaagactttcagactttgtttttgggtctgatgcatgtaaaaaggattcccagtgtttctgttgctcttgcgatcctgtgaggacacatatgagagaaatatttagtttgttgatggcaaatcttgtcttatgttcatgcctgtacctatctgatcaagcgttatgatatgatcccatgcgtggtactgtgttctttagagatg

SEQ ID NO: 216235 - DNA, 3509 bp, Zea Mays
ttatttgattgcgtaggggaaatcgaagcctgtcgcgtaggacagttcggctaggccagagacatgccggcgtgacgaagagttgatgcatatctgatctcgcagcaacgttgaagtagagcgtgctgataacgtgttgagaactacgttaccatggatcaccagatctgctcccttccctcccgtcagcagtagaggcgcaagaagctgtagcgaacacgtctcccttcccataagcacgacagaagaaacacacaagacacaggatataaggttgggcctctggccctttctcttctctgtcttatgagagggtgtacatgttccttatatagagatgtgagatccctcaaaggcaaagcacccacattccctttagttaaaagacgccagggattcgagccctccccgcgtttccgtgagcatgagcatgtccgcgtgtaacacctggcgtaccggacccgaaaattttcttcgaacgagctctgagcagtgtagccctcctgtccgctgttcggtgcccgctgcccacctccctctcctccttccgacctcgccgcctccctccctaaactctaaaccctccaccagccgaagctactgccgcggccgcaacagaggtcgcgacgacgaacgctgaagaagcgccggcgagggagagtcctttactttttcctatgctgtagcaaaacaagcctatatcatcttccaaatatactcgttccgtgccggcggcctcccctcctacgcccctgccgattcttcaatcttcaccaacgtctgcgcgtagcaggctagcagtcggcacgacttcctcagatctgccggacgacttgctgttcgtcaccgactcaccagcaaccaacgtcagccatcagccggcagcaggggaagctgggcggagggtcattgcggcacggcgtccaggcgtacagcaggcaccagcaacagcccatggcaaacgccgcagatgaccctatggcagatgaagccagagtagaagatgccttcacacaggagatcaccgattattcgtacgtccctagataccatgtgttgagttggatggaaactgtggaggggatggtggccggtgtggcggcgcttccgccggtgtatttgatactgaacagagatcttcttgagacgggatggggatggaagaggctggtgccctacagacctggttatgttgagtggcatgtgttcaagaaataccttggggactatttcgaccataatcgtgaagcttttctttgtgccgagcagaagcctgatccatttggatggattattgctaaaaagagtgccctgattgctgcagccaaattgtgcctcaagatggagaaggcacttctcaggtactgtgctagctttctcactcctgacgacaaaaggttgatcctccggatcaaggaccaggcaaagcaaatgatccaatcagagggtgatcaatctttggttgtaactatatgcttggaggtgcttcaagcaatggttcaaatgggtgtccttgttcctactggagatatgactgttgtcagaagaaccgctcaatttttccttaatagctttcaagagtgcctaacagcacaaaggaaggagagagaaatggcaaccgcagaactgggtttcaaaaagcaattaactaaggaggagaagtttgaaaagaggaagcagagacttgctgcaatcggagaggatcttttggcgattgctgctgatcaaccatttcgcttccctgccacatttacatttgtggtcagagcattctcagttctagatggtactgggaaaggccttgatcctaggtttcatattacagagattgctaagccaaatgccaaggaattgctaagatttaatgacgctggtgttgaaatagttgtgaaggtgtgtggagagacatgtgtattcctcctatgacgaattccttaggctccatgaaggtaagcctgtcttaatgggcttgattgttgaacctgacttagtacttttatccatgtcacggcattgaactagacagtcactcatgtccttaggatattaacggtatacatcaacaattcattctattttaattgcttgcaaaacttttttggcccttcaaatgagttccacgcatcaagaagtcaagattccaggaggcctaaaataggagaggagggcgcagcttgattcaatccatgtcaagtcagaggctgctgcgaggtttgcacatgcaagtagaatttagatgaaaagacgtgaaatggtattttccagtatggactgtataaatgtaattatattcctatgctggtcctgcttcgctttcatgtggatttatcttgcaaatggtatgtggatccgttccagaggcaatgagccttgcagccagtttgcagtataaaaaacccaattatgtccactgttggttcgacgcagcgtgtgccgaggatttctactgccaagcataagaaagagattgttcttgtcaccccaaaaatgttcccattctactttcgggcaggtgaattgcagataaatggtctgttcgcaactggtgctctcgggcgactccatcactgagcaacccttcgccccggtggctgcggtgtcgcactggctgacacctgctcgcagttgcattacaagttttactgactatgtattttcaggtttattcaatttcagttgtaatgcttctgacagcagttgtatcagtcctcttgttcagcttccatgtatccctcgcatccttccttggatccacataagtgttaatgataattttgttgcatctcctctgctgatcagagctttcaaactcatgacagaataatgtactaaacttcagtttggtgtctatctcagtgtacctacactcagttggaaaacttcaaccacactgcaacaaggtttataaaaggtactgttactattgttaaaattagtcattttagctatccgcttctatttcaccgtgcttgcaggtttgctatgaggaaaaacaaatttatgggctcaaacaaagtgtgatagtgaaagtcattttgcttccagcttaagaaccaagccaagaaaacagatatcaactgtgacgccacactcaaaagcttgtttggtgagagggataaggttgggatgctggagatctctaagcttttgagccgtggcttcccgaaaatctccaagcttttgtggtccatggagccagggatggctctttggtaaaagacttcgttgtggatggcctcttttatggtccatgttaagtcccaagtcccactaggtggttaagcagaaaaatcttgtgatggcattaagactttcagactttgtttttgggtctgatgcatgtaaaaaggattcccagtgtttctgttgctcttgcgatcctgtgaggacacatatgagagaaatatttagtttgttgatggcaaatcttgtcttatgttcatgcctgtacctatctgatcaagcgttatgatatgatcccatgcgtggtactgtgttctttagagatg

SEQ ID NO: 216236 - DNA, 4411 bp, Zea Mays
ttatttgattgcgtaggggaaatcgaagcctgtcgcgtaggacagttcggctaggccagagacatgccggcgtgacgaagagttgatgcatatctgatctcgcagcaacgttgaagtagagcgtgctgataacgtgttgagaactacgttaccatggatcaccagatctgctcccttccctcccgtcagcagtagaggcgcaagaagctgtagcgaacacgtctcccttcccataagcacgacagaagaaacacacaagacacaggatataaggttgggcctctggccctttctcttctctgtcttatgagagggtgtacatgttccttatatagagatgtgagatccctcaaaggcaaagcacccacattccctttagttaaaagacgccagggattcgagccctccccgcgtttccgtgagcatgagcatgtccgcgtgtaacacctggcgtaccggacccgaaaattttcttcgaacgagctctgagcagtgtagccctcctgtccgctgttcggtgcccgctgcccacctccctctcctccttccgacctcgccgcctccctccctaaactctaaaccctccaccagccgaagctactgccgcggccgcaacagaggtcgcgacgacgaacgctgaagaagcgccggcgagggagagtcctttactttttcctatgctgtagcaaaacaagcctatatcatcttccaaatatactcgttccgtgccggcggcctcccctcctacgcccctgccgattcttcaatcttcaccaacgtctgcgcgtagcaggctagcagtcggcacgacttcctcagatctgccggacgacttgctgttcgtcaccgactcaccagcaaccaacgtcagccatcagccggcagcaggggaagctgggcggagggtcattgcggcacggcgtccaggcgtacagcaggcaccagcaacagcccatggcaaacgccgcagatgaccctatggcagatgaagccagagtagaagatgccttcacacaggagatcaccgattattcgtacgtccctagataccatgtgttgagttggatggaaactgtggaggggatggtggccggtgtggcggcgcttccgccggtgtatttgatactgaacagaggtgcgattttcttttatatttcttccagttcatgttctccttgtgtggctggtgctggattcaaccgatctagggaagagatgttagttgatttgctgtaaaaatcaatatgttaacagagatatatgatacatgctcctgcttgctcatgatgccggtttggtgccaaggctgtatgccccccttcctatctgtgttttttgttctataatttggaggtttcttagttttttactacagtatttgcctattacgtatcacgttgcatctaattagctcttcttcgttgcccatgccaagatcttcttgagacgggatggggatggaagaggctggtgccctacagacctggttatgttgagtggcatgtgttcaagaaataccttggggactatttcgaccataatcgtgaagcttttctttgtgccgagcagaagcctgatccatttggatggattattgctaaaaagagtgccctgattgctgcagccaaattgtgcctcaagatggagaaggcacttctcaggtactgtgctagctttctcactcctgacgacaaaaggttgatcctccggatcaaggaccaggcaaagcaaatgatccaatcagagggtgatcaatctttggttgtaactatatgcttggaggttgtcggtgccgagcgcgcggtcgtcgtgcagctcgtgggaccagtccgccgagcggctgctagaggcggacgcagccctcgtgcggaagaagtgcgccgagaagagcgcgccgaggccgaggacgccgccgggcagcaggtcctccagcgcggcgaggtcttggtcttggtcttggagcagggtcttggtcttggagcactgcacgaggagcacatcggcatggtgcttcaagcaatggttcaaatgggtgtccttgttcctactggagatatgactgttgtcagaagaaccgctcaatttttccttaatagctttcaagagtgcctaacagcacaaaggaaggagagagaaatggcaaccgcagaactgggtttcaaaaagcaattaactaaggaggagaagtttgaaaagaggaagcagagacttgctgcaatcggagaggatcttttggcgattgctgctgatcaaccatttcgcttccctgccacatttacatttgtggtcagagcattctcagttctagatggtactgggaaaggccttgatcctaggtttcatattacagagattgctaagccaaatgccaaggaattgctaagatttaatgacgctggtgttgaaatagttgtgaaggcaagtttcaacatttggtcaaagctgttaacctatctctatgatagcacatctcctaagggttagggcttgtttggctaggagcggattgaaggggattggaggagcctattaagcattgaacaatttacccatgcttgtttcctattctttggtcgtgataacgtttgcaaccatgaatagtacatattgcttttccaggtgtgtggagagacatgtgtattcctcctatgacgaattccttaggctccatgaaggtaagcctgtcttaatgggcttgattgttgaacctgacttagtacttttatccatgtcacggcattgaactagacagtcactcatgtccttaggatattaacggtatacatcaacaattcattctattttaattgcttgcaaaacttttttggcccttcaaatgagttccacgcatcaagaagtcaagattccaggaggcctaaaataggagaggagggcgcagcttgattcaatccatgtcaagtcagaggctgctgcgaggtttgcacatgcaagtagaatttagatgatctctgttaggcatctaactgaataaatgatctccattatggactggttatattattttctgtgcgatcggatgggttaaagaaaagacgtgaaatggtattttccagtatggactgtataaatgtaattatattcctatgctggtcctgcttcgctttcatgtggatttatcttgcaaatggtatgtggatccgttccagaggcaatgagccttgcagccagtttgcagtataaaaaacccaattatgtccactgttggttcgacgcagcgtgtgccgaggatttctactgccaagcataagaaagtatttgaaatcaagaacttgcattcattcaatcataatgtgtttcctatcaagcataagtgtgtgtgttttgtttgatatctgctttaataggagattgttcttgtcaccccaaaaatgttcccattctactttcgggcaggtgaattgcagataaatggtctgttcgcaactggtgctctcgggcgactccatcactgagcaacccttcgccccggtggctgcggtgtcgcactggctgacacctgctcgcagttgcattacaagttttactgactatgtattttcaggtttattcaatttcagttgtaatgcttctgacagcagttgtatcagtcctcttgttcagcttccatgtatccctcgcatccttccttggatccacataagtgttaatgataattttgttgcatctcctctgctgatcagagctttcaaactcatgacagaataatgtactaaacttcagtttggtgtctatctcagtgtacctacactcagttggaaaacttcaaccacactgcaacaaggtttataaaaggtactgttactattgttaaaattagtcattttagctatccgcttctatttcaccgtgcttgcaggtttgctatgaggaaaaacaaatttatgggctcaaacaaagtgtgatagtgaaagtcattttgcttccagcttaagaaccaagccaagaaaacagatatcaactgtgacgccacactcaaaagcttgtttggtgagagggataaggttgggatgctggagatctctaagcttttgagccgtggcttcccgaaaatctccaagcttttgtggtccatggagccagggatggctctttggtaaaagacttcgttgtggatggcctcttttatggtccatgttaagtcccaagtcccactaggtggttaagcagaaaaatcttgtgatggcattaagactttcagactttgtttttgggtctgatgcatgtaaaaaggattcccagtgtttctgttgctcttgcgatcctgtgaggacacatatgagagaaatatttagtttgttgatggcaaatcttgtcttatgttcatgcctgtacctatctgatcaagcgttatgatatgatcccatgcgtggtactgtgttctttagagatg

SEQ ID NO: 216237 - DNA, 5028 bp, Zea Mays
ttatttgattgcgtaggggaaatcgaagcctgtcgcgtaggacagttcggctaggccagagacatgccggcgtgacgaagagttgatgcatatctgatctcgcagcaacgttgaagtagagcgtgctgataacgtgttgagaactacgttaccatggatcaccagatctgctcccttccctcccgtcagcagtagaggcgcaagaagctgtagcgaacacgtctcccttcccataagcacgacagaagaaacacacaagacacaggatataaggttgggcctctggccctttctcttctctgtcttatgagagggtgtacatgttccttatatagagatgtgagatccctcaaaggcaaagcacccacattccctttagttaaaagacgccagggattcgagccctccccgcgtttccgtgagcatgagcatgtccgcgtgtaacacctggcgtaccggacccgaaaattttcttcgaacgagctctgagcagtgtagccctcctgtccgctgttcggtgcccgctgcccacctccctctcctccttccgacctcgccgcctccctccctaaactctaaaccctccaccagccgaagctactgccgcggccgcaacagaggtcgcgacgacgaacgctgaagaagcgccggcgagggagagtcctttactttttcctatgctgtagcaaaacaagcctatatcatcttccaaatatactcgttccgtgccggcggcctcccctcctacgcccctgccgattcttcaatcttcaccaacgtctgcgcgtagcaggctagcagtcggcacgacttcctcagatctgccggacgacttgctgttcgtcaccgactcaccagcaaccaacgtcagccatcagccggcagcaggggaagctgggcggagggtcattgcggcacggcgtccaggcgtacagcaggcaccagcaacagcccatggcaaacgccgcagatgaccctatggcagatgaagccagagtagaagatgccttcacacaggagatcaccgattattcgtacgtccctagataccatgtgttgagttggatggaaactgtggaggggatggtggccggtgtggcggcgcttccgccggtgtatttgatactgaacagaggtgcgattttcttttatatttcttccagttcatgttctccttgtgtggctggtgctggattcaaccgatctagggaagagatgttagttgatttgctgtaaaaatcaatatgttaacagagatatatgatacatgctcctgcttgctcatgatgccggtttggtgccaaggctgtatgccccccttcctatctgtgttttttgttctataatttggaggtttcttagttttttactacagtatttgcctattacgtatcacgttgcatctaattagctcttcttcgttgcccatgccaagatcttcttgagacgggatggggatggaagaggctggtgccctacagacctggttatgttgagtggcatgtgttcaagaaataccttggggactatttcgaccataatcgtgaagcttttctttgtgccgagcagaagcctgatccatttggatggattattgctaaaaagagtgccctgattgctgcagccaaattggtatagttccccctacctctgcattactgaactgtggcctgccatacttgtttatattttatatattggttcagttgcaaattaacttgcaccattgcaaaaacaatcaaaatgctttccagtgcctcaagatggagaaggcacttctcaggtactgtgctagctttctcactcctgacgacaaaaggttgatcctccggatcaaggaccaggcaaagcaaatgatccaatcagagggtgatcaatctttggttgtaactatatgcttggaggtgcttcaagcaatggttcaaatgggtgtccttgttcctactggagatatgactgttgtcagaagaaccgctcaatttttccttaatagctttcaagagtgcctaacagcacaaaggaaggagagagaaatggcaaccgcagaactgggtttcaaaaagcaattaactaaggaggagaagtttgaaaagaggaagcagagacttgctgcaatcggagaggatcttttggcgattgctgctgatcaaccatttcgcttccctgccacatttacatttgtggtcagagcattctcagttctagatggtactgggaaaggccttgatcctaggtttcatattacagagattgctaagccgtgagtactttttgcattactagcatctgaatacttattcaaaaacacgcaaagcttgcacatcttcacttattatgtactgtctatattttcatcttgaacttttctggtactgacttgaaatgtctgttaaatttgctagaaatgccaaggaattgctaagatttaatgacgctggtgttgaaatagttgtgaaggcaagtttcaacatttggtcaaagctgttaacctatctctatgatagcacatctcctaagggttagggcttgtttggctaggagcggattgaaggggattggaggagcctattaagcattgaacaatttacccatgcttgtttcctattctttggtcgtgataacgtttgcaaccatgaatagtacatattgcttttccaggtgtgtggagagacatgtgtattcctcctatgacgaattccttaggctccatgaaggatattaacggtatacatcaacaattcattctattttaattgcttgcaaaacttttttggcccttcaaatgagttccacgcatcaagaagtcaagattccaggaggcctaaaataggtaaacttgctgttatatcttttgtgctctcagtagtcgcctattacttgttttaattcgctgatccatgtgcagtgtatcaatttgtcttagtatttttattcgtggggatgcctgactcaaatgaactcatgttcaacactgagcaacctacttataattttggagcctataaaatttctaagctaaaaaaggtaataaaaaggaatgatattatagtcacatcatctgaacaacagtgaagggaagggagggatagatggtctgaatgcctataaatgtcgttcccttggtctgcttcttaaatttgaaaccaagatactatagtcaaatacttctaaacttgaagcctgtaaattggaatcaccaagttaaataagaacaggggtaactattcatagctcagatggttgtcatccaatacgtgcgctaaggcacagacaggtgaggttgcatattcaatccccaagacagtaaaccattgaggcatattaaaacacattttccatgaggtttcctaagtgatcctttaggtaaacagaaccatacctagctccatatgaaactatttcccgatttgaagtacacctaagttaaggttcatacattggagctctggcagtaaaacaatagtccttaccttgagacagcttagattagaatgaggtggatggtaatatggcatgagcaacataccacagttcatgcatggaggaaatcatttttactttctttcctagccatggtagttgtgttgctccttaccaaggcactacatggagcatcatatggttcatgatgtaaacatggttttagatctgtctatactcacactcaagaaccagccaaaatgtgatattccacaacctgagagaaatcaaaatgaaatcatgtacaacatagtacatatgatgatgtgcggtgatgcgggtgcatgtgtgttgtgtgtgtaggagaggagggcgcagcttgattcaatccatgtcaagtcagaggctgctgcgaggtttgcacatgcaagtagaatttagatgacgtgaaatggtattttccagtatggactgtataaatgtaattatattcctatgctggtcctgcttcgctttcatgtggatttatcttgcaaatggtatgtggatccgttccagaggcaatgagccttgcagccagtttgcagtataaaaaacccaattatgtccactgttggttcgacgcagcgtgtgccgaggatttctactgccaagcataagaaagtatttgaaatcaagaacttgcattcattcaatcataatgtgtttcctatcaagcataagtgtgtgtgttttgtttgatatctgctttaataggagattgttcttgtcaccccaaaaatgttcccattctactttcgggcaggtgaattgcagataaatggtctgttcgcaactggtgctctcgggcgactccatcactgagcaacccttcgccccggtggctgcggtgtcgcactggctgacacctgctcgcagttgcattacaagttttactgactatgtattttcaggtttattcaatttcagttgtaatgcttctgacagcagttgtatcagtcctcttgttcagcttccattgtacctacactcagttggaaaacttcaaccacactgcaacaaggtttataaaaggtttgctatgaggaaaaacaaatttatgggctcaaacaaagtgtgatagtgaaagtcattttgcttccagcttaagaaccaagccaagaaaacagatatcaactgtgacgccacactcaaaagcttgtttggtgagagggataaggttgggatgctggagatctctaagcttttgagccgtggcttcccgaaaatctccaagcttttgtggtccatggagccagggatggctctttggtaaaagacttcgttgtggatggcctcttttatggtccatgttaagtcccaagtcccactaggtggttaagcagaaaaatcttgtgatggcattaagactttcagactttgtttttgggtctgatgcatgtaaaaaggattcccagtgtttctgttgctcttgcgatcctgtgaggacacatatgagagaaatatttagtttgttgatggcaaatcttgtcttatgttcatgcctgtacctatctgatcaagcgttatgatatgatcccatgcgtggtactgtgttctttagagatg

SEQ ID NO: 216238 - DNA, 4592 bp, Zea Mays
ttatttgattgcgtaggggaaatcgaagcctgtcgcgtaggacagttcggctaggccagagacatgccggcgtgacgaagagttgatgcatatctgatctcgcagcaacgttgaagtagagcgtgctgataacgtgttgagaactacgttaccatggatcaccagatctgctcccttccctcccgtcagcagtagaggcgcaagaagctgtagcgaacacgtctcccttcccataagcacgacagaagaaacacacaagacacaggatataaggttgggcctctggccctttctcttctctgtcttatgagagggtgtacatgttccttatatagagatgtgagatccctcaaaggcaaagcacccacattccctttagttaaaagacgccagggattcgagccctccccgcgtttccgtgagcatgagcatgtccgcgtgtaacacctggcgtaccggacccgaaaattttcttcgaacgagctctgagcagtgtagccctcctgtccgctgttcggtgcccgctgcccacctccctctcctccttccgacctcgccgcctccctccctaaactctaaaccctccaccagccgaagctactgccgcggccgcaacagaggtcgcgacgacgaacgctgaagaagcgccggcgagggagagtcctttactttttcctatgctgtagcaaaacaagcctatatcatcttccaaatatactcgttccgtgccggcggcctcccctcctacgcccctgccgattcttcaatcttcaccaacgtctgcgcgtagcaggctagcagtcggcacgacttcctcagatctgccggacgacttgctgttcgtcaccgactcaccagcaaccaacgtcagccatcagccggcagcaggggaagctgggcggagggtcattgcggcacggcgtccaggcgtacagcaggcaccagcaacagcccatggcaaacgatgaccctatggcagatgaagccagagtagaagatgccttcacacaggagatcaccgattattcgtacgtccctagataccatgtgttgagttggatggaaactgtggaggggatggtggccggtgtggcggcgcttccgccggtgtatttgatactgaacagaggtgcgattttcttttatatttcttccagttcatgttctccttgtgtggctggtgctggattcaaccgatctagggaagagatgttagttgatttgctgtaaaaatcaatatgttaacagagatatatgatacatgctcctgcttgctcatgatgccggtttggtgccaaggctatcttcttgagacgggatggggatggaagaggctggtgccctacagacctggttatgttgagtggcatgtgttcaagaaataccttggggactatttcgaccataatcgtgaagcttttctttgtgccgagcagaagcctgatccatttggatggattattgctaaaaagagtgccctgattgctgcagccaaattggtgcttcaagcaatggttcaaatgggtgtccttgttcctactggagatatgactgttgtcagaagaaccgctcaatttttccttaatagctttcaagagtgcctaacagcacaaaggaaggagagagaaatggcaaccgcagaactgggtttcaaaaagcaattaactaaggaggagaagtttgaaaagaggaagcagagacttgctgcaatcggagaggatcttttggcgattgctgctgatcaaccatttcgcttccctgccacatttacatttgtggtcagagcattctcagttctagatggtactgggaaaggccttgatcctaggtttcatattacagagattgctaagccgtgagtactttttgcattactagcatctgaatacttattcaaaaacacgcaaagcttgcacatcttcacttattatgtactgtctatattttcatcttgaacttttctggtactgacttgaaatgtctgttaaatttgctagaaatgccaaggaattgctaagatttaatgacgctggtgttgaaatagttgtgaaggcaagtttcaacatttggtcaaagctgttaacctatctctatgatagcacatctcctaagggttagggcttgtttggctaggagcggattgaaggggattggaggagcctattaagcattgaacaatttacccatgcttgtttcctattctttggtcgtgataacgtttgcaaccatgaatagtacatattgcttttccaggtgtgtggagagacatgtgtattcctcctatgacgaattccttaggctccatgaaggtaagcctgtcttaatgggcttgattgttgaacctgacttagtacttttatccatgtcacggcattgaactagacagtcactcatgtccttaggatattaacggtatacatcaacaattcattctattttaattgcttgcaaaacttttttggcccttcaaatgagttccacgcatcaagaagtcaagattccaggaggcctaaaataggtaaacttgctgttatatcttttgtgctctcagtagtcgcctattacttgttttaattcgctgatccatgtgcagtgtatcaatttgtcttagtatttttattcgtggggatgcctgactcaaatgaactcatgttcaacactgagcaacctacttataattttggagcctataaaatttctaagctaaaaaaggtaataaaaaggaatgatattatagtcacatcatctgaacaacagtgaagggaagggagggatagatggtctgaatgcctataaatgtcgttcccttggtctgcttcttaaatttgaaaccaagatactatagtcaaatacttctaaacttgaagcctgtaaattggaatcaccaagttaaataagaacaggggtaactattcatagctcagatggttgtcatccaatacgtgcgctaaggcacagacaggtgaggttgcatattcaatccccaagacagtaaaccattgaggcatattaaaacacattttccatgaggtttcctaagtgatcctttaggtaaacagaaccatacctagctccatatgaaactatttcccgatttgaagtacacctaagttaaggttcatacattggagctctggcagtaaaacaatagtccttaccttgagacagcttagattagaatgaggtggatggtaatatggcatgagcaacataccacagttcatgcatggaggaaatcatttttactttctttcctagccatggtagttgtgttgctccttaccaaggcactacatggagcatcatatggttcatgatgtaaacatggttttagatctgtctatactcacactcaagaaccagccaaaatgtgatattccacaacctgagagaaatcaaaatgaaatcatgtacaacatagtacatatgatgatgtgcggtgatgcgggtgcatgtgtgttgtgtgtgtaggagaggagggcgcagcttgattcaatccatgtcaagtcagaggctgctgcgaggtttgcacatgcaagtagaatttagatggtcctgcttcgctttcatgtggatttatcttgcaaatggtatgtggatccgttccagaggcaatgagccttgcagccagtttgcagtataaaaaacccaattatgtccactgttggttcgacgcagcgtgtgccgaggatttctactgccaagcataagaaagagattgttcttgtcaccccaaaaatgttcccattctactttcgggcaggtgaattgcagataaatggtctgttcgcaactggtgctctcgggcgactccatcactgagcaacccttcgccccggtggctgcggtgtcgcactggctgacacctgctcgcagttgcattacaagttttactgactatgtattttcaggtttattcaatttcagttgtaatgcttctgacagcagttgtatcagtcctcttgttcagcttccataataatgtactaaacttcagtttggtgtctatctcagtgtacctacactcagttggaaaacttcaaccacactgcaacaaggtttgctatgaggaaaaacaaatttatgggctcaaacaaagtgtgatagtgaaagtcattttgcttccagcttaagaaccaagccaagaaaacagatatcaactgtgacgccacactcaaaagcttgtttggtgagagggataaggttgggatgctggagatctctaagcttttgagccgtggcttcccgaaaatctccaagcttttgtggtccatggagccagggatggctctttggtaaaagacttcgttgtggatggcctcttttatggtccatgttaagtcccaagtcccactaggtggttaagcagaaaaatcttgtgatggcattaagactttcagactttgtttttgggtctgatgcatgtaaaaaggattcccagtgtttctgttgctcttgcgatcctgtgaggacacatatgagagaaatatttagtttgttgatggcaaatcttgtcttatgttcatgcctgtacctatctgatcaagcgttatgatatgatcccatgcgtggtactgtgttctttagagatg

SEQ ID NO: 216239 - DNA, 3935 bp, Zea Mays
ttatttgattgcgtaggggaaatcgaagcctgtcgcgtaggacagttcggctaggccagagacatgccggcgtgacgaagagttgatgcatatctgatctcgcagcaacgttgaagtagagcgtgctgataacgtgttgagaactacgttaccatggatcaccagatctgctcccttccctcccgtcagcagtagaggcgcaagaagctgtagcgaacacgtctcccttcccataagcacgacagaagaaacacacaagacacaggatataaggttgggcctctggccctttctcttctctgtcttatgagagggtgtacatgttccttatatagagatgtgagatccctcaaaggcaaagcacccacattccctttagttaaaagacgccagggattcgagccctccccgcgtttccgtgagcatgagcatgtccgcgtgtaacacctggcgtaccggacccgaaaattttcttcgaacgagctctgagcagtgtagccctcctgtccgctgttcggtgcccgctgcccacctccctctcctccttccgacctcgccgcctccctccctaaactctaaaccctccaccagccgaagctactgccgcggccgcaacagaggtcgcgacgacgaacgctgaagaagcgccggcgagggagagtcctttactttttcctatgctgtagcaaaacaagcctatatcatcttccaaatatactcgttccgtgccggcggcctcccctcctacgcccctgccgattcttcaatcttcaccaacgtctgcgcgtagcaggctagcagtcggcacgacttcctcagatctgccggacgacttgctgttcgtcaccgactcaccagcaaccaacgtcagccatcagccggcagcaggggaagctgggcggagggtcattgcggcacggcgtccaggcgtacagcaggcaccagcaacagcccatggcaaacgccgcagatgaccctatggcagatgaagccagagtagaagatgccttcacacaggagatcaccgattattcgtacgtccctagataccatgtgttgagttggatggaaactgtggaggggatggtggccggtgtggcggcgcttccgccggtgtatttgatactgaacagagatcttcttgagacgggatggggatggaagaggctggtgccctacagacctggttatgttgagtggcatgtgttcaagaaataccttggggactatttcgaccataatcgtgaagcttttctttgtgccgagcagaagcctgatccatttggatggattattgctaaaaagagtgccctgattgctgcagccaaattgtgcctcaagatggagaaggcacttctcaggtactgtgctagctttctcactcctgacgacaaaaggttgatcctccggatcaaggaccaggcaaagcaaatgatccaatcagagggtgatcaatctttggttgtaactatatgcttggaggtgcttcaagcaatggttcaaatgggtgtccttgttcctactggagatatgactgttgtcagaagaaccgctcaatttttccttaatagctttcaagagtgcctaacagcacaaaggaaggagagagaaatggcaaccgcagaactgggtttcaaaaagcaattaactaaggaggagaagtttgaaaagaggaagcagagacttgctgcaatcggagaggatcttttggcgattgctgctgatcaaccatttcgcttccctgccacatttacatttgtggtcagagcattctcagttctagatggtactgggaaaggccttgatcctaggtttcatattacagagattgctaagccgtgagtactttttgcattactagcatctgaatacttattcaaaaacacgcaaagcttgcacatcttcacttattatgtactgtctatattttcatcttgaacttttctggtactgacttgaaatgtctgttaaatttgctagaaatgccaaggaattgctaagatttaatgacgctggtgttgaaatagttgtgaaggcaagtttcaacatttggtcaaagctgttaacctatctctatgatagcacatctcctaagggttagggcttgtttggctaggagcggattgaaggggattggaggagcctattaagcattgaacaatttacccatgcttgtttcctattctttggtcgtgataacgtttgcaaccatgaatagtacatattgcttttccaggtgtgtggagagacatgtgtattcctcctatgacgaattccttaggctccatgaaggtaagcctgtcttaatgggcttgattgttgaacctgacttagtacttttatccatgtcacggcattgaactagacagtcactcatgtccttaggatattaacggtatacatcaacaattcattctattttaattgcttgcaaaacttttttggcccttcaaatgagttccacgcatcaagaagtcaagattccaggaggcctaaaataggagaggagggcgcagcttgattcaatccatgtcaagtcagaggctgctgcgaggtttgcacatgcaagtagaatttagatgatctctgttaggcatctaactgaataaatgatctccattatggactggttatattattttctgtgcgatcggatgggttaaagaaaagacgtgaaatggtattttccagtatggactgtataaatgtaattatattcctatgctggtcctgcttcgctttcatgtggatttatcttgcaaatggtatgtggatccgttccagaggcaatgagccttgcagccagtttgcagtataaaaaacccaattatgtccactgttggttcgacgcagcgtgtgccgaggatttctactgccaagcataagaaagagattgttcttgtcaccccaaaaatgttcccattctactttcgggcaggtgaattgcagataaatggtctgttcgcaactggtgctctcgggcgactccatcactgagcaacccttcgccccggtggctgcggtgtcgcactggctgacacctgctcgcagttgcattacaagttttactgactatgtattttcaggtttattcaatttcagttgtaatgcttctgacagcagttgtatcagtcctcttgttcagcttccatgtatccctcgcatccttccttggatccacataagtgttaatgataattttgttgcatctcctctgctgatcagagctttcaaactcatgacagaataatgtactaaacttcagtttggtgtctatctcagtgtacctacactcagttggaaaacttcaaccacactgcaacaaggtttataaaaggtactgttactattgttaaaattagtcattttagctatccgcttctatttcaccgtgcttgcaggtttgctatgaggaaaaacaaatttatgggctcaaacaaagtgtgatagtgaaagtcattttgcttccagcttaagaaccaagccaagaaaacagatatcaactgtgacgccacactcaaaagcttgtttggtgagagggataaggttgggatgctggagatctctaagcttttgagccgtggcttcccgaaaatctccaagcttttgtggtccatggagccagggatggctctttggtaaaagacttcgttgtggatggcctcttttatggtccatgttaagtcccaagtcccactaggtggttaagcagaaaaatcttgtgatggcattaagactttcagactttgtttttgggtctgatgcatgtaaaaaggattcccagtgtttctgttgctcttgcgatcctgtgaggacacatatgagagaaatatttagtttgttgatggcaaatcttgtcttatgttcatgcctgtacctatctgatcaagcgttatgatatgatcccatgcgtggtactgtgttctttagagatg

SEQ ID NO: 216240 - DNA, 4666 bp, Zea Mays
ttatttgattgcgtaggggaaatcgaagcctgtcgcgtaggacagttcggctaggccagagacatgccggcgtgacgaagagttgatgcatatctgatctcgcagcaacgttgaagtagagcgtgctgataacgtgttgagaactacgttaccatggatcaccagatctgctcccttccctcccgtcagcagtagaggcgcaagaagctgtagcgaacacgtctcccttcccataagcacgacagaagaaacacacaagacacaggatataaggttgggcctctggccctttctcttctctgtcttatgagagggtgtacatgttccttatatagagatgtgagatccctcaaaggcaaagcacccacattccctttagttaaaagacgccagggattcgagccctccccgcgtttccgtgagcatgagcatgtccgcgtgtaacacctggcgtaccggacccgaaaattttcttcgaacgagctctgagcagtgtagccctcctgtccgctgttcggtgcccgctgcccacctccctctcctccttccgacctcgccgcctccctccctaaactctaaaccctccaccagccgaagctactgccgcggccgcaacagaggtcgcgacgacgaacgctgaagaagcgccggcgagggagagtcctttactttttcctatgctgtagcaaaacaagcctatatcatcttccaaatatactcgttccgtgccggcggcctcccctcctacgcccctgccgattcttcaatcttcaccaacgtctgcgcgtagcaggctagcagtcggcacgacttcctcagatctgccggacgacttgctgttcgtcaccgactcaccagcaaccaacgtcagccatcagccggcagcaggggaagctgggcggagggtcattgcggcacggcgtccaggcgtacagcaggcaccagcaacagcccatggcaaacgccgcagatgaccctatggcagatgaagccagagtagaagatgccttcacacaggagatcaccgattattcgtacgtccctagataccatgtgttgagttggatggaaactgtggaggggatggtggccggtgtggcggcgcttccgccggtgtatttgatactgaacagagatcttcttgagacgggatggggatggaagaggctggtgccctacagacctggttatgttgagtggcatgtgttcaagaaataccttggggactatttcgaccataatcgtgaagcttttctttgtgccgagcagaagcctgatccatttggatggattattgctaaaaagagtgccctgattgctgcagccaaattgtgcctcaagatggagaaggcacttctcaggtactgtgctagctttctcactcctgacgacaaaaggttgatcctccggatcaaggaccaggcaaagcaaatgatccaatcagagggtgatcaatctttggttgtaactatatgcttggaggttgtcggtgccgagcgcgcggtcgtcgtgcagctcgtgggaccagtccgccgagcggctgctagaggcggacgcagccctcgtgcggaagaagtgcgccgagaagagcgcgccgaggccgaggacgccgccgggcagcaggtcctccagcgcggcgaggtcttggtcttggtcttggagcagggtcttggtcttggagcactgcacgaggagcacatcggcatggtgcttcaagcaatggttcaaatgggtgtccttgttcctactggagatatgactgttgtcagaagaaccgctcaatttttccttaatagctttcaagagtgcctaacagcacaaaggaaggagagagaaatggcaaccgcagaactgggtttcaaaaagcaattaactaaggaggagaagtttgaaaagaggaagcagagacttgctgcaatcggagaggatcttttggcgattgctgctgatcaaccatttcgcttccctgccacatttacatttgtggtcagagcattctcagttctagatggtactgggaaaggccttgatcctaggtttcatattacagagattgctaagccgtgagtactttttgcattactagcatctgaatacttattcaaaaacacgcaaagcttgcacatcttcacttattatgtactgtctatattttcatcttgaacttttctggtactgacttgaaatgtctgttaaatttgctagaaatgccaaggaattgctaagatttaatgacgctggtgttgaaatagttgtgaaggtgtgtggagagacatgtgtattcctcctatgacgaattccttaggctccatgaaggtaagcctgtcttaatgggcttgattgttgaacctgacttagtacttttatccatgtcacggcattgaactagacagtcactcatgtccttaggatattaacggtatacatcaacaattcattctattttaattgcttgcaaaacttttttggcccttcaaatgagttccacgcatcaagaagtcaagattccaggaggcctaaaataggtaaacttgctgttatatcttttgtgctctcagtagtcgcctattacttgttttaattcgctgatccatgtgcagtgtatcaatttgtcttagtatttttattcgtggggatgcctgactcaaatgaactcatgttcaacactgagcaacctacttataattttggagcctataaaatttctaagctaaaaaaggtaataaaaaggaatgatattatagtcacatcatctgaacaacagtgaagggaagggagggatagatggtctgaatgcctataaatgtcgttcccttggtctgcttcttaaatttgaaaccaagatactatagtcaaatacttctaaacttgaagcctgtaaattggaatcaccaagttaaataagaacaggggtaactattcatagctcagatggttgtcatccaatacgtgcgctaaggcacagacaggtgaggttgcatattcaatccccaagacagtaaaccattgaggcatattaaaacacattttccatgaggtttcctaagtgatcctttaggtaaacagaaccatacctagctccatatgaaactatttcccgatttgaagtacacctaagttaaggttcatacattggagctctggcagtaaaacaatagtccttaccttgagacagcttagattagaatgaggtggatggtaatatggcatgagcaacataccacagttcatgcatggaggaaatcatttttactttctttcctagccatggtagttgtgttgctccttaccaaggcactacatggagcatcatatggttcatgatgtaaacatggttttagatctgtctatactcacactcaagaaccagccaaaatgtgatattccacaacctgagagaaatcaaaatgaaatcatgtacaacatagtacatatgatgatgtgcggtgatgcgggtgcatgtgtgttgtgtgtgtaggagaggagggcgcagcttgattcaatccatgtcaagtcagaggctgctgcgaggtttgcacatgcaagtagaatttagatggtcctgcttcgctttcatgtggatttatcttgcaaatggtatgtggatccgttccagaggcaatgagccttgcagccagtttgcagtataaaaaacccaattatgtccactgttggttcgacgcagcgtgtgccgaggatttctactgccaagcataagaaagtatttgaaatcaagaacttgcattcattcaatcataatgtgtttcctatcaagcataagtgtgtgtgttttgtttgatatctgctttaataggagattgttcttgtcaccccaaaaatgttcccattctactttcgggcaggtgaattgcagataaatggtctgttcgcaactggtgctctcgggcgactccatcactgagcaacccttcgccccggtggctgcggtgtcgcactggctgacacctgctcgcagttgcattacaagttttactgactatgtattttcaggtttattcaatttcagttgtaatgcttctgacagcagttgtatcagtcctcttgttcagcttccattgtacctacactcagttggaaaacttcaaccacactgcaacaaggtttataaaaggtttgctatgaggaaaaacaaatttatgggctcaaacaaagtgtgatagtgaaagtcattttgcttccagcttaagaaccaagccaagaaaacagatatcaactgtgacgccacactcaaaagcttgtttggtgagagggataaggttgggatgctggagatctctaagcttttgagccgtggcttcccgaaaatctccaagcttttgtggtccatggagccagggatggctctttggtaaaagacttcgttgtggatggcctcttttatggtccatgttaagtcccaagtcccactaggtggttaagcagaaaaatcttgtgatggcattaagactttcagactttgtttttgggtctgatgcatgtaaaaaggattcccagtgtttctgttgctcttgcgatcctgtgaggacacatatgagagaaatatttagtttgttgatggcaaatcttgtcttatgttcatgcctgtacctatctgatcaagcgttatgatatgatcccatgcgtggtactgtgttctttagagatg

SEQ ID NO: 216241 - DNA, 4495 bp, Zea Mays
ttatttgattgcgtaggggaaatcgaagcctgtcgcgtaggacagttcggctaggccagagacatgccggcgtgacgaagagttgatgcatatctgatctcgcagcaacgttgaagtagagcgtgctgataacgtgttgagaactacgttaccatggatcaccagatctgctcccttccctcccgtcagcagtagaggcgcaagaagctgtagcgaacacgtctcccttcccataagcacgacagaagaaacacacaagacacaggatataaggttgggcctctggccctttctcttctctgtcttatgagagggtgtacatgttccttatatagagatgtgagatccctcaaaggcaaagcacccacattccctttagttaaaagacgccagggattcgagccctccccgcgtttccgtgagcatgagcatgtccgcgtgtaacacctggcgtaccggacccgaaaattttcttcgaacgagctctgagcagtgtagccctcctgtccgctgttcggtgcccgctgcccacctccctctcctccttccgacctcgccgcctccctccctaaactctaaaccctccaccagccgaagctactgccgcggccgcaacagaggtcgcgacgacgaacgctgaagaagcgccggcgagggagagtcctttactttttcctatgctgtagcaaaacaagcctatatcatcttccaaatatactcgttccgtgccggcggcctcccctcctacgcccctgccgattcttcaatcttcaccaacgtctgcgcgtagcaggctagcagtcggcacgacttcctcagatctgccggacgacttgctgttcgtcaccgactcaccagcaaccaacgtcagccatcagccggcagcaggggaagctgggcggagggtcattgcggcacggcgtccaggcgtacagcaggcaccagcaacagcccatggcaaacgccgcagatgaccctatggcagatgaagccagagtagaagatgccttcacacaggagatcaccgattattcgtacgtccctagataccatgtgttgagttggatggaaactgtggaggggatggtggccggtgtggcggcgcttccgccggtgtatttgatactgaacagaggtgcgattttcttttatatttcttccagttcatgttctccttgtgtggctggtgctggattcaaccgatctagggaagagatgttagttgatttgctgtaaaaatcaatatgttaacagagatatatgatacatgctcctgcttgctcatgatgccggtttggtgccaaggctatcttcttgagacgggatggggatggaagaggctggtgccctacagacctggttatgttgagtggcatgtgttcaagaaataccttggggactatttcgaccataatcgtgaagcttttctttgtgccgagcagaagcctgatccatttggatggattattgctaaaaagagtgccctgattgctgcagccaaattgtgcctcaagatggagaaggcacttctcaggtactgtgctagctttctcactcctgacgacaaaaggttgatcctccggatcaaggaccaggcaaagcaaatgatccaatcagagggtgatcaatctttggttgtaactatatgcttggaggttgtcggtgccgagcgcgcggtcgtcgtgcagctcgtgggaccagtccgccgagcggctgctagaggcggacgcagccctcgtgcggaagaagtgcgccgagaagagcgcgccgaggccgaggacgccgccgggcagcaggtcctccagcgcggcgaggtcttggtcttggtcttggagcagggtcttggtcttggagcactgcacgaggagcacatcggcatggtgcttcaagcaatggttcaaatgggtgtccttgttcctactggagatatgactgttgtcagaagaaccgctcaatttttccttaatagctttcaagagtgcctaacagcacaaaggaaggagagagaaatggcaaccgcagaactgggtttcaaaaagcaattaactaaggaggagaagtttgaaaagaggaagcagagacttgctgcaatcggagaggatcttttggcgattgctgctgatcaaccatttcgcttccctgccacatttacatttgtggtcagagcattctcagttctagatggtactgggaaaggccttgatcctaggtttcatattacagagattgctaagccaaatgccaaggaattgctaagatttaatgacgctggtgttgaaatagttgtgaaggtgtgtggagagacatgtgtattcctcctatgacgaattccttaggctccatgaagtgtatcaatttgtcttagtatttttattcgtggggatgcctgactcaaatgaactcatgttcaacactgagcaacctacttataattttggagcctataaaatttctaagctaaaaaaggtaataaaaaggaatgatattatagtcacatcatctgaacaacagtgaagggaagggagggatagatggtctgaatgcctataaatgtcgttcccttggtctgcttcttaaatttgaaaccaagatactatagtcaaatacttctaaacttgaagcctgtaaattggaatcaccaagttaaataagaacaggggtaactattcatagctcagatggttgtcatccaatacgtgcgctaaggcacagacaggtgaggttgcatattcaatccccaagacagtaaaccattgaggcatattaaaacacattttccatgaggtttcctaagtgatcctttaggtaaacagaaccatacctagctccatatgaaactatttcccgatttgaagtacacctaagttaaggttcatacattggagctctggcagtaaaacaatagtccttaccttgagacagcttagattagaatgaggtggatggtaatatggcatgagcaacataccacagttcatgcatggaggaaatcatttttactttctttcctagccatggtagttgtgttgctccttaccaaggcactacatggagcatcatatggttcatgatgtaaacatggttttagatctgtctatactcacactcaagaaccagccaaaatgtgatattccacaacctgagagaaatcaaaatgaaatcatgtacaacatagtacatatgatgatgtgcggtgatgcgggtgcatgtgtgttgtgtgtgtaggagaggagggcgcagcttgattcaatccatgtcaagtcagaggctgctgcgaggtttgcacatgcaagtagaatttagatgaaaagacgtgaaatggtattttccagtatggactgtataaatgtaattatattcctatgctggtcctgcttcgctttcatgtggatttatcttgcaaatggtatgtggatccgttccagaggcaatgagccttgcagccagtttgcagtataaaaaacccaattatgtccactgttggttcgacgcagcgtgtgccgaggatttctactgccaagcataagaaagtatttgaaatcaagaacttgcattcattcaatcataatgtgtttcctatcaagcataagtgtgaattgcagataaatggtctgttcgcaactggtgctctcgggcgactccatcactgagcaacccttcgccccggtggctgcggtgtcgcactggctgacacctgctcgcagttgcattacaagttttactgactatgtattttcaggtttattcaatttcagttgtaatgcttctgacagcagttgtatcagtcctcttgttcagcttccataataatgtactaaacttcagtttggtgtctatctcagtgtacctacactcagttggaaaacttcaaccacactgcaacaaggtttataaaaggtactgttactattgttaaaattagtcattttagctatccgcttctatttcaccgtgcttgcaggtttgctatgaggaaaaacaaatttatgggctcaaacaaagtgtgatagtgaaagtcattttgcttccagcttaagaaccaagccaagaaaacagatatcaactgtgacgccacactcaaaagcttgtttggtgagagggataaggttgggatgctggagatctctaagcttttgagccgtggcttcccgaaaatctccaagcttttgtggtccatggagccagggatggctctttggtaaaagacttcgttgtggatggcctcttttatggtccatgttaagtcccaagtcccactaggtggttaagcagaaaaatcttgtgatggcattaagactttcagactttgtttttgggtctgatgcatgtaaaaaggattcccagtgtttctgttgctcttgcgatcctgtgaggacacatatgagagaaatatttagtttgttgatggcaaatcttgtcttatgttcatgcctgtacctatctgatcaagcgttatgatatgatcccatgcgtggtactgtgttctttagagatg

SEQ ID NO: 216242 - DNA, 4567 bp, Zea Mays
ttatttgattgcgtaggggaaatcgaagcctgtcgcgtaggacagttcggctaggccagagacatgccggcgtgacgaagagttgatgcatatctgatctcgcagcaacgttgaagtagagcgtgctgataacgtgttgagaactacgttaccatggatcaccagatctgctcccttccctcccgtcagcagtagaggcgcaagaagctgtagcgaacacgtctcccttcccataagcacgacagaagaaacacacaagacacaggatataaggttgggcctctggccctttctcttctctgtcttatgagagggtgtacatgttccttatatagagatgtgagatccctcaaaggcaaagcacccacattccctttagttaaaagacgccagggattcgagccctccccgcgtttccgtgagcatgagcatgtccgcgtgtaacacctggcgtaccggacccgaaaattttcttcgaacgagctctgagcagtgtagccctcctgtccgctgttcggtgcccgctgcccacctccctctcctccttccgacctcgccgcctccctccctaaactctaaaccctccaccagccgaagctactgccgcggccgcaacagaggtcgcgacgacgaacgctgaagaagcgccggcgagggagagtcctttactttttcctatgctgtagcaaaacaagcctatatcatcttccaaatatactcgttccgtgccggcggcctcccctcctacgcccctgccgattcttcaatcttcaccaacgtctgcgcgtagcaggctagcagtcggcacgacttcctcagatctgccggacgacttgctgttcgtcaccgactcaccagcaaccaacgtcagccatcagccggcagcaggggaagctgggcggagggtcattgcggcacggcgtccaggcgtacagcaggcaccagcaacagcccatggcaaacgccgcagatgaccctatggcagatgaagccagagtagaagatgccttcacacaggagatcaccgattattcgtacgtccctagataccatgtgttgagttggatggaaactgtggaggggatggtggccggtgtggcggcgcttccgccggtgtatttgatactgaacagaggtgcgattttcttttatatttcttccagttcatgttctccttgtgtggctggtgctggattcaaccgatctagggaagagatgttagttgatttgctgtaaaaatcaatatgttaacagagatatatgatacatgctcctgcttgctcatgatgccggtttggtgccaaggctatcttcttgagacgggatggggatggaagaggctggtgccctacagacctggttatgttgagtggcatgtgttcaagaaataccttggggactatttcgaccataatcgtgaagcttttctttgtgccgagcagaagcctgatccatttggatggattattgctaaaaagagtgccctgattgctgcagccaaattgtgcctcaagatggagaaggcacttctcaggtactgtgctagctttctcactcctgacgacaaaaggttgatcctccggatcaaggaccaggcaaagcaaatgatccaatcagagggtgatcaatctttggttgtaactatatgcttggaggttgtcggtgccgagcgcgcggtcgtcgtgcagctcgtgggaccagtccgccgagcggctgctagaggcggacgcagccctcgtgcggaagaagtgcgccgagaagagcgcgccgaggccgaggacgccgccgggcagcaggtcctccagcgcggcgaggtcttggtcttggtcttggagcagggtcttggtcttggagcactgcacgaggagcacatcggcatggtgcttcaagcaatggttcaaatgggtgtccttgttcctactggagatatgactgttgtcagaagaaccgctcaatttttccttaatagctttcaagagtgcctaacagcacaaaggaaggagagagaaatggcaaccgcagaactgggtttcaaaaagcaattaactaaggaggagaagtttgaaaagaggaagcagagacttgctgcaatcggagaggatcttttggcgattgctgctgatcaaccatttcgcttccctgccacatttacatttgtggtcagagcattctcagatggtactgggaaaggccttgatcctaggtttcatattacagagattgctaagccaaatgccaaggaattgctaagatttaatgacgctggtgttgaaatagttgtgaaggcaagtttcaacatttggtcaaagctgttaacctatctctatgatagcacatctcctaagggttagggcttgtttggctaggagcggattgaaggggattggaggagcctattaagcattgaacaatttacccatgcttgtttcctattctttggtcgtgataacgtttgcaaccatgaatagtacatattgcttttccaggtgtgtggagagacatgtgtattcctcctatgacgaattccttaggctccatgaagtgtatcaatttgtcttagtatttttattcgtggggatgcctgactcaaatgaactcatgttcaacactgagcaacctacttataattttggagcctataaaatttctaagctaaaaaaggtaataaaaaggaatgatattatagtcacatcatctgaacaacagtgaagggaagggagggatagatggtctgaatgcctataaatgtcgttcccttggtctgcttcttaaatttgaaaccaagatactatagtcaaatacttctaaacttgaagcctgtaaattggaatcaccaagttaaataagaacaggggtaactattcatagctcagatggttgtcatccaatacgtgcgctaaggcacagacaggtgaggttgcatattcaatccccaagacagtaaaccattgaggcatattaaaacacattttccatgaggtttcctaagtgatcctttaggtaaacagaaccatacctagctccatatgaaactatttcccgatttgaagtacacctaagttaaggttcatacattggagctctggcagtaaaacaatagtccttaccttgagacagcttagattagaatgaggtggatggtaatatggcatgagcaacataccacagttcatgcatggaggaaatcatttttactttctttcctagccatggtagttgtgttgctccttaccaaggcactacatggagcatcatatggttcatgatgtaaacatggttttagatctgtctatactcacactcaagaaccagccaaaatgtgatattccacaacctgagagaaatcaaaatgaaatcatgtacaacatagtacatatgatgatgtgcggtgatgcgggtgcatgtgtgttgtgtgtgtaggagaggagggcgcagcttgattcaatccatgtcaagtcagaggctgctgcgaggtttgcacatgcaagtagaatttagatggtcctgcttcgctttcatgtggatttatcttgcaaatggtatgtggatccgttccagaggcaatgagccttgcagccagtttgcagtataaaaaacccaattatgtccactgttggttcgacgcagcgtgtgccgaggatttctactgccaagcataagaaagtgaattgcagataaatggtctgttcgcaactggtgctctcgggcgactccatcactgagcaacccttcgccccggtggctgcggtgtcgcactggctgacacctgctcgcagttgcattacaagttttactgactatgtattttcaggtttattcaatttcagttgtaatgcttctgacagcagttgtatcagtcctcttgttcagcttccataataatgtactaaacttcagtttggtgtctatctcagtgtacctacactcagttggaaaacttcaaccacactgcaacaaggtttataaaaggtactgttactattgttaaaattagtcattttagctatccgcttctatttcaccgtgcttgcaggtttgctatgaggaaaaacaaatttatgggctcaaacaaagtgtgatagtgaaagtcattttgcttccagcttaagaaccaagccaagaaaacagatatcaactgtgacgccacactcaaaagcttgtttggtgagagggataaggttgggatgctggagatctctaagcttttgagccgtggcttcccgaaaatctccaagcttttgtggtccatggagccagggatggctctttggtaaaagacttcgttgtggatggcctcttttatggtccatgttaagtcccaagtcccactaggtggttaagcagaaaaatcttgtgatggcattaagactttcagactttgtttttgggtctgatgcatgtaaaaaggattcccagtgtttctgttgctcttgcgatcctgtgaggacacatatgagagaaatatttagtttgttgatggcaaatcttgtcttatgttcatgcctgtacctatctgatcaagcgttatgatatgatcccatgcgtggtactgtgttctttagagatg

SEQ ID NO: 216243 - DNA, 3872 bp, Zea Mays
catattgcaatttaaatggtagcagtagatcattaatctagtatcaatcaaaatattcgggaaggattgcttgaagtattctatggagtttatgaaaaggatcctgacaaagtgcttcaagcaatggttcaaatgggtgtccttgttcctactggagatatgactgttgtcagaagaaccgctcaatttttccttaatagctttcaagagtgcctaacagcacaaaggaaggagagagaaatggcaaccgcagaactgggtttcaaaaagcaattaactaaggaggagaagtttgaaaagaggaagcagagacttgctgcaatcggagaggatcttttggcgattgctgctgatcaaccatttcgcttccctgccacatttacatttgtggtcagagcattctcagatggtactgggaaaggccttgatcctaggtttcatattacagagattgctaagccaaatgccaaggaattgctaagatttaatgacgctggtgttgaaatagttgtgaaggcaagtttcaacatttggtgtgtggagagacatgtgtattcctcctatgacgaattccttaggctccatgaagtgtatcaatttgtcttagtatttttattcgtggggatgcctgactcaaatgaactcatgttcaacactgagcaacctacttataattttggagcctataaaatttctaagctaaaaaaggtaataaaaaggaatgatattatagtcacatcatctgaacaacagtgaagggaagggagggatagatggtctgaatgcctataaatgtcgttcccttggtctgcttcttaaatttgaaaccaagatactatagtcaaatacttctaaacttgaagcctgtaaattggaatcaccaagttaaataagaacaggggtaactattcatagctcagatggttgtcatccaatacgtgcgctaaggcacagacaggtgaggttgcatattcaatccccaagacagtaaaccattgaggcatattaaaacacattttccatgaggtttcctaagtgatcctttaggtaaacagaaccatacctagctccatatgaaactatttcccgatttgaagtacacctaagttaaggttcatacattggagctctggcagtaaaacaatagtccttaccttgagacagcttagattagaatgaggtggatggtaatatggcatgagcaacataccacagttcatgcatggaggaaatcatttttactttctttcctagccatggtagttgtgttgctccttaccaaggcactacatggagcatcatatggttcatgatgtaaacatggttttagatctgtctatactcacactcaagaaccagccaaaatgtgatattccacaacctgagagaaatcaaaatgaaatcatgtacaacatagtacatatgatgatgtgcggtgatgcgggtgcatgtgtgttgtgtgtgtaggagaggagggcgcagcttgattcaatccatgtcaagtcagaggctgctgcgaggtttgcacatgcaagtagaatttagatgaaaagacgtgaaatggtattttccagtatggactgtataaatgtaattatattcctatgctggtacgtctgtctaaccttgctattacacttctattatggctttgtgtttacccaaagttccaaacctttcaggtcctgcttcgctttcatgtggatttatcttgcaaatggtatgtggatccgttccagaggcaatgagccttgcagccagtttgcagtataaaaaacccaattatgtccactgttggttcgacgcagcgtgtgccgaggatttctactgccaagcataagaaagtatttgaaatcaagaacttgcattcattcaatcataatgtgtttcctatcaagcataagtgtgtgtgttttgtttgatatctgctttaataggagattgttcttgtcaccccaaaaatgttcccattctactttcgggcaggtgaattgcagataaatggtctgttcgcaactggtgctctcgggcgactccatcactgagcaacccttcgccccggtggctgcggtgtcgcactggctgacacctgctcgcagttgcattacaagttttactgactatgtattttcaggtttattcaatttcagttgtaatgcttctgacagcagttgtatcagtcctcttgttcagcttccattgtacctacactcagttggaaaacttcaaccacactgcaacaaggtttataaaaggtttgctatgaggaaaaacaaatttatgggctcaaacaaagtgtgatagtgaaagtcattttgcttccagcttaagaaccaagccaagaaaacagatatcaactgtgacgccacactcaaaagcttgtttggtgagagggataaggttgggatgctggagatctctaagcttttgagccgtggcttcccgaaaatctccaagcttttgtggtccatggagccagggatggctctttggtaaaagacttcgttgtggatggcctcttttatggtccatgttaagtcccaagtcccactaggtggtgtcatgtttgctaaattctcaccaaggcgaagccacggtaaccgccaccgtcatggtgcccccgacggccactgcgatgcccgtcttcctctccgcggcgccccctcctttttccacccgccgtcggcgcagccgccttcctgccatttccgcatccctttcgccgtccccttcctcttcggaggagccgctgctggtgcgcgcggcgcggggcgaggacggcctcccacgcccacccgcgtggatgatgcgacaggcagggcggtacatggcggagtaccaggcgctggccaagcgccacccctcgttccgggagcgctccgagaacacggacctcatcgtcgagatcacgctgcagccgtggcgtgccttcgcgcctgacggcgtcatcctgttctcagacatactcacgcccctaccggccatcggggtaccgttcgatatctcggactccaaggggcccgtgatccaatcgccagtgcggtccgaagggcaggtgagggagctcgtccccatcgaccttgatatgctccagttcgtcggagagtcactaaagattctgcgaaatgagattgatggaaaagctgctttgctaggatttgtgggggccccatggacaattgcaacttacattgttgaaggggggatgaccaacacatacacaaatataaagaacatgtgccatacagctcccgatgtcttgaggtgtcttctatctcatcttgcagaagcgatatctgactatatcatttaccaagttaactccggggcccagtgtatacagatatttgattcatggggtggacaacttccacctcatgtgtgggagcagtggtcaaaaccatatatcaaaaagattgtgaataggattaagaaagagtgccctcatgtaccccttgtgttgtatataaatggaaatggaggtttacttgagcgcatgaaggacacaagagttgatgttattgggcttgactggacagtggacatggctgatggaaggaagcgccttggtaatggaattagtgtacaagggaatgtggatccagcatttctgttctcaccattaccagtactgactgatgaaattcgtaggttagttaagactaaaaaattcatttaatttatgttattttgagtttttggttaatgctcatgtgcaattcattaatgagataacataaaacgctgcctgagtagtatacatcttcatgttgggtatgattggttgcctgcactatgataaacctgcattacactctatgcagtgtaacccctgtatgacttcattgcaatgaggtgtgtttagttgcttg

SEQ ID NO: 216244 - DNA, 3188 bp, Zea Mays
tctagtatcaatcaaaatattcgggaaggattgcttgaagtattctatggagtttatgaaaaggatcctgacaaagtgcttcaagcaatggttcaaatgggtgtccttgttcctactggagatatgactgttgtcagaagaaccgctcaatttttccttaatagctttcaagagtgcctaacagcacaaaggaaggagagagaaatggcaaccgcagaactgggtttcaaaaagcaattaactaaggaggagaagtttgaaaagaggaagcagagacttgctgcaatcggagaggatcttttggcgattgctgctgatcaaccatttcgcttccctgccacatttacatttgtggtcagagcattctcagatggtactgggaaaggccttgatcctaggtttcatattacagagattgctaagccaaatgccaaggaattgctaagatttaatgacgctggtgttgaaatagttgtgaaggagcggattgaaggggattggaggagcctattaagcattgaacaatttacccatgcttgtttcctattctttggtcgtgataacgtttgcaaccatgaatagtacatattgcttttccaggtgtgtggagagacatgtgtattcctcctatgacgaattccttaggctccatgaaggtaagcctgtcttaatgggcttgattgttgaacctgacttagtacttttatccatgtcacggcattgaactagacagtcactcatgtccttaggatattaacggtatacatcaacaattcattctattttaattgcttgcaaaacttttttggcccttcaaatgagttccacgcatcaagaagtcaagattccaggaggcctaaaataggtaaacttgctgttatatcttttgtgctctcagtagtcgcctattacttgttttaattcgctgatccatgtgcagtgtatcaatttgtcttagtatttttattcgtggggatgcctgactcaaatgaactcatgttcaacactgagcaacctacttataattttggagcctataaaatttctaagctaaaaaaggtaataaaaaggaatgatattatagtcacatcatctgaacaacagtgaagggaagggagggatagatggtctgaatgcctataaatgtcgttcccttggtctgcttcttaaatttgaaaccaagatactatagtcaaatacttctaaacttgaagcctgtaaattggaatcaccaagttaaataagaacaggggtaactattcatagctcagatggttgtcatccaatacgtgcgctaaggcacagacaggtgaggttgcatattcaatccccaagacagtaaaccattgaggcatattaaaacacattttccatgaggtttcctaagtgatcctttaggtaaacagaaccatacctagctccatatgaaactatttcccgatttgaagtacacctaagttaaggttcatacattggagctctggcagtaaaacaatagtccttaccttgagacagcttagattagaatgaggtggatggtaatatggcatgagcaacataccacagttcatgcatggaggaaatcatttttactttctttcctagccatggtagttgtgttgctccttaccaaggcactacatggagcatcatatggttcatgatgtaaacatggttttagatctgtctatactcacactcaagaaccagccaaaatgtgatattccacaacctgagagaaatcaaaatgaaatcatgtacaacatagtacatatgatgatgtgcggtgatgcgggtgcatgtgtgttgtgtgtgtaggagaggagggcgcagcttgattcaatccatgtcaagtcagaggctgctgcgaggtttgcacatgcaagtagaatttagatgatctctgttaggcatctaactgaataaatgatctccattatggactggttatattattttctgtgcgatcggatgggttaaagaaaagacgtgaaatggtattttccagtatggactgtataaatgtaattatattcctatgctggtcctgcttcgctttcatgtggatttatcttgcaaatggtatgtggatccgttccagaggcaatgagccttgcagccagtttgcagtataaaaaacccaattatgtccactgttggttcgacgcagcgtgtgccgaggatttctactgccaagcataagaaagagattgttcttgtcaccccaaaaatgttcccattctactttcgggcaggtgaattgcagataaatggtctgttcgcaactggtgctctcgggcgactccatcactgagcaacccttcgccccggtggctgcggtgtcgcactggctgacacctgctcgcagttgcattacaagttttactgactatgtattttcaggtttattcaatttcagttgtaatgcttctgacagcagttgtatcagtcctcttgttcagcttccatgtatccctcgcatccttccttggatccacataagtgttaatgataattttgttgcatctcctctgctgatcagagctttcaaactcatgacagaataatgtactaaacttcagtttggtgtctatctcagtgtacctacactcagttggaaaacttcaaccacactgcaacaaggtttataaaaggtttgctatgaggaaaaacaaatttatgggctcaaacaaagtgtgatagtgaaagtcattttgcttccagcttaagaaccaagccaagaaaacagatatcaactgtgacgccacactcaaaagcttgtttggtgagagggataaggttgggatgctggagatctctaagcttttgagccgtggcttcccgaaaatctccaagcttttgtggtccatggagccagggatggctctttggtaaaagacttcgttgtggatggcctcttttatggtccatgttaagtcccaagtcccactaggtggttaagcagaaaaatcttgtgatggcattaagactttcagactttgtttttgggtctgatgcatgtaaaaaggattcccagtgtttctgttgctcttgcgatcctgtgaggacacatatgagagaaatatttagtttgttgatggcaaatcttgtcttatgttcatgcctgtacctatctgatcaagcgttatgatatgatcccatgcgtggtactgtgttctttagagatg

SEQ ID NO: 216245 - DNA, 2561 bp, Zea Mays
tctagtatcaatcaaaatattcgggaaggattgcttgaagtattctatggagtttatgaaaaggatcctgacaaagtgcttcaagcaatggttcaaatgggtgtccttgttcctactggagatatgactgttgtcagaagaaccgctcaatttttccttaatagctttcaagagtgcctaacagcacaaaggaaggagagagaaatggcaaccgcagaactgggtttcaaaaagcaattaactaaggaggagaagtttgaaaagaggaagcagagacttgctgcaatcggagaggatcttttggcgattgctgctgatcaaccatttcgcttccctgccacatttacatttgtggtcagagcattctcagatggtactgggaaaggccttgatcctaggtttcatattacagagattgctaagccaaatgccaaggaattgctaagatttaatgacgctggtgttgaaatagttgtgaaggtgtgtggagagacatgtgtattcctcctatgacgaattccttaggctccatgaagtgtatcaatttgtcttagtatttttattcgtggggatgcctgactcaaatgaactcatgttcaacactgagcaacctacttataattttggagcctataaaatttctaagctaaaaaaggtaataaaaaggaatgatattatagtcacatcatctgaacaacagtgaagggaagggagggatagatggtctgaatgcctataaatgtcgttcccttggtctgcttcttaaatttgaaaccaagatactatagtcaaatacttctaaacttgaagcctgtaaattggaatcaccaagttaaataagaacaggggtaactattcatagctcagatggttgtcatccaatacgtgcgctaaggcacagacaggtgaggttgcatattcaatccccaagacagtaaaccattgaggcatattaaaacacattttccatgaggtttcctaagtgatcctttaggtaaacagaaccatacctagctccatatgaaactatttcccgatttgaagtacacctaagttaaggttcatacattggagctctggcagtaaaacaatagtccttaccttgagacagcttagattagaatgaggtggatggtaatatggcatgagcaacataccacagttcatgcatggaggaaatcatttttactttctttcctagccatggtagttgtgttgctccttaccaaggcactacatggagcatcatatggttcatgatgtaaacatggttttagatctgtctatactcacactcaagaaccagccaaaatgtgatattccacaacctgagagaaatcaaaatgaaatcatgtacaacatagtacatatgatgatgtgcggtgatgcgggtgcatgtgtgttgtgtgtgtaggagaggagggcgcagcttgattcaatccatgtcaagtcagaggctgctgcgaggtttgcacatgcaagtagaatttagatggtcctgcttcgctttcatgtggatttatcttgcaaatggtatgtggatccgttccagaggcaatgagccttgcagccagtttgcagtataaaaaacccaattatgtccactgttggttcgacgcagcgtgtgccgaggatttctactgccaagcataagaaagtgaattgcagataaatggtctgttcgcaactggtgctctcgggcgactccatcactgagcaacccttcgccccggtggctgcggtgtcgcactggctgacacctgctcgcagttgcattacaagttttactgactatgtattttcaggtttattcaatttcagttgtaatgcttctgacagcagttgtatcagtcctcttgttcagcttccataataatgtactaaacttcagtttggtgtctatctcagtgtacctacactcagttggaaaacttcaaccacactgcaacaaggtttataaaaggtactgttactattgttaaaattagtcattttagctatccgcttctatttcaccgtgcttgcaggtttgctatgaggaaaaacaaatttatgggctcaaacaaagtgtgatagtgaaagtcattttgcttccagcttaagaaccaagccaagaaaacagatatcaactgtgacgccacactcaaaagcttgtttggtgagagggataaggttgggatgctggagatctctaagcttttgagccgtggcttcccgaaaatctccaagcttttgtggtccatggagccagggatggctctttggtaaaagacttcgttgtggatggcctcttttatggtccatgttaagtcccaagtcccactaggtggttaagcagaaaaatcttgtgatggcattaagactttcagactttgtttttgggtctgatgcatgtaaaaaggattcccagtgtttctgttgctcttgcgatcctgtgaggacacatatgagagaaatatttagtttgttgatggcaaatcttgtcttatgttcatgcctgtacctatctgatcaagcgttatgatatgatcccatgcgtggtactgtgttctttagagatg

SEQ ID NO: 216246 - DNA, 3102 bp, Zea Mays
tctagtatcaatcaaaatattcgggaaggattgcttgaagtattctatggagtttatgaaaaggatcctgacaaagtgcttcaagcaatggttcaaatgggtgtccttgttcctactggagatatgactgttgtcagaagaaccgctcaatttttccttaatagctttcaagagtgcctaacagcacaaaggaaggagagagaaatggcaaccgcagaactgggtttcaaaaagcaattaactaaggaggagaagtttgaaaagaggaagcagagacttgctgcaatcggagaggatcttttggcgattgctgctgatcaaccatttcgcttccctgccacatttacatttgtggtcagagcattctcagatggtactgggaaaggccttgatcctaggtttcatattacagagattgctaagccaaatgccaaggaattgctaagatttaatgacgctggtgttgaaatagttgtgaagcggattgaaggggattggaggagcctattaagcattgaacaatttacccatgcttgtttcctattctttggtcgtgataacgtttgcaaccatgaatagtacatattgcttttccaggtgtgtggagagacatgtgtattcctcctatgacgaattccttaggctccatgaaggtaagcctgtcttaatgggcttgattgttgaacctgacttagtacttttatccatgtcacggcattgaactagacagtcactcatgtccttaggatattaacggtatacatcaacaattcattctattttaattgcttgcaaaacttttttggcccttcaaatgagttccacgcatcaagaagtcaagattccaggaggcctaaaataggtaaacttgctgttatatcttttgtgctctcagtagtcgcctattacttgttttaattcgctgatccatgtgcagtgtatcaatttgtcttagtatttttattcgtggggatgcctgactcaaatgaactcatgttcaacactgagcaacctacttataattttggagcctataaaatttctaagctaaaaaaggtaataaaaaggaatgatattatagtcacatcatctgaacaacagtgaagggaagggagggatagatggtctgaatgcctataaatgtcgttcccttggtctgcttcttaaatttgaaaccaagatactatagtcaaatacttctaaacttgaagcctgtaaattggaatcaccaagttaaataagaacaggggtaactattcatagctcagatggttgtcatccaatacgtgcgctaaggcacagacaggtgaggttgcatattcaatccccaagacagtaaaccattgaggcatattaaaacacattttccatgaggtttcctaagtgatcctttaggtaaacagaaccatacctagctccatatgaaactatttcccgatttgaagtacacctaagttaaggttcatacattggagctctggcagtaaaacaatagtccttaccttgagacagcttagattagaatgaggtggatggtaatatggcatgagcaacataccacagttcatgcatggaggaaatcatttttactttctttcctagccatggtagttgtgttgctccttaccaaggcactacatggagcatcatatggttcatgatgtaaacatggttttagatctgtctatactcacactcaagaaccagccaaaatgtgatattccacaacctgagagaaatcaaaatgaaatcatgtacaacatagtacatatgatgatgtgcggtgatgcgggtgcatgtgtgttgtgtgtgtaggagaggagggcgcagcttgattcaatccatgtcaagtcagaggctgctgcgaggtttgcacatgcaagtagaatttagatgaaaagacgtgaaatggtattttccagtatggactgtataaatgtaattatattcctatgctggtcctgcttcgctttcatgtggatttatcttgcaaatggtatgtggatccgttccagaggcaatgagccttgcagccagtttgcagtataaaaaacccaattatgtccactgttggttcgacgcagcgtgtgccgaggatttctactgccaagcataagaaagtatttgaaatcaagaacttgcattcattcaatcataatgtgtttcctatcaagcataagtgtgtgtgttttgtttgatatctgctttaataggagattgttcttgtcaccccaaaaatgttcccattctactttcgggcaggtgaattgcagataaatggtctgttcgcaactggtgctctcgggcgactccatcactgagcaacccttcgccccggtggctgcggtgtcgcactggctgacacctgctcgcagttgcattacaagttttactgactatgtattttcaggtttattcaatttcagttgtaatgcttctgacagcagttgtatcagtcctcttgttcagcttccataataatgtactaaacttcagtttggtgtctatctcagtgtacctacactcagttggaaaacttcaaccacactgcaacaaggtttataaaaggtttgctatgaggaaaaacaaatttatgggctcaaacaaagtgtgatagtgaaagtcattttgcttccagcttaagaaccaagccaagaaaacagatatcaactgtgacgccacactcaaaagcttgtttggtgagagggataaggttgggatgctggagatctctaagcttttgagccgtggcttcccgaaaatctccaagcttttgtggtccatggagccagggatggctctttggtaaaagacttcgttgtggatggcctcttttatggtccatgttaagtcccaagtcccactaggtggttaagcagaaaaatcttgtgatggcattaagactttcagactttgtttttgggtctgatgcatgtaaaaaggattcccagtgtttctgttgctcttgcgatcctgtgaggacacatatgagagaaatatttagtttgttgatggcaaatcttgtcttatgttcatgcctgtacctatctgatcaagcgttatgatatgatcccatgcgtggtactgtgttctttagagatg

SEQ ID NO: 216247 - DNA, 2192 bp, Zea Mays
tctagtatcaatcaaaatattcgggaaggattgcttgaagtattctatggagtttatgaaaaggatcctgacaaagtgcttcaagcaatggttcaaatgggtgtccttgttcctactggagatatgactgttgtcagaagaaccgctcaatttttccttaatagctttcaagagtgcctaacagcacaaaggaaggagagagaaatggcaaccgcagaactgggtttcaaaaagcaattaactaaggaggagaagtttgaaaagaggaagcagagacttgctgcaatcggagaggatcttttggcgattgctgctgatcaaccatttcgcttccctgccacatttacatttgtggtcagagcattctcagttctagatggtactgggaaaggccttgatcctaggtttcatattacagagattgctaagccaaatgccaaggaattgctaagatttaatgacgctggtgttgaaatagttgtgaaggcaagtttcaacatttggtcaaagctgttaacctatctctatgatagcacatctcctaagggttagggcttgtttggctaggagcggattgaaggggattggaggagcctattaagcattgaacaatttacccatgcttgtttcctattctttggtcgtgataacgtttgcaaccatgaatagtacatattgcttttccaggtgtgtggagagacatgtgtattcctcctatgacgaattccttaggctccatgaaggtaagcctgtcttaatgggcttgattgttgaacctgacttagtacttttatccatgtcacggcattgaactagacagtcactcatgtccttaggatattaacggtatacatcaacaattcattctattttaattgcttgcaaaacttttttggcccttcaaatgagttccacgcatcaagaagtcaagattccaggaggcctaaaataggagaggagggcgcagcttgattcaatccatgtcaagtcagaggctgctgcgaggtttgcacatgcaagtagaatttagatggtcctgcttcgctttcatgtggatttatcttgcaaatggtatgtggatccgttccagaggcaatgagccttgcagccagtttgcagtataaaaaacccaattatgtccactgttggttcgacgcagcgtgtgccgaggatttctactgccaagcataagaaagtgaattgcagataaatggtctgttcgcaactggtgctctcgggcgactccatcactgagcaacccttcgccccggtggctgcggtgtcgcactggctgacacctgctcgcagttgcattacaagttttactgactatgtattttcaggtttattcaatttcagttgtaatgcttctgacagcagttgtatcagtcctcttgttcagcttccatgtatccctcgcatccttccttggatccacataagtgttaatgataattttgttgcatctcctctgctgatcagagctttcaaactcatgacagaataatgtactaaacttcagtttggtgtctatctcagtgtacctacactcagttggaaaacttcaaccacactgcaacaaggtttataaaaggtactgttactattgttaaaattagtcattttagctatccgcttctatttcaccgtgcttgcaggtttgctatgaggaaaaacaaatttatgggctcaaacaaagtgtgatagtgaaagtcattttgcttccagcttaagaaccaagccaagaaaacagatatcaactgtgacgccacactcaaaagcttgtttggtgagagggataaggttgggatgctggagatctctaagcttttgagccgtggcttcccgaaaatctccaagcttttgtggtccatggagccagggatggctctttggtaaaagacttcgttgtggatggcctcttttatggtccatgttaagtcccaagtcccactaggtggttaagcagaaaaatcttgtgatggcattaagactttcagactttgtttttgggtctgatgcatgtaaaaaggattcccagtgtttctgttgctcttgcgatcctgtgaggacacatatgagagaaatatttagtttgttgatggcaaatcttgtcttatgttcatgcctgtacctatctgatcaagcgttatgatatgatcccatgcgtggtactgtgttctttagagatg

SEQ ID NO: 216248 - DNA, 2865 bp, Zea Mays
tctagtatcaatcaaaatattcgggaaggattgcttgaagtattctatggagtttatgaaaaggatcctgacaaagtgcttcaagcaatggttcaaatgggtgtccttgttcctactggagatatgactgttgtcagaagaaccgctcaatttttccttaatagctttcaagagtgcctaacagcacaaaggaaggagagagaaatggcaaccgcagaactgggtttcaaaaagcaattaactaaggaggagaagtttgaaaagaggaagcagagacttgctgcaatcggagaggatcttttggcgattgctgctgatcaaccatttcgcttccctgccacatttacatttgtggtcagagcattctcagatggtactgggaaaggccttgatcctaggtttcatattacagagattgctaagccaaatgccaaggaattgctaagatttaatgacgctggtgttgaaatagttgtgaaggtgtgtggagagacatgtgtattcctcctatgacgaattccttaggctccatgaaggtaagcctgtcttaatgggcttgattgttgaacctgacttagtacttttatccatgtcacggcattgaactagacagtcactcatgtccttaggatattaacggtatacatcaacaattcattctattttaattgcttgcaaaacttttttggcccttcaaatgagttccacgcatcaagaagtcaagattccaggaggcctaaaataggtaaacttgctgttatatcttttgtgctctcagtagtcgcctattacttgttttaattcgctgatccatgtgcagtgtatcaatttgtcttagtatttttattcgtggggatgcctgactcaaatgaactcatgttcaacactgagcaacctacttataattttggagcctataaaatttctaagctaaaaaaggtaataaaaaggaatgatattatagtcacatcatctgaacaacagtgaagggaagggagggatagatggtctgaatgcctataaatgtcgttcccttggtctgcttcttaaatttgaaaccaagatactatagtcaaatacttctaaacttgaagcctgtaaattggaatcaccaagttaaataagaacaggggtaactattcatagctcagatggttgtcatccaatacgtgcgctaaggcacagacaggtgaggttgcatattcaatccccaagacagtaaaccattgaggcatattaaaacacattttccatgaggtttcctaagtgatcctttaggtaaacagaaccatacctagctccatatgaaactatttcccgatttgaagtacacctaagttaaggttcatacattggagctctggcagtaaaacaatagtccttaccttgagacagcttagattagaatgaggtggatggtaatatggcatgagcaacataccacagttcatgcatggaggaaatcatttttactttctttcctagccatggtagttgtgttgctccttaccaaggcactacatggagcatcatatggttcatgatgtaaacatggttttagatctgtctatactcacactcaagaaccagccaaaatgtgatattccacaacctgagagaaatcaaaatgaaatcatgtacaacatagtacatatgatgatgtgcggtgatgcgggtgcatgtgtgttgtgtgtgtaggagaggagggcgcagcttgattcaatccatgtcaagtcagaggctgctgcgaggtttgcacatgcaagtagaatttagatgacgtgaaatggtattttccagtatggactgtataaatgtaattatattcctatgctggtcctgcttcgctttcatgtggatttatcttgcaaatggtatgtggatccgttccagaggcaatgagccttgcagccagtttgcagtataaaaaacccaattatgtccactgttggttcgacgcagcgtgtgccgaggatttctactgccaagcataagaaagtgaattgcagataaatggtctgttcgcaactggtgctctcgggcgactccatcactgagcaacccttcgccccggtggctgcggtgtcgcactggctgacacctgctcgcagttgcattacaagttttactgactatgtattttcaggtttattcaatttcagttgtaatgcttctgacagcagttgtatcagtcctcttgttcagcttccattgtacctacactcagttggaaaacttcaaccacactgcaacaaggtttataaaaggtactgttactattgttaaaattagtcattttagctatccgcttctatttcaccgtgcttgcaggtttgctatgaggaaaaacaaatttatgggctcaaacaaagtgtgatagtgaaagtcattttgcttccagcttaagaaccaagccaagaaaacagatatcaactgtgacgccacactcaaaagcttgtttggtgagagggataaggttgggatgctggagatctctaagcttttgagccgtggcttcccgaaaatctccaagcttttgtggtccatggagccagggatggctctttggtaaaagacttcgttgtggatggcctcttttatggtccatgttaagtcccaagtcccactaggtggttaagcagaaaaatcttgtgatggcattaagactttcagactttgtttttgggtctgatgcatgtaaaaaggattcccagtgtttctgttgctcttgcgatcctgtgaggacacatatgagagaaatatttagtttgttgatggcaaatcttgtcttatgttcatgcctgtacctatctgatcaagcgttatgatatgatcccatgcgtggtactgtgttctttagagatg

SEQ ID NO: 216249 - DNA, 2250 bp, Zea Mays
tctagtatcaatcaaaatattcgggaaggattgcttgaagtattctatggagtttatgaaaaggatcctgacaaagtgcttcaagcaatggttcaaatgggtgtccttgttcctactggagatatgactgttgtcagaagaaccgctcaatttttccttaatagctttcaagagtgcctaacagcacaaaggaaggagagagaaatggcaaccgcagaactgggtttcaaaaagcaattaactaaggaggagaagtttgaaaagaggaagcagagacttgctgcaatcggagaggatcttttggcgattgctgctgatcaaccatttcgcttccctgccacatttacatttgtggtcagagcattctcagatggtactgggaaaggccttgatcctaggtttcatattacagagattgctaagccaaatgccaaggaattgctaagatttaatgacgctggtgttgaaatagttgtgaaggcaagtttcaacatttggtcaaagctgttaacctatctctatgatagcacatctcctaagggttagggcttgtttggctaggagcggattgaaggggattggaggagcctattaagcattgaacaatttacccatgcttgtttcctattctttggtcgtgataacgtttgcaaccatgaatagtacatattgcttttccaggtgtgtggagagacatgtgtattcctcctatgacgaattccttaggctccatgaaggtaagcctgtcttaatgggcttgattgttgaacctgacttagtacttttatccatgtcacggcattgaactagacagtcactcatgtccttaggatattaacggtatacatcaacaattcattctattttaattgcttgcaaaacttttttggcccttcaaatgagttccacgcatcaagaagtcaagattccaggaggcctaaaataggagaggagggcgcagcttgattcaatccatgtcaagtcagaggctgctgcgaggtttgcacatgcaagtagaatttagatgatctctgttaggcatctaactgaataaatgatctccattatggactggttatattattttctgtgcgatcggatgggttaaagaaaagacgtgaaatggtattttccagtatggactgtataaatgtaattatattcctatgctggtcctgcttcgctttcatgtggatttatcttgcaaatggtatgtggatccgttccagaggcaatgagccttgcagccagtttgcagtataaaaaacccaattatgtccactgttggttcgacgcagcgtgtgccgaggatttctactgccaagcataagaaagagattgttcttgtcaccccaaaaatgttcccattctactttcgggcaggtgaattgcagataaatggtctgttcgcaactggtgctctcgggcgactccatcactgagcaacccttcgccccggtggctgcggtgtcgcactggctgacacctgctcgcagttgcattacaagttttactgactatgtattttcaggtttattcaatttcagttgtaatgcttctgacagcagttgtatcagtcctcttgttcagcttccattgtacctacactcagttggaaaacttcaaccacactgcaacaaggtttataaaaggtactgttactattgttaaaattagtcattttagctatccgcttctatttcaccgtgcttgcaggtttgctatgaggaaaaacaaatttatgggctcaaacaaagtgtgatagtgaaagtcattttgcttccagcttaagaaccaagccaagaaaacagatatcaactgtgacgccacactcaaaagcttgtttggtgagagggataaggttgggatgctggagatctctaagcttttgagccgtggcttcccgaaaatctccaagcttttgtggtccatggagccagggatggctctttggtaaaagacttcgttgtggatggcctcttttatggtccatgttaagtcccaagtcccactaggtggttaagcagaaaaatcttgtgatggcattaagactttcagactttgtttttgggtctgatgcatgtaaaaaggattcccagtgtttctgttgctcttgcgatcctgtgaggacacatatgagagaaatatttagtttgttgatggcaaatcttgtcttatgttcatgcctgtacctatctgatcaagcgttatgatatgatcccatgcgtggtactgtgttctttagagatg

SEQ ID NO: 216250 - DNA, 2064 bp, Zea Mays
caagccgagaaaccaaccaccgcctgccacccacgaggccacgaccacgagcagcaaccgccgcctgccagcagttctgcttcctcttccttccctctctctgccccagaggccagacacagcgtccccgaaatctagccagccaccgcccaccgcctccctcctccccgcctctctctctttctctctctgcgccaagaaagagaaggcgccacgttgacattgcggatgccgtagcgggggcgcgcgcgccagccatgcgctcgtgatgatccggccgttccagaagatcggccacggcctcgaaaaggttctcgtccaggcgccggaggtcgtcgtcgccgccgtcgttggcctcggacggcacgggcgcctgcctcctcgatggacgcgcaggcgcagcctttcaccaggcgggcgctgtccaggagctgcgggtccaaggggagccggctgtccgttgaccatccgccgccgccgctggccggcggcccttcggcggacaagggggtggcagggagctcgtcctcgctcgcggtgccgcccgagccggcccgtcgtgagggcccgccctcagacgcggagaaggtgagggagaagttctccaagctactgctgggggaggacatgtccggcaccggcaaaggggtgacctctgctctcgccctttccaacgccatcactaatcttgcagcgccgtctgcagcccatggccgacgaccagaaatcgcggtggaagaaggaggtcgactggcttttgtccgtcgccgaccacattgttgaatttgttccttcgcagcaggtcgccgagaatgggacctccgtggagataatgataacccagcaacgtcaagatctacagatgaacatccccgcgctgcgcaagctcgatgcgatgctccttgaatacctcgacagtttcgcgggtaagcaggagttctggtatgcgtcgaaagacgcagatggaccgggcaagggcagcacgccgaggcaggacgacaaatggtggctcccgactgtcagggtccctcctgacggtctgtcaggtgcatacagtaaatggcttcagaaccagaaggacctcgttgcgcaggtgctcaaggcagcaatggctatcaacgctaatgtccttatggagatggaggttcctgaatcgtacacggagtcgctaccgaagaatgggaagtccacccttggggattcagtgtacagacttataaccgacgatcatttcgaccctgaagaactgctacgctccgtggactcgtcggatgaacacagcattgttgatctgaagaacaggatcgaagcctcagcagtcatctggcagaagaaaatgacccacaacaaggacagcaaattgccctggggacatagtcacgagaagcggggaatgttcgaagggagggcggagaacgttcttctcctcatcaagcacaggtttcctggcattgcccagtcggcgctggacataagcaagatccaatgcaacaaggatgttggccttgccattttggagagctactccaggactctggagagcctggctttcacggtcatgtctcggatcgaggacgttctgagcgcggacttggccgctcgagatctcaggaacacggaatcgatgagaatcgccgccagcttagcttcggacgacaccgacaaggtcgtctcagacgctaaagccgaggtagagaagacggggagaatggagccggtttcgccggcgctatctgacttggtcggcccgaagctgacgaagatctcgccagttgcaaccaagaggttttcgtaccttgagaatctgggtggaacaagaagcccgatagcaagacactagctgctgtaggtagggggtgtagtgagggtagatggatcatgccgtcgcagagccttcggaagaagctttgtacatagcatagatgcccactgcgaacgtttgtctaacgataatgtgacatctaatcgactaatagaggcagaagttcttagagcgcaaacattatcaccaaaaccatgccctgccctggctttcataatcactttatttaacacttttatctt

SEQ ID NO: 216251 - DNA, 3180 bp, Zea Mays
ctcgaagtctctcgaacagacgagcggcgagcgcttctcctcgctagaagcgacagcgaagtgaacataaccaaaacgacggcaatcgccgagtccatatggcctcgatcagtgctcccgcagtagcatgccgcgtcgcgccggcgcgcgcaacaacctcggttcttcccgcgcactcgcggcggccgggatgcaggtcggtggtgtggcggtgctgggccgcgacgagggggagacggaggcggtgggcagggctgcgggcaaggtgccgcataagctgcgacgtcagccagccgtcagccgtgcagccagattctgagagctctggggagggattggtggcgcaggacgacgggccgcggcggccgccattcgacatcaacctcgccgtcgtgctcgccgggttcgcgtttgaagcctataccagtcctccggcagatgtgggctggcgcgaaactgatgcggctgactgtcagacagtgttcctgtccgatgtgtttcttcgtgaagtatacgatggacggcttgtcgtcaggctgaagaaaggcataaaccttcctgcaatggatccatggggtactagtgatccttatgtaattctacaactgaatggccaaactgcaaaaagccaaattaaatgggcgacaaaggagccaacatggaatgaagatttcacgtttaacattagaaaatctcgtgaaaatcttctgcaggttgcagcttgggatgcaaaccttgttaccccacacaaacgcatgggaaatgctggattataccttgaatcattttgtgatggtaacaatcatggtgttactgttgaattagaaggcctcggtggtggtggaactatagagatagaggtcaaatataagagttatgacgatatcgagcgtgaaaaacaatggtggagaatacctttcgtgtctgactttcttgtgaagagcagcctgggatctgctcttaggatggttcttggatctgaaagtataaatgctagtcagtttgtgaagtctgcatttgggcaactgagttctttcacatacacctatcttccaaagccatcatcattggaaagtggagttgatgtttctaaaagtgatgaagaatcctcagatggcccaactaattcaaatgagcttcaacaacagaatattgattctgaaatcatttcagattctcattctcatagtgaagttcaatctcctactgctgttgttaatagtgaaggaaattcatcgtctgatatgaagaaatcagatgaatatttttggagagctctgaacaatgtactaaaccaaaatgtactacagaactttggattttctctcccggaggtcaagcaattgggtggttttgacctattaagttcacttggtctgaaatcacgcaatattgctgaacaggaatatctagaatctggacttgcaatggcagatacttcaacaaatggtggcagtgaaacaacttctgaaaatacagttggtgttgagaatgaaaatagaacattgacaaccaaagaggaggtgcaatcttcctttccagatataaataaagtatctcgggatgtattgtctcaaacagaaaatatactcggagctctgatgatactttccaaaaatctctcaccacatgatcagtcagtaccgacaactggaacaaatgggaaatatgacatgattagagaagagcaaggtgcttcagctgcagattctgttcaaaaggctgatactgtttcatctgcgttactgtccattgatgcacaggaagcagaggatatgcggcgcttgtttgcaagtgcagagactgccatggaggcatgggctatgcttgccacttcactgggacgtaacagtttcatcaagtcggactttgaaaagatatgttttcttgacaatatttcaacagacacacaagttgccatatggtgcgattcttctcgaagaagactaaaccctgagaggctaggtggtgacttcaaacaagaagttcaagttcacagtggattcttaggtgcatatgactctgttaggaacaggatcatgactctcatcaaatatgccattggatacgatgatgaagaagatgcagaaaacatacctaggtggcatgtttatgtgactggacacagtttaggtggagcactagcgactcttcttgctcttgaactttcatcaagtcaaatggccaaaaatggtgccatatttgtgacaatgtacaattttggctctcctagagtgggaaatagaagattcgccgaagtctacaatgcgaaagtaaaggacagttggagaattgtcaaccaccgggatatcattccaacagtgccacgtcttatgggctattgccatgtggaagcaccagtttatcttaaatttggggacgcaaaagatgcaccggtaaataacagcattctagatgatgaagaccaaggtgacgtgataggggagtacacacctgatgttcttgttactgaatttatgaaaggcgagaagcaacttgtggaaaaactactgcaaacagaaataaatttactccgctcaatcagggatggttcggctcttatgcagcacatggaagacttctactatgtcacccttcttgagaatgtgagatcaagttatcaagtggcagatactgccaatgatgaataccaattgacagcgtgatcctagtaaaactgcacagctgaacatcatggactgtgtttccctgcaaaaacttcatttctgaaggacactgaatggggctatgaaagtgtgcaatccttactcttagtggaaacatgaacaggcagaacagccttggacctcagtcaggatagaggaaatgaaactggtttcactggcggatatacttgtagcaccgtgtcaattggtagatatgttgtttgagctattttccgttgatgtagctagcacactttggaatatattgtatgatgtttgaaattctagaaaagttcatagacacctgggagaataactcaagaaatatccaagtccgttttggccaatattttttttcatggagaaacttgcacaccgtggtaggctaccggctacccaagggctgatagggtgtgttaatcgagtgtacgacctagataaaaatgttcaatgtgatggaactatatatcttgcatggaataaagtagcatcatgtaatttcggcattttttct

SEQ ID NO: 216252 - DNA, 3175 bp, Zea Mays
tcgaagtctctcgaacagacgagcggcgagcgcttctcctcgctagaagcgacagcgaagtgaacataaccaaaacgacggcaatcgccgagtccatatggcctcgatcagtgctcccgcagtagcatgccgcgtcgcgccggcgcgcgcaacaacctcggttcttcccgcgcactcgcggcggccgggatgcaggtcggtggtgtggcggtgctgggccgcgacgagggggagacggaggcggtgggcagggctgcgggcaaggtgccgcataagctgcgacgtcagccagccgtcagccgtgcagccagattctgagagctctggggagggattggtggcgcaggacgacgggccgcggcggccgccattcgacatcaacctcgccgtcgtgctcgccgggttcgcgtttgaagcctataccagtcctccggcagatgtgggctggcgcgaaactgatgcggctgactgtcagacagtgttcctgtccgatgtgtttcttcgtgaagtatacgatggacggcttgtcgtcaggctgaagaaaggcataaaccttcctgcaatggatccatggggtactagtgatccttatgtaattctacaactgaatggccaaactgcaaaaagccaaattaaatgggcgacaaaggagccaacatggaatgaagatttcacgtttaacattagaaaatctcgtgaaaatcttctgcaggttgcagcttgggatgcaaaccttgttaccccacacaaacgcatgggaaatgctggattataccttgaatcattttgtgatggtaacaatcatggtgttactgttgaattagaaggcctcggtggtggtggaactatagagatagaggtcaaatataagagttatgacgatatcgagcgtgaaaaacaatggtggagaatacctttcgtgtctgactttcttgtgaagagcagcctgggatctgctcttaggatggttcttggatctgaaagtataaatgctagtcagtttgtgaagtctgcatttgggcaactgagttctttcacatacacctatcttccaaagccatcatcattggaaagtggagttgatgtttctaaaagtgatgaagaatcctcagatggcccaactaattcaaatgagcttcaacaacagaatattgattctgaaatcatttcagattctcattctcatagtgaagttcaatctcctactgctgttgttaatagtgaaggaaattcatcgtctgatatgaagaaatcagatgaatatttttggagagctctgaacaatgtactaaaccaaaatgtactacagaactttggattttctctcccggaggtcaagcaattgggtggttttgacctattaagttcacttggtctgaaatcacgcaatattgctgaacaggaatatctagaatctggacttgcaatggcagatacttcaacaaatggtggcagtgaaacaacttctgaaaatacagttggtgttgagaatgaaaatagaacattgacaaccaaagaggaggtgcaatcttcctttccagatataaataaagtatctcgggatgtattgtctcaaacagaaaatatactcggagctctgatgatactttccaaaaatctctcaccacatgatcagtcagtaccgacaactggaacaaatgggaaatatgacatgattagagaagagcaaggtgcttcagctgcagattctgttcaaaaggctgatactgtttcatctgcgttactgtccattgatgcacaggaagcagaggatatgcggcgcttgtttgcaagtgcagagactgccatggaggcatgggctatgcttgccacttcactgggacgtaacagtttcatcaagtcggactttgaaaagatatgttttcttgacaatatttcaacagacacacaagttgccatatggtgcgattcttctcgaagaaggttggttgttgcctttcgtggaaccgaacaatcaaggtggaaggatttgcgaaccgacttaatgcttgtacctgctggactaaaccctgagaggctaggtggtgacttcaaacaagaagttcaagttcacagtggattcttaggtgcatatgactctgttaggaacaggatcatgactctcatcaaatatgccattggatacgatgatgaagaagatgcagaaaacatacctaggtggcatgtttatgtgactggacacagtttaggtggagcactagcgactcttcttgctcttgaactttcatcaagtcaaatggccaaaaagtaaaggacagttggagaattgtcaaccaccgggatatcattccaacagtgccacgtcttatgggctattgccatgtggaagcaccagtttatcttaaatttggggacgcaaaagatgcaccggtaaataacagcattctagatgatgaagaccaaggtgacgtgataggggagtacacacctgatgttcttgttactgaatttatgaaaggcgagaagcaacttgtggaaaaactactgcaaacagaaataaatttactccgctcaatcagggatggttcggctcttatgcagcacatggaagacttctactatgtcacccttcttgagaatgtgagatcaagttatcaagtggcagatactgccaatgatgaataccaattgacagcgtgatcctagtaaaactgcacagctgaacatcatggactgtgtttccctgcaaaaacttcatttctgaaggacactgaatggggctatgaaagtgtgcaatccttactcttagtggaaacatgaacaggcagaacagccttggacctcagtcaggatagaggaaatgaaactggtttcactggcggatatacttgtagcaccgtgtcaattggtagatatgttgtttgagctattttccgttgatgtagctagcacactttggaatatattgtatgatgtttgaaattctagaaaagttcatagacacctgggagaataactcaagaaatatccaagtccgttttggccaatattttttttcatggagaaacttgcacaccgtggtaggctaccggctacccaagggctgatagggtgtgttaatcgagtgtacgacctagataaaaatgttcaatgtgatggaactatatatcttgcatggaataaagtagcatcatgtaatttcggcattttttct

SEQ ID NO: 216253 - DNA, 3029 bp, Zea Mays
atggcctcgatcagtgctcccgcagtagcatgccgcgtcgcgccggcgcgcgcaacaacctcggttcttcccgcgcactcgcggcggccgggatgcaggtcggtggtgtggcggtgctgggccgcgacgagggggagacggaggcggtgggcagggctgcgggcaaggtgccgcataagctgcgacgtcagccagccgtcagccgtgcagccagattctgagagctctggggagggattggtggcgcaggacgacgggccgcggcggccgccattcgacatcaacctcgccgtcgtgctcgccgggttcgcgtttgaagcctataccagtcctccggcagatgtgggctggcgcgaaactgatgcggctgactgtcagacagtgttcctgtccgatgtgtttcttcgtgaagtatacgatggacggcttgtcgtcaggctgaagaaaggcataaaccttcctgcaatggatccatgggtaacaatcatggtgttactgttgaattagaaggcctcggtggtggtggaactatagagatagaggtcaaatataagagttatgacgatatcgagcgtgaaaaacaatggtggagaatacctttcgtgtctgactttcttgtgaagagcagcctgggatctgctcttaggatggttcttggatctgaaagtataaatgctagtcagtttgtgaagtctgcatttgggcaactgagttctttcacatacacctatcttccaaagccatcatcattggaaagtggagttgatgtttctaaaagtgatgaagaatcctcagatggcccaactaattcaaatgagcttcaacaacagaatattgattctgaaatcatttcagattctcattctcatagtgaagttcaatctcctactgctgttgttaatagtgaaggaaattcatcgtctgatatgaagaaatcagatgaatatttttggagagctctgaacaatgtactaaaccaaaatgtactacagaactttggattttctctcccggaggtcaagcaattgggtggttttgacctattaagttcacttggtctgaaatcacgcaatattgctgaacaggaatatctagaatctggacttgcaatggcagatacttcaacaaatggtggcagtgaaacaacttctgaaaatacagttggtgttgagaatgaaaatagaacattgacaaccaaagaggaggtgcaatcttcctttccagatataaataaagtatctcgggatgtattgtctcaaacagaaaatatactcggagctctgatgatactttccaaaaatctctcaccacatgatcagtcagtaccgacaactggaacaaatgggaaatatgacatgattagagaagagcaaggtgcttcagctgcagattctgttcaaaaggctgatactgtttcatctgcgttactgtccattgatgcacaggaagcagaggatatgcggcgcttgtttgcaagtgcagagactgccatggaggcatgggctatgcttgccacttcactgggacgtaacagtttcatcaagtcggactttgaaaagatatgttttcttgacaatatttcaacagacacacaagttgccatatggtgcgattcttctcgaagaaggttggttgttgcctttcgtggaaccgaacaatcaaggtggaaggatttgcgaaccgacttaatgcttgtacctgctggactaaaccctgagaggctaggtggtgacttcaaacaagaagttcaagttcacagtggattcttaggtgcatatgactctgttaggaacaggatcatgactctcatcaaatatgccattggatacgatgatgaagaagatgcagaaaacatacctaggtggcatgtttatgtgactggacacagtttaggtggagcactagcgactcttcttgctcttgaactttcatcaagtcaaatggccaaaaatggtgccatatttgtgacaatgtacaattttggctctcctagagtgggaaatagaagattcgccgaagtctacaatgcgaaagtaaaggacagttggagaattgtcaaccaccgggatatcattccaacagtgccacgtcttatgggctattgccatgtggaagcaccagtttatcttaaatttggggacgcaaaagatgcaccggtaaataacagcattctagatgatgaagaccaaggtgacgtgataggggagtacacacctgatgttcttgttactgaatttatgaaaggcgagaagcaacttgtggaaaaactactgcaaacagaaataaatttactccgctcaatcagggatggttcggctcttatgcagcacatggaagacttctactatgtcacccttcttgaggtttttgagaactatttctgcttttctcataccaaattgtgtcaaaagctcctcaaggtcagcaactaaataacaattcaatattgcagaatgtgagatcaagttatcaagtggcagatactgccaatgatgaataccaattgacagcgtgatcctagtaaaactgcacagctgaacatcatggactgtgtttccctgcaaaaacttcatttctgaaggacactgaatggggctatgaaagtgtgcaatccttactcttagtggaaacatgaacaggcagaacagccttggacctcagtcaggatagaggaaatgaaactggtttcactggcggatatacttgtagcaccgtgtcaattggtagatatgttgtttgagctattttccgttgatgtagctagcacactttggaatatattgtatgatgtttgaaattctagaaaagttcatagacacctgggagaataactcaagaaatatccaagtccgttttggccaatattttttttcatggagaaacttgcacaccgtggtaggctaccggctacccaagggctgatagggtgtgttaatcgagtgtacgacctagataaaaatgttcaatgtgatggaactatatatcttgcatggaataaagtagcatcatgtaatttcggcattttttct

SEQ ID NO: 216254 - DNA, 3951 bp, Zea Mays
gcgagaaagtgataaggttcgtgggtgcgtcgccactcgccaccctcacgtctcccgagtggactcccgcctccttccttccgtcccttcccggctcaccgcccttcgcctcaccccgcgcctcctccctgtcccccctccagaactgtcccccaccgcctcgagatgctcgcggcccccgccgcgctccacctcctcctcccggcgccgccgctgccgcccccgcactaccaccaccaccacgtcgccttccccgcgccgccgctccacgcctcgctcccgtgctcacgccgcccgcggaggaggccgcccaggcatggggtcgccagggcctccgccgcaatggcggaggaggccagcagctccggaccgaccaagttctccgtgaggatccccgtcggcgaccgcgagatattggtggaaacgggccacattgggaggcaagcgagcgcttctgtaatggtcactgatggcgaaacgattctctactgttctgtctgtctgtcggatactccaaacgacccttctgactttttccctttatcggttcactatcaagagcgcctttcagctgctggaagaactagtggcggtttcttcaaacgagaaggcaagacaaaagaccatgaggttttggtttgcagattgatagacaggcccctacgacctactatgcctaagggtttctactttgaaactcagattctatcctgggtcttcagttatgatggcattcactccccagactgcttggctatcacagctgctggtatagccgtggccctctctgaaattccaaataaacaaacaattgctggagtaagaattggcctaattaacaaccagtttattgttaacccaactactgaacagatggagaattcagagttagatttgatgatggctgggactgatagtgccattttgatgattgagggctactgtgattttctgactgaggagaagctgcttgaagctgtcgaagctgggcaggtggcaattagagaaatctgcaaagcaattgatgttcttgttcagagctgtgggaagaagaaaatggtcgatgctatcagcctaccgccgcctgaactctacaggcatgttgaagatatttctggagatgagttgatgaaggcattacaaataaaaggaaagattcccagaagaaaagctctttcagcattggaagagaaagttataagtatactttctgagcagggctatgtttccaaagatggcttatctggaggcactgaaagtttggctgatattgttgaggatgaggatgaggatgaaattgtagatgacggagaagtagatgaaggcgatgttcacatcaagccggtttcaaggaagccccttcagctatttgcagaagttgatgtgaagctagtcttcaaggaaatttcatctaaatatttacgaaagcgcattgtagagcgaggaaagcgaagtgatggacggagtccttgggaacttcggcccatcaattctcaatgtggcttacttccaagagctcatggtagtgctctgttcacgaggggagaaacacagtcactggctgtggtcactttaggtggctatcagatggcacaacgaattgacaaccttgttgatacggaggactcaaaaagcttctatcttcagtactcatttcctccatcatgtgttggcgaagttggtcgaattggagcacctagccggagagagattggacatgggatgcttgcagaaagggcactggagccaattttacctctggaagaggattttccgtacactattcgtgttgagagtactatcactgaaagtaatggttcatccagcacttcaagatgctggggttcctataaagtttcctgttgctggaattgcaatgggcctggtccttgatacacaagaatttggtggagatggtagcccacttatactttctgatattactggagctgaagatgcctctggtgacatggatttgaagattgctggtaatgaaagtggcatatctgcatttcagatggacattaaggtagttgggataactctacctgtgatggagaaagcactccttcaagctagggaagggagacaacatattctaaatgaaatgttgaaatcttcacctccaccctcaaaagcactatctccacacgctccattaattcatgttatgaaggtcaaacctaacaaggtgaatttaataattggttctggtggaaagacaataaaaagcataattgaggagactggggtagatgctattgatactggagatgatggcacggtaaaaattactgcaagagacctaacaagcttagagaagtcaaaaattataatagctaatcttaccatggttccaaaagtaggagaaatatacagggactgtgagatcaagtcaatagctccatatggtgcttttgttgaaattgctccagggcgtgagggtttatgtcatatcagtgagttaagttcgggctggttggccaaggctgaggatgcttttaaagttggagatcgcatagacgtcaagcttattgagataaacgataagggtcaacttcggctaagctctcgagctttgcttccagacgtggattccgaatccaacataggttcaacaaaagaaaaggtgccacaaaaagatgatgtcataaaaatgacaacaaaaagaccaaggcgcaagaaacagccagagccgtctggagctgaaaatgccacaacaaaggctcttgcgaaaagcgctgctgctccagctggttcaaagggcagtgaagcgtagtaggatgtggacagcttggtgccttaatcagacgattgactggccaagctagggatacatccttcaaccgactatatgatggtcatatggcatgagaaagagttcagacatgagggcacaactgtctaaacaggaatataatggagaagaattggttgatcgacctcgatgttagacaggtagagtgtctggttgatgcgttacacaaggcgtgcgcctatccagcagtaatggtgcccaggactggatcgtcgccatggttagcggaacagatcccgtaaccaccatggaaacttgattgtaatcgccagaagtgttgtatcgttctgtactaactacatattcttgccaatccggccaatgcaaactactgcatgaagtaattagccaaaaaaaatttggctcagcctgggaataaccggaacatggaacaaataatttgacagtcagaggcaatgcaactcctatctcacatttacaagccaaatccaactcctatcagttaactgtcccgaccggcaatacaaaatctaccaaaagagaaacagaaactaggatctggggtagctttccaccgacacatactagtttccatgctagcaaaatctaccaagaaggctgttctcaacactttaacgctcaagtctgagcagcgagatgtctttgtactctgtcaactgttccacgccaactcgttaccgttgagcagcccgctccccaccaattcattagcgatgagatgctccaggtcatcaaattcatggaagggcttggccttcaaagtcgcggcattgcctccagcaggagcagcagcaacagccagattgctgcttaccgacttgaaattgttacttctggctgtgctgttattgatcacactagtaggcccggtatagatggtggcagcaccatttacggccatgcgctgtccctgatctcctgtaccagcactgttggtgttagcacctcctgatgtgataccactgcttatgttagggatatctagaggtggttgctgtggcagtgtgtgccttttagcgttcttaacttcttgaatcagctgatttaaagcatgctgctgatactgtgggctcacgcccaggccccggtgattgttttgcaaccccaagccctggaggttgttgtgctggggcattgggtgctgaaatgac

SEQ ID NO: 216255 - DNA, 3874 bp, Zea Mays
gcggagggcagacaggagagagcgagaaagtgataagaactgtcccccaccgcctcgagatgctcgcggcccccgccgcgctccacctcctcctcccggcgccgccgctgccgcccccgcactaccaccaccaccacgtcgccttccccgcgccgccgctccacgcctcgctcccgtgctcacgccgcccgcggaggaggccgcccaggcatggggtcgccagggcctccgccgcaatggcggaggaggccagcagctccggaccgaccaagttctccgtgaggatccccgtcggcgaccgcgagatattggtggaaacgggccacattgggaggcaagcgagcgcttctgtaatggtcactgatggcgaaacgattctctactgttctgtctgtctgtcggatactccaaacgacccttctgactttttccctttatcggttcactatcaagagcgcctttcagctgctggaagaactagtggcggtttcttcaaacgagaaggcaagacaaaagaccatgaggttttggtttgcagattgatagacaggcccctacgacctactatgcctaagggtttctactttgaaactcagattctatcctgggtcttcagttatgatggcattcactccccagactgcttggctatcacagctgctggtatagccgtggccctctctgaaattccaaataaacaaacaattgctggagtaagaattggcctaattaacaaccagtttattgttaacccaactactgaacagatggagaattcagagttagatttgatgatggctgggactgatagtgccattttgatgattgagggctactgtgattttctgactgaggagaagctgcttgaagctgtcgaagctgggcaggtggcaattagagaaatctgcaaagcaattgatgttcttgttcagagctgtgggaagaagaaaatggtcgatgctatcagcctaccgccgcctgaactctacaggcatgttgaagatatttctggagatgagttgatgaaggcattacaaataaaaggaaagattcccagaagaaaagctctttcagcattggaagagaaagttataagtatactttctgagcagggctatgtttccaaagatggcttatctggaggcactgaaagtttggctgatattgttgaggatgaggatgaggatgaaattgtagatgacggagaagtagatgaaggcgatgttcacatcaagccggtttcaaggaagccccttcagctatttgcagaagttgatgtgaagctagtcttcaaggaaatttcatctaaatatttacgaaagcgcattgtagagcgaggaaagcgaagtgatggacggagtccttgggaacttcggcccatcaattctcaatgtggcttacttccaagagctcatggtagtgctctgttcacgaggggagaaacacagtcactggctgtggtcactttaggtggctatcagatggcacaacgaattgacaaccttgttgatacggaggactcaaaaagcttctatcttcagtactcatttcctccatcatgtgttggcgaagttggtcgaattggagcacctagccggagagagattggacatgggatgcttgcagaaagggcactggagccaattttacctctggaagaggattttccgtacactattcgtgttgagagtactatcactgaaagtaatggttcatccagcatggcttctgtttgtggaggttgtttagcacttcaagatgctggggttcctataaagtttcctgttgctggaattgcaatgggcctggtccttgatacacaagaatttggtggagatggtagcccacttatactttctgatattactggagctgaagatgcctctggtgacatggatttgaagattgctggtaatgaaagtggcatatctgcatttcagatggacattaaggtagttgggataactctacctgtgatggagaaagcactccttcaagctagggaagggagacaacatattctaaatgaaatgttgaaatcttcacctccaccctcaaaagcactatctccacacgctccattaattcatgttatgaaggtcaaacctaacaaggtgaatttaataattggttctggtggaaagacaataaaaagcataattgaggagactggggtagatgctattgatactggagatgatggcacggtaaaaattactgcaagagacctaacaagcttagagaagtcaaaaattataatagctaatcttaccatggttccaaaagtaggagaaatatacagggactgtgagatcaagtcaatagctccatatggtgcttttgttgaaattgctccagggcgtgagggtttatgtcatatcagtgagttaagttcgggctggttggccaaggctgaggatgcttttaaagttggagatcgcatagacgtcaagcttattgagataaacgataagggtcaacttcggctaagctctcgagctttgcttccagacgtggattccgaatccaacataggttcaacaaaagaaaaggtgccacaaaaagatgatgtcataaaaatgacaacaaaaagaccaaggcgcaagaaacagccagagccgtctggagctgaaaatgccacaacaaaggctcttgcgaaaagcgctgctgctccagctggttcaaagggcagtgaagcgtagtaggatgtggacagcttggtgccttaatcagacgattgactggccaagctagggatacatccttcaaccgactatatgatggtcatatggcatgagaaagagttcagacatgagggcacaactgtctaaacaggaatataatggagaagaattggttgatcgacctcgatgttagacaggtagagtgtctggttgatgcgttacacaaggcgtgcgcctatccagcagtaatggtgcccaggactggatcgtcgccatggttagcggaacagatcccgtaaccaccatggaaacttgattgtaatcgccagaagtgttgtatcgttctgtactaactacatattcttgccaatccggccaatgcaaactactgcatgaagtaattagccaaaaaaaatttggctcagcctgggaataaccggaacatggaacaaataatttgacagtcagaggcaatgcaactcctatctcacatttacaagccaaatccaactcctatcagttaactgtcccgaccggcaatacaaaatctaccaaaagagaaacagaaactaggatctggggtagctttccaccgacacatactagtttccatgctagcaaaatctaccaagaaggctgttctcaacactttaacgctcaagtctgagcagcgagatgtctttgtactctgtcaactgttccacgccaactcgttaccgttgagcagcccgctccccaccaattcattagcgatgagatgctccaggtcatcaaattcatggaagggcttggccttcaaagtcgcggcattgcctccagcaggagcagcagcaacagccagattgctgcttaccgacttgaaattgttacttctggctgtgctgttattgatcacactagtaggcccggtatagatggtggcagcaccatttacggccatgcgctgtccctgatctcctgtaccagcactgttggtgttagcacctcctgatgtgataccactgcttatgttagggatatctagaggtggttgctgtggcagtgtgtgccttttagcgttcttaacttcttgaatcagctgatttaaagcatgctgctgatactgtgggctcacgcccaggccccggtgattgttttgcaaccccaagccctggaggttgttgtgctggggcattgggtgctgaaatgac

SEQ ID NO: 216256 - DNA, 3973 bp, Zea Mays
ttggttctgtcgatgcagctcatcaattccattcccagctccggaaaatcgagaaatttcgattggttatttgatttgatttgattctggccgtgccgaaccctagcttccatctcggtccaatctcagttccacatattgttactcctcggcagcagaggaggccgtcgtggaatgagttgaggatgacggcatactactcgtgctcctaggaaaggtcagggaaaggaagaattcgagccatggaggacgaggcggacggcggcggcgaatccttcgtgctgcgctccggcgtccgcgcgggcctcaagcgcgaattcgccttcgccatcgcctcgcaggccgtcctttcgtcctcatacgcacccctgggccgcacccgccgctcatcccgcatcctcaacccatcggccgcttcgaccccctccgtcgccggcgccgccgtctcgacatcctcctcctcaacccccgacacaaagccaaaagccaagcgcccgcgcccaccagatcctccccctccccctcccttcccccctccaccagactatgcccctgcccccggagaagaccatgacggggccgctgtcggccccgtgctcgccttgatggctgctgctgggcccagccctccgccgacgcctttgactccgcaaccccatgccgacgcggatgcggatcccgcacacctcgccaacatcatcattccgccggagtcgtcgcccaggcgcatcacgcgctccatgctccagcccaagtctcgccttcctaccgccgctcgttctcctgacaatgcggcaccgctcaaaccaaaactggaaccgccggaagaggaggatggcaagccggttccagcgttgaggcgcttcaccagatcactactggtcaaggacaaggacagcaacgacgacgacctctcaggcaccaccaccgccagcaatgcctcctccccttcgcccaaaaccaacaccacaagtaccagcaggagcagcaacaaggggaataagaatacaaacaagattcccaccaacctcagggagctgctcgccaccggcatgctcgaaggtcagcccgtcaagtacatcatgaggaaaggcaagcgagcggtactccggggagttatcaaacgcattggcatattgtgttcatgctcttcatgcaaaggccgaaaagttgtttcaccttactactttgaggtgcatgctgggagtaccaaaaagcatccatcagactacattttcctggaaaatggaaataatctgcatgatgtgttgagggcatgtacaaatgctacattagacatgttggagcctgcaatacgaaaggcaataggcccagcacctcaggagagaatattcagatgcaaatcatgcaaaagttcattcagtacactccgcagtgggaaatttgctttgttttgtgattcgtgtcttgagtccaagggagctaagaataatatcagttcatccaaagttgggcgaagtcaaacttcatctgccaaggtatataagagtgcatcaccaggagcaaagtcttcaagtgtaggaaggcttacaagaaaggataagggtatgcataaggtcgttttcatgagtggcattttaccagagggcactgatgttggttactatgttggtggaaagaggttactggatggatatataaaggaacttgggatctactgtcattgctgcagcacagtggttagtccttcacagtttgaaggtcatgctggtcgagctgctcgacgcaaaccttaccacaacatatatatgtcaaacggcgtttcactacatgagctgtcaatttcactcttgaaaggtcaaaagatgtcaaacagacaaagtgatgacttgtgcagcatttgttcagatggtgggcaactactcctttgtgatacctgtccaagagcttttcatagagaatgtgttggcttatcttctgccacaaagggaacttggtgttgccgatattgtgagaatagacaacagagggaaagttgtttggcatataacaacaatgcaatagctgctgggagagttgaaggagttgatgccttggaacaaatattcacgcggtcgatacgtattgctacaacacttgagactggatttggtggttgcgcactgtgcaagctccatgatttcagcaaaaagaaattcagtacccgaaccgtgctgctttgtgaccaatgtggtagagaatatcatgttggttgcctcaaggaacataatatggctgatctgacggcattgcccgagggagcctggtattgttctacggactgtgtgaggattaaccagacactgcaagatttacttaacagtggtggagaacctgttcttgccatggatttagatgtcattaagaagaaacgagaagtgaaaggttttaatgatgatgatgctgaccttgatgttagatggagagttttaaaggacaagagctcagacgacagcaaactagtgctctccaaagcagttgccattttccatgaaacttttgatcccattatccaggtttcaactggacgggacctcattccagccatggtttatgggaggagtgcaagggaccaagattacacaggaatgtattgtactgtgttaactgtgaacaatattgtagtttctgcgggtcttttccgcatcatgggtagtgaaattgctgagctgccgttggttgctacaagtagggatagacaaggcttggggtatttccaagcacttttttcctgcatagaacgtctgttgtcatctttggaggtgaaacattttgtgctaccagctgcagaggaagcggagtctatctggactgagcgttttgggttcgcaaagataagccaggatgagctgcgcgaatacctcaagggtgggcgaacaactgtgtttcaggggacgtcaaacctgcacaagctggttgcgaaacttgaatgctagttatgtgagaattgtatggcaagagcaaggacatgaagctaagaagcagctcattgtttgtgtgcctctgggattgatgcagacaggaaagaggcaccctgatccctttcttgtaaatgttggtgagcatgttggcattggcatcttgatctgtttccataggtaaggtgaagaggattgtgtaagataaaagggacaagctgtatgtaaagacaagccaaagctgagtgaatttcaggcaccttattgtgtggagggtcctgtgtttgttgagtaggcaacgctcgggctggtgtgagatgatgactgcatttgtgttgtgttggtggtattttcactgctgacatgactgttgtatcggatgacatcttttctgttttatgacagtggcagtgtgatactaggctgttaggaggggacgggggaggtcaaacccaacgtacatcatgagtggagctgctgtaatgtaacagaagtattgcaccccccccccccccccccccaataatatataacatgcttaatttggtgcgaattccttgccgcttgtggagcttagtgaatcgtcaaatataatagtttgtgtttgtttggctgcactcatatccacctcagttttacattcgatccatataatatttaaggtaaattaagggtggaagttaaacttacatttacaatccacttgaatgtatgtggattgaggtgaatatccaagcaaatcttaaaatgaccgtatccattattcgaaacactattttgcactataaactgtattgaagtttgaatatagggacatggatggataagtctctggcaggtgctgctgcttctatatgcttagctcgtggatgacagcaggtgctgctgctgcttccaaaagtatggacggacagagtatgttatcaccttctattatgtaaaatttgaacctgtgcaagtagaaataaaggagaatcaccatttaatagcttcttgtttttttaggaatctctctgtaataaaacaataataataataggcttataggtctgata

SEQ ID NO: 216257 - DNA, 1639 bp, Zea Mays
cgcccccacacgcgctttcgctgcaccaaagcgtcgtgtgagctgctacttaacctaaccaacccccaccgccaaagccaaaccattccccccgttcctgattccaattccaaccagcccatcccccttcgaccatacacacagagcggaggcgaaggcaagagcaaacagagtagccgccgccgccgccgtcgtcgtcgtgtgttgagcagggttttgtttttacggcttagctttgagcagcagagatgttgcgagcgctggcggcgaggtgctgcggccactggccgccgggcgccgcggcggcggacgggatgctgtggcaggcggagctgcggccgcacgcggcgggggagttctcgatggccgcggcgcaggccaacctggccatggaggaccaggcgcaggtgctggcgtccccggccgccacgctcgtcggcgtctacgacggccacggcggggccgacgcatcccggttccttcgctcccggctcttcctgcatgtccaacgcgtcgtgcaggagcaggggggcatgagcgccgaggcgattcggagcgcgttcggcgcggccgaggaggagttccataggcaggtgaggcaggagtggaggagccggccgcggctcgctgccgtgggctcctgctgcctgctcggggccatctccggggacacgctgtacgtggccaacgccggcgattcccgcgccgtgctcggccgtcgagtgcccggcggcggggcggccgtcgccgagcggctctccgccgagcacaacgcggcgtgcgaggaggtgcggcgcgagctcgccgcgctcaaccccgacgacgcgcagatcgttgtgcacgccaggggagcctggagggtcaaggggataattcaggtgtcgagatccattggcgatttttatctcaagaaaccggagtatagcctggaccccttgttccggcaagttggggcccctattgcgctgaagaggccagctctcagcgctgaaccatcagttcaagtacgcaagctgaaaccaaacgacctgttcctgatatttgcttcagatggcctttgggagcacctcagcgacgatgctgcggtgcagattgtcttcaagaatccgagaactgggatagccagcagactggtgaaggctgccttgaaggaagcgaccaggaagagggaggtcaggtaccgtgatctgaggacgatcgagagaggggtgaggcggcatttccacgacgacatcagcgtcgtcgtggtctacctcgatggccaccgcgagcgccgccacaccagggtcgttgactcgagcagcaactgcaccagtgcgcccgtcgacatccactcctccaactcccgctagtttccggagccccttgcaacgcgagctgaactctgggtgggaggtgaggtgggtgcagccgtagccatcggaatcggaacaagtcgatatgtacataggtaggagtgggtgcgtggcatcttgatgccggagaagatcatttggtctcgaaactacttagcacaagtggttaatgactgcatttttcttgtttctttttgtctgaaaccagcagcaagcccgtccattggatcggacttatttttaagaccaccaaaacaactaaatccattgaaacaaaggattac

SEQ ID NO: 216258 - DNA, 1421 bp, Zea Mays
tccaattccaaccagcccatcccccttcgaccatacacacagagcggaggcgaaggcaagagcaaacagagtagccgccgccgccgccgtcgtcgtcgtgtgttgagcagggttttgtttttacggcttagctttgagcagcagagatgttgcgagcgctggcggcgaggtgctgcggccactggccgccgggcgccgcggcggcggacgggatgctgtggcaggcggagctgcggccgcacgcggcgggggagttctcgatggccgcggcgcaggccaacctggccatggaggaccaggcgcaggtgctggcgtccccggccgccacgctcgtcggcgtctacgacggccacggcggggccgacgcatcccggttccttcgctcccggctcttcctgcatgtccaacgcgtcgtgcaggagcaggggggcatgagcgccgaggcgattcggagcgcgttcggcgcggccgaggaggagttccataggcaggtgaggcaggagtggaggagccggccgcggctcgctgccgtgggctcctgctgcctgctcggggccatctccggggacacgctgtacgtggccaacgccggcgattcccgcgccgtgctcggccgtcgagtgcccggcggcggggcggccgtcgccgagcggctctccgccgagcacaacgcggcgtgcgaggaggtgcggcgcgagctcgccgcgctcaaccccgacgacgcgcagatcgttgtgcacgccaggggagcctggagggtcaaggggataattcaggtgtcgagatccattggcgatttttatctcaagaaaccggagtatagcctggaccccttgttccggcaagttggggcccctattgcgctgaagaggccagctctcagcgctgaaccatcagttcaagtacgcaagctgaaaccaaacgacctgttcctgatatttgcttcagatggcctttgggagcacctcagcgacgatgctgcggtgcagattgtcttcaagaatccgagaactgggatagccagcagactggtgaaggctgccttgaaggaagcgaccaggaagagggaggtcaggtaccgtgatctgaggacgatcgagagaggggtgaggcggcatttccacgacgacatcagcgtcgtcgtggtctacctcgatggccaccgcgagcgccgccacaccagggtcgttgactcgagcagcaactgcaccagtgcgcccgtcgacatccactcctccaactcccgctagtttccggagccccttgcaacgcgagctgaactctgggtgggaggtgaggtgggtgcagccgtagccatcggaatcggaacaagtcgatatgtacatagcaagcccgtccattggatcggacttatttttaaggacggcccattatttcccagtttaggagcccacttatgc

SEQ ID NO: 216259 - DNA, 636 bp, Zea Mays
ttggtctacacatccagggtctcatgaagatatgtcagtgctccttttggacagtattgttgacaaacatgcaatagatattgaaaatggttatctcaaaatggtcaaggagatgataactgccagcgctaagcctaccagcacaaaaagtgcaaacgagaagcattttctttatgacattgttgctaatggtcgtaatggtatagatgttgacaagtttgactacgttggccgtgactgcagagcatgtggtcttggctgtaatttccagtattggaggttgtagtgctggtctcgccccatgaaaattatggattatcggttaaaagtggttttggggatgaaagactctaggagatgaactggagatgtgttagaaaataggtttattttcctattctgtcatcattattaattcgagtacgcatgagagttgcgtatcattgtattaatagaagaagagtgtacaaagtacacaaggccaataggccgcaacagagtatgaggggtacttaagaaaagagacaacaacagaaacgaccaccacataacaccctaaggcctttaaccatgatcactaggcaacgacaggcccttcgccccaacggaccaattttaggcatttaaatatgtgat

SEQ ID NO: 216260 - DNA, 1129 bp, Zea Mays
atggatgacccccgctggcgacgctgcggcggaccgagagggagcgtgccgaagttagtcgatccggagcagggcgtggatgctggagcaggtcgggcgtgtgcatcgacgacgcgaacacggggtggtggtggtggggagggagtgagggaggcgcgtagtgggggcagagctggagaagaagggcagctcgtgttggccaccgaggtatcctcccggagagagggagacgggacgggcgacggcggcgttcgggtcggctccgaagaggatgcaggagcgacgcagcgtgccccttcgaggtcatcgtgcggcgccgtgcaacttccacgcggccacgccatccccacctccgaaaggcacaacccccacgacgcaggagcgctggctccgggcgttcgggtactcggagacggcgttgggagaggagaaccgcaccgcggcgcagacatgggcgagttctgcccctccccgcagggggactccgcgctggcggcgccgcccttgacgctctcctccccgtccccagcaacggcggttaggccgagctacgggagctgcgaccgccgctacgtgaagctggtcttcgacaacctccacgggagcatctccgtagacccgttggccctgcagtttgttgataccgaagagtttcagaggttgcgggacttgaaacaacttggtcttacatatctcgtctatcctggagcggttcacacacgcttcgaacactcattaggtgtatattcgttggctggaaaggctataaataatcttaagacatatcagggagaagaacttggaattgatcatgttgacatgcagactgtaaaacttgcaggtctcttgcatgatatcggacatggacccttcagtcatttgtttgagcatgagtttcttcctcgagttgatcctggctcatcctggtctcatgaagatatgtcagtgctccttttggacagtattgttgacaaacatgcaatagatattgaaaatggttatctcaaaatggtcaaggagatgataactgccagcgctaagcctaccagcacaaaagtttgactacgttggccgtgactgcagagcatgtggtcttggctgtaatttccagtattggagccctgcttga

SEQ ID NO: 216261 - DNA, 1169 bp, Zea Mays
aacgagagtcgcttcactgtttgagcatctagcgttggtcatgcacgatgtcttccgggggattggtcaccaagaaccatcgtatccccgccagatcgcagatcggtggtccgccgcaccggaaaaagctagctcgggagcaaaggcaaagcagccaacaacaatcagagggacaaacagagagcaacgaagctcgcgaatcgagagcgccaggaagaagaagaagaagaagatgaagatgaagatgataatgataatggagcaggaggaggaggcgtgctcgtcttattgctcctctccgctgcggcagtgcaggatttgctatgacgaggaggacgagcggcgctccgccatggagtcgccctgcgcctgctccggctccctcaagtatgctcacagaggatgcgtgcagaggtggtgcgacgagaagggcagcaccgtctgcgagatttgccttcagaacttcgagacgggctacaccgttcctcccaagaaaacccaaccagctgatgtcgcggtgaccatcagagacagcgtggcggtgcccaggcagcagaacgagcccgaggacgaggaggagcaggtggccgcggcgctgatcggagccagcgatccggagtacgccgagtgcgcccgcgccgccggcaggagcgcgtcctgctgccgctccgtggccgtcacgttcacgatcgtcctgctgctgaggcacctggtcaccgtggtgacgctcggagcggccaaccagcagcagttcgccttcagcctcctcacagtgtacatgctgcgggcgagcgggatcttgcttccgttctacgttgccatgaggctcatctgcgtgatccagcagggacagaggcagtacaggctgcatctgcttcaggagcagaggagacacgcgttgaggcggttggtctggctgcagggtcagggacagcaccagcaaccgcatgtcatcctggttcgctgaggaacaaggcattcgtctagtgctcatacgctcgttcatccaaccatccatcacgtacaagactgtaaatttgtaaaagggacaaaataaagaagaaaaggagaaagaaaggtggcgcaatgttttcgattgccaatcttctcttaacctgtttacttggttttaatccgtattaacttctactgctactgctttgtttttg

SEQ ID NO: 216262 - DNA, 2504 bp, Zea Mays
ctctgcgtcaggccgtcgctgaccgcccccgcccgcgaccgctgaggcgctgacgcctacctgcaatggcgaagccctcgcgccagaacctgacccatgcctccgtcacatccctgcgccgcttcggcggacagtcgtcgctgccgccttcgggcgcgtcgccggcgttacggctcgcggcggcggcgctcctcctcgcggccgcagtggcgctgccctgcgccgtgctataccgcgccaccgtggagactatggagcccatccacgtcccgcgtgtgcacaggcccttattgcctgcgccgccgcttcctccggttcaggtccccgaggatgacagcgacttcgatcccttccccacaggcgatctggacagcgaagatctcaaactagaactggttctgcaggaggcttccatggacaataagaccataatattgacgaccctcaacgctgcatgggcttcaccgggctcagttatagatcttttcattgatagttttcggcgtggtgttggtactagttcactcttgaggcatcttgtgatagtagcatttgattttaaggcatatgaacactgtgtcaagatccatccctactgttatgctcttccaaccaaggatgttgatttttctgaagagaagaggtttcagacaactgggtatctggaaatgatgtggaaaaggcttgatttcttgcggctagtgcttgaaaaaggttacagctttgttttctcggatgctgatatcgtgtggttccgcaatccatttccccacttctatactgatggagactttcagattgcatgtgatcactacgtagggaatgcaactgacttgaggaacatagccaatggagggttcaactatgtgaagtcaaacgaccaaagcatagagttctacaagttttggtattcttcccgatttagatatcctgggtaccatgatcaggatgtatttaattttataaagcatgatcgttacactacggacattggtctgacaattaagttcttaagtactacctacttcggcggcatatgtgagccaagcagagatttaaacaaagtttgcaccatgcatgcaaactgttgtattggactgcagagcaaaattcatgacctaagaatcatgatggaagactggagtaactatatgtcgatgccaccgagcttaaaacaattcagggcactgtcgtggagagtaccacaaaattgcagtctttcgttactaagcctgtgaggattgtgaagtggctcatcaggacaagcaattcaatactgtaaaacatgtaaactttcgaacatatgcttttggaagaaacatttcaaaggaacagacatcaagtattaactctgccaattcgatggcattagctaatggtgccaattacgtgccattacctacctggatcagcaggggccactcacgcattgttgagaaggatttcaaggtttcagactggaggggatcaagggtgttagggaggaaccatctctgaggattttgtctgcacagctaggaaggatgaactgcagtgacgaggatgagaataggtgtgtcacaagaggcaagaatcagaccaccaggagtggatgcacagtgaagtcatcccaggcaaaaaggcccacccggaacttcaatatcaaagttgaccacacaatcggttggttcggtaaatctgtagaacacacttgatagaaaattcgtttgggtccacatcacctaagcgcacactttaaacacacagcaaaggaccaaccactcctagctagtaatgtcatcggcacccagtgtgtgctagttttacatagtgtgaataactgaatgtttccaggcatgatgaggaagacccacctcaggaatcttgcagtagtcccgtgcactgagctgtagcgacatgacgttgtcacgcagaatggagcaagcgagtgcagagtggccacttgacgtcgtcacgcagaagactgttgcagtcctctggagccattttccaggcgagcagagcagtggttttctcgtactgattgtctgagaaagaagtggatacgccaaaagcgcagttgctcaacttactcgaattactgaagtgggctaactaatcgacgtcggctatagaaagagaggggagggggggaggggaaagaaaggctaatcgacttccccagtcaggctttgtttagcggatcctgtgggttggagcctgaattgctatcacctttgttttcagcgcaggctgccctgccccgcccgtcccatcgcggagatctctgtggatatatacgatacgatgatgtcgtccgtgccatgattcaccttggcaatcgcacggtgcggcggtcgtgatccaggagaaaaaaggcaaaggcgttgttttaaagacaagagacacgaggcactggtactaacgatagggttccgattggatttccggaggtaatggaatggctgtgccgcttgtgcgcctcacactcgccccacctttgttaaagacagaagaagacggtt

SEQ ID NO: 216263 - DNA, 2434 bp, Zea Mays
atggcgaagccctcgcgccagaacctgacccatgcctccgtcacatccctgcgccgcttcggcggacagtcgtcgctgccgccttcgggcgcgtcgccggcgttacggctcgcggcggcggcgctcctcctcgcggccgcagtggcgctgccctgcgccgtgctataccgcgccaccgtggagactatggagcccatccacgtcccgcgtgtgcacaggcccttattgcctgcgccgccgcttcctccggttcaggtccccgaggatgacagcgacttcgatcccttccccacaggcgatctgcgaagatctcaaactagaactggttctgcaggaggcttccatggacaataagaccataatattgacgaccctcaacgctgcatgggcttcaccgggctcagttatagatcttttcattgatagttttcggcgtggtgttggtactagttcactcttgaggcatcttgtgatagtagcatttgattttaaggcatatgaacactgtgtcaagatccatccctactgttatgctcttccaaccaaggatgttgatttttctgaagagaagaggtttcagacaactgggtatctggaaatgatgtggaaaaggcttgatttcttgcggctagtgcttgaaaaaggttacagctttgttttctcggatgctgatatcgtgtggttccgcaatccatttccccacttctatactgatggagactttcagattgcatgtgatcactacgtagggaatgcaactgacttgaggaacatagccaatggagggttcaactatgtgaagtcaaacgaccaaagcatagagttctacaagttttggtattcttcccgatttagatatcctgggtaccatgatcaggatgtatttaattttataaagcatgatcgttacactacggacattggtctgacaattaagttcttaagtactacctacttcggcggcatatgtgagccaagcagagatttaaacaaagtttgcaccatgcatgcaaactgttgtattggactgcagagcaaaattcatgacctaagaatcatgatggaagactggagtaactatatgtcgatgccaccgagcttaaaacaattcagggcactgtcgtggagagtaccacaaaattgcagtctttcgttactaagcctgtgaggattgtgaagtggctcatcaggacaagcaattcaatactgtaaaacatgtaaactttcgaacatatgcttttggaagaaacatttcaaaggaacagacatcaagtattaactctgccaattcgatggcattagctaatggtgccaattacgtgccattacctacctggatcagcaggggccactcacgcattgttgagaaggatttcaaggtttcagactggaggggatcaagggtgttagggaggaaccatctctgaggattttgtctgcacagctaggaaggatgaactgcagtgacgaggatgagaataggtgtgtcacaagaggcaagaatcagaccaccaggagtggatgcacagtgaagtcatcccaggcaaaaaggcccacccggaacttcaatatcaaagttgaccacacaatcggttggttcggtaaatctgtagaacacacttgatagaaaattcgtttgggtccacatcacctaagcgcacactttaaacacacagcaaaggaccaaccactcctagctagtaatgtcatcggcacccagtgtgtgctagttttacatagtgtgaataactgaatgtttccaggcatgatgaggaagacccacctcaggaatcttgcagtagtcccgtgcactgagctgtagcgacatgacgttgtcacgcagaatggagcaagcgagtgcagagtggccacttgacgtcgtcacgcagaagactgttgcagtcctctggagccattttccaggcgagcagagcagtggttttctcgtactgattgtctgagaaagaagtggatacgccaaaagcgcagttgctcaacttactcgaattactgaagtgggctaactaatcgacgtcggctatagaaagagaggggagggggggaggggaaagaaaggctaatcgacttccccagtcaggctttgtttagcggatcctgtgggttggagcctgaattgctatcacctttgttttcagcgcaggctgccctgccccgcccgtcccatcgcggagatctctgtggatatatacgatacgatgatgtcgtccgtgccatgattcaccttggcaatcgcacggtgcggcggtcgtgatccaggagaaaaaaggcaaaggcgttgttttaaagacaagagacacgaggcactggtactaacgatagggttccgattggatttccggaggtaatggaatggctgtgccgcttgtgcgcctcacactcgccccacctttgttaaagacagaagaagacggtt

SEQ ID NO: 216264 - DNA, 2586 bp, Zea Mays
ggtgtgtgcgcattccaattgtcgagcggtggtgggagcagaggcgaggaaaggacggtcggacggactggacgtggacgggaataataaaaacggaacggaaacggcaacaagtaagccaggccaggcaacccacaacacaaggagaaggggaagggcggcgagggaagggctccgcgtcgtgtcccttctcttcctcctcctcctcctcctctctccaacaccccatccatcagcgctgccctccgcattgctcttgatcccatccagtacatcgattctccccccaagatcaaaggccggaggaggaagaaagggagtcggccatgggatgcttttcatgctgctgtgtggcagatgacgacaacgttggcaggaggaagaagcatgacgatccctatgttcctatccctgctcatgtttataattttggacctagccggttcccagccccaacccctgtcatctccactggcagagctcagccaattgcagtaccggccattcatctggaagagctgaaggaaattacaaaaaacttcagcagtgatgccctcattggcgagggctcgtatgccagagtctattttggtgtgctgaaagatgggacgaaatctgcagtgaagaagcttgactccagcaaacagcctgatcaagaattccttgtgcaggtttcagctgtctcaagattgaagcatgagaatgttgtccaactcgtcggatactgcgccgaagggagcacccgcgtccttgcttatgagtatgcaactaggggatcattgcatgatatcctccatggtaaaaagggtgtcaaaggagcccagccagggccagtcctgtcatggatgcagcgagctaggattgccgtatgtgctgctcggggtctcgagttcctccacgagaaggccgatcctcgagtggtccaccgcgacatcaagtcaagcaacatactgctctttgaccatgatgttgcgaagatcggggacttcgacatctcaaaccaggcccctgacatggctgcgcgcctccactctactcgcgttcttggcacctttggctaccatgcaccagaatatgccatgactggacagcttagcacgaagagtgatgtctacagctttggagttgtgctgctggagcttttaaccggtcgcaagccagttgaccacacactgccccgtggccagcagagccttgtgacatgggctacaccgaggcttagtgaagacaaggtgaggcaatgcgtcgatccaaggctcggagacgaataccctccaaaggctgtagccaagatggctgctgtggccgccctctgcgtgcaatacgagggtgaattccgtcccaacatgagcatcgtcgtcaaggctctgaaccccttgctgcacagccggtctggcaaccgccctactgcctcgtcggcctcccacgctgccgagcgatccggactgtgatttctcatcgctgcgacaactttgggttcacgaaaaaggaccgtcttgtggagcgttggtgttgctgtgtcgtgactgccaaagccttggcgcagagaagagctttgccatgcagctgtgtattgtaaattgttttgtaagcgatgcgcctcctggtttgtgtgccctgtcatcatcctattctattctagaaaatggtgtacgatggatcatggatgataccaactatttggtctcttttggaatgcgaaaatgcagcacttggcttcctatgtgtgtagatcagctttgttgttctattgctacaaaccaggaatactacagtatgaatattacaactactggcagccggcatatgtaacagagaagcatgcacaacagggcaggacaggaaccgctcctggactgttgtcctagtcctaattgtgattgaaccaaaattgaattctatttcgattattagctagctagcgtatctatggttcaaaatgttttctcagacagcagccacgagacgagcgcagcacctcgatctccaactagggaagctgcatatctatggttcaacatcagcttcttcatcggagtcggcggctaggacatcggcagccgtcgtctgctccctgttagcttgttcaccagagtcggcagctgggacatcgacagccatcgtctgctctctgttagcttgttcaccgaaatcggcagctcggatatcttgttcatcggagtaggcagctaggacatcttgttcaccggagtcggcaggtgggacatcgacagtcgtggtctgctccctgttagcttgttcaccggagtcggcagctaggatatcttgttcaccggagtcggcagctgggatatcggcagccgtggtctgctccctgttagcttgttcaccggagacggcagctgggaagcctgggatatcttgttcaccggagtcggcagctgggacatcggcagccgtggtttgctccatgttagcttgttcaccggagtcggcagctgggacatcatgttcaccggagtcgacatctgggacatcggcagccgtggtctgctccctcttagcttgttcaccggaatcgggagctgggacatcttgttcaccagagtcggcagcagggatatc

SEQ ID NO: 216265 - DNA, 3102 bp, Zea Mays
gcaccaccaccaccgtgccgcgagcgaagtgacgtcgcgttcacttccctcataaaatctcgccccccactctctctctacccgagcccagcagtaatttttttttggggaaggtgaagcgagaggagcaggaggagagaaaggggaacgaggccggccgcgaatcggaggggaattcggggggcggggctcggtccggccggaaattcgcgcgattcgggcgcgggcgccgcggatgtgaagatctggtgctcggcgggatgacttcttcggcggcggccgcggctgctgccgcccaggtggcgggaggaggtggaggcggcgagggagatgccgccgctgcggcgcgaggtggaggcgtcgaccaaccaggtggctgagcagcacatgcaattttacgatctcccgtggaagatcctgtgtgaggtcatgaacgttgaattgaaggctgagccagacaatgatgaggtttatgcccagctcactctgctacctgaatcaaagcagccagaggagaatggctctagtgaggagatgcctgcttcacctcctgctgcacttgcaaggccacgcgtgcactccttctgcaagacattgacagcctctgataccagcactcatggtggattctcggtgctgcggcgccatgcagatgagtgtcttccgccactggatatgacccgtcaacctccaacacaagagcttgtagccaaggacctgcatggtgtggaatggcgctttcgccacatattcagaggtcaaccacgaaggcatcttttgcagagtggctggagtgtttttgttagtgccaaacgtcttgttgctggcgatgccttcatctttctaagaggtgatagtggggagcttcgtgtaggagtcaggcgtgccatgaggcagcaagcaaatgttccgtcttcagtaatatcaagccacagcatgcatcttggtgttcttgctacagcatggcatgctgttaacactgggaccatgtttactgtctactacaagcctaggacaagtccagctgagtttgttgttccctgtgatcgctatatggaatcactgaaacgaaattaccctatagggatgagatttaaaatgaggtttgaaggtgaagaggctccagaacaaaggttcactgggaccattgttggaaatgtggatcctgatcaagctggatgggctgaatctaaatggcgttacctcaaggtgaggtgggatgaagcttcctccattccacgtcctgaaagggtttctccctggcaaatagaacctgcagtcagccctccccctatcaacccacttccagtgcacagacccaagagacctcgctctaatgctgtagcttctctgcccgagtcttcagctccaacaaaagaagctgctccaaaggtcacattagagactcaacaacatgccctgcaaaggcccttgcagacccaggataatgtggccccgaaaagtgtttttggtgataacagtgaattggactctgctcataagtcctccctgcgaccgtcaggttttgatctggacaagagcaccattggcatgcagaggaagctgggttcagatatttggatgcgaatgaacagacctgatggttacagtgaaatgttatcgggatatcaaccacctaatgaaggtgcacggaattcgcagggtttctgttctttacctgatcagattgccgctggacgtcctaatttctggcacactgtaaacgctcattaccaagaccagcaaggcaatcacaatctgttccctggttcatggtccatgatgccttcaagtactggctttgggatgaacagacagagctatccaatgatccaggaagtcggtgggatgtctcagagttgtacaaacaccaagtttgggaatggagtttatgctgcactacctggccgaggcattgatcgatacccatctggatggtttgggcacacgacacccggtggtcgcgtggacgatgcccagccacgcgtgattaagcctcaacctttggtccttgctcacggcgaagctctgaaaatgaagggcaactcgtgcaagctttttggaatccatctcgacagcccagccaaatctgaacctttgaagtctccgccaagcgttgccacaccggcagctgagaagtggatggcagacggaatcgacgcagacaaaagccctgagccgcacaagacgccaaagcaactcggtgctacacaggtggatcctgtcccagagagatgcccacaagcttcaaggggcacacagtgcaaatcacaaggcgggtcgactaggagctgcaagaaggtccacaagcaaggaatggcgctgggcaggtccgtggaccttaccaagttcaacggctacacggagctggtggcggagctggacgagatgttcgacttcaacggcgagctgaaaggctgtagcaaggagtggatggtcgtgtacaccgactacgaaggcgacatgatgctggtcggggacgacccctggaatgagttctgcagcatggtgcacaagatcttcgtgtacacgagggaggaggtccagcgcatgaacccgggcgccctgaactcgaggccggaggacagcggcctcgccaattcgacggagaggggctccgcatctactgctgctgctagagaggcacccggctaccagtccgcctcgtcgcttaactccgacaactgctgatgccttggcagctagctggtcgtcccaagtagtagagaacaaggcaaatgtatccatagatctccttgtagcggagcttaatgcctttttttcccctttctaatatgcattggatgagcccgtagcgcaccgtagtagtatctaaagctggtgttctgagttggttggaccttcctgcagttttggtttctccttctgatgtggcaagttttagctggtcgcacctacctaatgtatgcttagcaaacgaagtcccactaagcgctgtacataactgcccctccctgcatcaactctaatatatcatctgcttaatcgtcacccctgggcccccgtgctggttgctcaagatcccagctgcttgttgtggcgcttggtttggttcgttgtcggccgtggctcatgtttgtt

SEQ ID NO: 216266 - DNA, 1634 bp, Zea Mays
gagggatccagcgtacacgtctccggcgccgcgcgccgccgatgaggccaaccactgactgcgtgactgcgtcgtggatgcagatgcacatcgaaggtctgggtatgttggccttttctaccttcctctcctccggcagcggccaccagtgcaccgccgcagggggccagatctgtgcgccgtctggccttaaggtgaccttcttctacgtctccctctatatcgtggccgtggcgcagggcggccacaagccgtgcgtccaggcgttcggcgccgaccagttcgaccagaccgaccccaaggagactgtctccaggagctccttctttaactggtggtacttcggcatgtgcgccggcactgccgtcacgctcgtgctcctcagctacgtgcaggacaacatcggatggggcctcgggttcggcatcccgtgcgccgtcatggcagccgcgctcgccgtattccttcttggcactcggacgtaccggtactacgtcactgccgggcagggcctgttcgctcgtgccggcgaggctttcgctgagtggcggagcaggcgcaaggcgggccagcttgttcaggattcccaagaactcgatccgcccgcagcagatgcgccaaggttcagtgctggcgtcgatgtggaggagcaggctgcagtgagaaataatggaggcctcgtcaaggaggccaaggccatcatccgtttgttcccgatatgggcggcatgcctgctctacgcggtggcgtactcgcagtcgtcgacgttcttcacgaaacaggcggcgaccctggaccggcggatcgggcggcacgtccaggtgccacctgctgcgctgcagagcttcatcagcgtcacaatcgtggtcatcatccctatctacgaccgcgtcctcgtgccggtgtcgcgccggtactccggcaaaccatcagggatcaccatgctgcagcgcatcggcacggggatgttcctctcgctcttgtccatggtgatcgcggcgctcgtcgagaagcaccggctccgcgtcgcgggggacgctggactcgtggacaagccgaaggtcccagtaccgatgagcctgtggtggatggtgcctcagtacgtgctgttcggggccgccgacgtgttcaccatggtcgggctgcaggagttcttctacgaccaggtgcccgacaagctgcgcagcctcgggctggcgctctacctcagcatcttcggcgtcggcagcttcatcagcagcgcgctcgtgtcggtcatagacagggtgacgacggacagaggcgggagctggttctccaacaacctgaaccgtggccacgtggactacttctactggctgctcgcggcgctcagcgccgtcgagctcctcgcctatgtcttcttcgcggtgacatacaagtacaagaacagaggagccgtacatgcaactgttgatggttagcgggaggagtaagtacatagtataggttatggtgcatcgtacttgtaaatctctctttttttcctcaactaggatttgtgatccaaactttaccttcgataatgattcccgttttttatgaattggtgggccatgtggtcattcaatttttaggaatgtacaactctgagactgaatcgttttttcaagcct

SEQ ID NO: 216267 - DNA, 1575 bp, Zea Mays
agcaggcgctttgaaaggtgccgggggcaaggctgcgtgcgtggaggactggaggtggctggataggcgccagttgggaggaatggccgatggttgtgctttcgttggcgtgtggagtttatggggaacggttggtgcgtgccattgctgccgcggtggtttgaccattagtttcattgcaaggacagcagcttttggtctggactctggagatgtcagtcactatggaacagtggtggtgtaggtcaattccctgtgaggtttcgtgttgccttcaacatacgtgcaggagttgccaacttgccacattccaactactgctgtagttgtagctgaaccggccggctacaaaacagtacagtaattcactgttatgaagcaatgttccgcagtgaagattggcactgctattcacttgaatgggtcttctttcttgataaatgaatcttgatattcgaaatggaactctaggcagctttatctttgaatttgctttctttaaaatatcaacatgagatcggtagaactgaggaaaaggaaccatttaactaatgtctgtttattttttggggcccttatcaggtatcaggaacagcattggtgctagatgagatcatcaatcatgttcagtctctccaaaggcaagttgagtacttgtcaatgaggctcgcagctgtaaacccaagggtcgattttggtgggctagacagctttctgaccacagagtgtggaaggatagcaggcttcaactgcaagaacggaatcgacttggagcaggtaacctggccagaaatgggtgttcatggagcaaggcagctgatgcaacttcaacagcagttctggcatggcgatttaacacatccacaccaagtggcttcacagtgggaaaagcgtggggatggccatcctcccgtctttagcaactccagtccctctctcttcggctatgatctaacaagctctggagcccagcaaaccccggcgagcaagctaaagacggagctttgagcgacgatggatggtagatagcattgtcaggagagcaggctgaacatatgcggtgggggcgcagcagcgacatgatttcagcaagttgaccaggtcaggctacaaacgggctgggaatgttgatgtgaagcgcatggagaccaacattttcagagacagagaggatgtacatatagcgatagagaatactattggtgttgagctgaagacgggaataccatagttgtattgtagagatgggcacgccctgctgctatcgctgaagagatgggagggcgagcgatactccggtctagttgctggtattcttggtgtatttcttactataatggcccaatcttaaggttatatgagcagcaatttttatgaaccaaaacccaaaaaaaaccatcatgggtcatcatatacccttctcgaatgcatttcaacaaaacatgaatgtagcacagtataactacatgtaacacacgtgcttgttacaatcctactgttccaagccattctaggttttctttaaggcatacggattttgttacatatttatatatggcttttgttatgtacttt

SEQ ID NO: 216268 - DNA, 687 bp, Zea Mays
cggatctgggcaaaccggtctgttctactgccctggatccaagcagtgtgcgttgtggagacaggagctattggaggagcccagcaaaccccggcgagcaagctaaagacggagctttgagcgacgatggatggtagatagcattgtcaggagagcaggctgaacatatgcggtgggggcgcagcagcgacatgatttcagcaagttgaccaggtcaggctacaaacgggctgggaatgttgatgtgaagcgcatggagaccaacattttcagagacagagaggatgtacatatagcgatagagaatactattggtgttgagctgaagacgggaataccatagttgtattgtagagatgggcacgccctgctgctatcgctgaagagatgggagggcgagcgatactccggtctagttgctggtattcttggtgtatttcttactataatggcccaatcttaaggttatatgagcagcaatttttatgaaccaaaacccaaaaaaaaccatcatgggtcatcatatacccttctcgaatgcatttcaacaaaacatgaatgtagcacagtataactacatgtaacacacgtgcttgttacaatcctactgttccaagccattctaggttttctttaaggcatacggattttgttacatatttatatatggcttttgttatgtacttt

SEQ ID NO: 216269 - DNA, 2715 bp, Zea Mays
gccgccaccaccgcgccaaatcaagccctccagtcacattccattcgacggccggagcggcgcctcctacctccgacctccttctacaagtcagatccgtccacatatacaacactctcaggaattccctcctctaccaccgcaccgtccacgcgaactcaaatcctgcaaactcctcgcgaccacctcacgcggatcggcgacggcgatggtggcggcctcctctaccgtcgtcgaggtagcggtggcagcagctgcggcggcggcgtcagctttgccgcaggagcagcaggcgcagccgcggccgcggccgatgcacgcgggtggcgccaatggccgccaccacgcgtacagccgcaaggacaagtcgctcggcctcctctgctccaatttcgtggttctctacaaccgcgaggacgtggagtccgtcggcctggacgaagcggccaaacggctcggcgtggagaggcgccggatctacgacattgtcaatgtgcttgagagtgtcgggattctttcgaggaaagccaagaatcgctacacatggataggtttcggcggaatcccaatggcgttgctagaactcaaggaaagggcgttaagggacaagtctggtttggcttctcagcaaaccgagcagcaatctgctgccacaatttctgatgacgaggatgatgatacattgggcaaagaagttgctaatatcgagaatgagaaactgagtcagactgttaacaatccttctgacaaacctggtgcaccccgttgtcgccttagatctgatcataggaaagaaaagtcacttgggttgctcacacagaatttcgtgaagctctttctcaccatggagcaggttgacacgatctcacttgatgaagctgcaaagctgctccttggggaaggccacgaggagaccaatatgagaactaaagttcggaggttatatgacattgccaatgtcctgtcttcactgaatctaattgagaagatacagcaaggggactcaagaaagcctgcgtttcgttggttgggtagggccacaacgccggacacagaaaatggtgtcacagttgttgtacccccaccagggaagactaaatcgaacaaaagagcatttggaactgaactcactaacatcgacatgcatagaagtaatctagattcaaaagttcagaagaaagcaaaactggcaaagagtggtggcgatgtcttgataaattgcaaattggatagtggtggcgatgtcttgataaattgcaaattggatgtacggaatcggcttggacagggtaaacaaagtggcattgtttatggtcctttccaccctgctggcgcaaggaaacatgaacttgctggtggcaataaccccgggcaaagggagatggccgaggactggaagagcctttctgctccatttcgaccacagtacaagaaccaagcactcagtgatctttttgcccattatgttgatgcgtggaagacatggtattctgaatttgctcaaggcagcaacatcatgcaacaacactttggccattttggtaaccattttttgtaggcaaattatagggtcaagcattgcagttcttagtgcacgcttgtgtattttacctgtacaacctgttaaaaggggagagaacaagacatgattaggcctagggttcattgtatttactcaatgcaggacatctttaggctattttaggtggaaaactagagtggaactattagagagagatgttccccaatctctctaatagaaacatcattatcatctcacctttaagttctctattgttaattgttgtttatgtgcttacctttgtgggttctacaactgtctgtcactagccattcttatgaaacttctcataactaagtatatcttgcacttgtctatcgcaaccaaaaataaaataaaattctgttcaaattatatttcagatacaatcacaatgtcatcaattctttcctttccgctgtgatcataattcttgctacaattcagatgctacaaaatagggaaagcctcgaggcctggcctgtagatgtctgtactcagattatgcaaagccagctgatcccatcgtcttgctttaatttaaccgtaaagacaattatggtcgcgtaacgacaccaggactccaggagtacataggagtggtggtctcagcatggtctacagtacaagcaagagtttcaggctgcaaaattgtgatcccaatattttggttgtatgggttgttgtcagtgtttggggaataccatatctccaaaggacatcaagacgtattcaaatatccctgtaactgtcatgcgctagatgccttgacccaccgagcgctatgcaaagcttgagaaggatggttcgtcgaaacatgtcccaagtgattgactcctcgccattgcttgggttgttctgaataaatatgtttagttggctacttgccttttggtttgtctagctaacacaatttaaatcaaatatttccccaacgtcatcgacaggaacactgtatctactgaccattcgtgattttttttcttggactatggagagcatctgagctacaaagctgttctcttggctacaacttgatatatcaaattgattttgtttgtcccttagtaaatttcagatcttagtgcagataatgatgcgctaatctatttacagttgcagccacttgcgctactaattttccaagaatgaaa

SEQ ID NO: 216270 - DNA, 2292 bp, Zea Mays
cagacgcacgggagcagacagagaaaattttgaaacgcgggcaggccgccaccaccgcgccaaatcaagccctccagtcacattccattcgacggccggagcggcgcctcctacctccgacctccttctacaagtcagatccgtccacatatacaacactctcaggaattccctcctctaccaccgcaccgtccacgcgaactcaaatcctgcaaactcctcgcgaccacctcacgcggatcggcgacggcgatggtggcggcctcctctaccgtcgtcgaggtagcggtggcagcagctgcggcggcggcgtcagctttgccgcaggagcagcaggcgcagccgcggccgcggccgatgcacgcgggtggcgccaatggccgccaccacgcgtacagccgcaaggacaagtcgctcggcctcctctgctccaatttcgtggttctctacaaccgcgaggacgtggagtccgtcggcctggacgaagcggccaaacggctcggcgtggagaggcgccggatctacgacattgtcaatgtgcttgagagtgtcgggattctttcgaggaaagccaagaatcgctacacatggataggtttcggcggaatcccaatggcgttgctagaactcaaggaaagggcgttaagggacaagtctggtttggcttctcagcaaaccgagcagcaatctgctgccacaatttctgatgacgaggatgatgatacattgggcaaagaagttgctaatatcgagaatgagaaactgagtcagactgttaacaatccttctgacaaacctggtgcaccccgttgtcgccttagatctgatcataggaaagaaaagtcacttgggttgctcacacagaatttcgtgaagctctttctcaccatggagcaggttgacacgatctcacttgatgaagctgcaaagctgctccttggggaaggccacgaggagaccaatatgagaactaaagttcggaggttatatgacattgccaatgtcctgtcttcactgaatctaattgagaagatacagcaaggggactcaagaaagcctgcgtttcgttggttgggtagggccacaacgccggacacagaaaatggtgtcacagttgttgtacccccaccagggaagactaaatcgaacaaaagagcatttggaactgaactcactaacatcgacatgcatagaagtaatctagattcaaaagttcagaagaaagcaaaactggcaaagagtggtggcgatgtcttgataaattgcaaattggatagtggtggcgatgtcttgataaattgcaaattggatgtacggaatcggcttggacagggtaaacaaagtggcattgtttatggtcctttccaccctgctggcgcaaggaaacatgaacttgctggtggcaataaccccgggcaaagggagatggccgaggactggaagagcctttctgctccatttcgaccacagtacaagaaccaagcactcagtgatctttttgcccattatgttgatgcgtggaagacatggtattctgaatttgctcaaggcagcaacatcatgcaacaacactttggccattttgatgctacaaaatagggaaagcctcgaggcctggcctgtagatgtctgtactcagattatgcaaagccagctgatcccatcgtcttgctttaatttaaccgtaaagacaattatggtcgcgtaacgacaccaggactccaggagtacataggagtggtggtctcagcatggtctacagtacaagcaagagtttcaggctgcaaaattgtgatcccaatattttggttgtatgggttgttgtcagtgtttggggaataccatatctccaaaggacatcaagacgtattcaaatatccctgtaactgtcatgcgctagatgccttgacccaccgagcgctatgcaaagcttgagaaggatggttcgtcgaaacatgtcccaagtgattgactcctcgccattgcttgggttgttctgaataaatatgtttagttggctacttgccttttggtttgtctagctaacacaatttaaatcaaatatttccccaacgtcatcgacaggaacactgtatctactgaccattcgtgattttttttcttggactatggagagcatctgagctacaaagctgttctcttggctacaacttgatatatcaaattgattttgtttgtcccttagtaaatttcagatcttagtgcagataatgatgcgctaatctatttacagttgcagccacttgcgctactaattttccaagaatgaaa

SEQ ID NO: 216271 - DNA, 3350 bp, Zea Mays
gacatactccaggaagaaaatgagtatttcgtcgcatgtaatgattgtgcttttcctgtttgccgcacttgctatgagtacgagcgtcaggagggcacacaagtatgccctcggtgcaagacccggtacaaacgccacaaagtcctcgagtccatggggatgaggaagaagaaggttctgatgacattgagagtgagtttgcttccagtatagctggacgatcaaatatagtgcatccataccgtgtctctgtggcagaaagctccatcaactcatgggacattgatagtgtcagtatcaccaacagtggagctagtgtccatttttatgaagagcatgttggaactccaacaaatcatcatgctcttgttgttcaccctaacaccggagaaattatgcgatataatcccttgcaaacaagaccaataaatcccaatagagacctagcattgtatggctatggatcagttgcctggaagaacagagttgagtggaaaacaaaacaacagaataaaatgcaaaaggtctcatctgatggtgaaggatctgatttaaatgattttgacagcgactgcgatattcccaggtgtgctgaaattatttgtgaaatttggttcgccttttcatggattttagaccaatttcccaagtggcacccaatacagagagaaacatacttagatcgattatcattaaggtacgagaaggaaggaaaaccaccagaacttgctcggatcgatgtatttgtcagtacagttgatccaatgaaggagcctcctttaattattgcaaacacagttttgtccatactggctgtggattatcctgttgataaagtttgctgctatgtgtcggatgatggtgctgcaatgcttacttttgaagcacttacagaaacatgtctatttgcacgaaaatgggttcccttctgtaagaaacacaaaatcgagcctcgggctcctgaatggtattttgctcagaaaattgactatctaagagaaaaggttcacccagagtttgttcgagaacgacgtgcaatgaagagagaatacgaagaatttaaggttcgcataaacacagtagttgctaattcatgcaaagttcccgagggaggatggtccctaccagaaggagctccatggcatggaaataatgttcgagaccatgccggaatggtccaggtcatcactggtaatgattgtgtcatggatgatgctggaaataagctgccttggttggtctatgtttcacgtgagaaaaggcctggacatgatcatcataaaaaagccggtgccttgaatgcattgctgcgaacttcagcaattctctccaacgcaccttttgtactgaatgtggattgtgaccactatatgaacaatagcaaagcgctacgggaggcaatgtgttttctgatggacccagtgttgggagagaagatttgttatgttcaatttccgcagagatttgatggcattgatcaacacgatagatattcaaaccacaatgttgtgttttttgatattaacatgaaaggtcttgatgggatccaaggaccaatatatgttgggactggttgtgttttcagaagacatgctttgtatggttatgatgccccaactgcaacaaaacctcctagcaagacatgtaactgctggccaaagtcatgctgcttgtgttgtggatcgaaaagaaaatgttccaaagctaagaaaaaacaagaacaccaaaagaaagtgaaatgcaggaatgcgtccaagcaagtgcatgctctcgaagtagctggaagagaaactgcacctcctgtgcctcgagaaaagtttgagaagagatttgggcagtcagatgcatttttggcttcaacattgcaagataatggtgaaggttgtcacttcgacatgctcaaaagccttgatgattgcatccatgtgctaagttgtgggtacgagaataagacacaatgggggaaagaggttggttggatttatggatctgtcactgaggatatcctcacgggcttcaagatgcactgccatggttggcgatctgtgtactgcatgcccaagagaccagcattcaaaggatctgcacctatcaatctcactgatcgtctccatcaagttctaagatgggcacttggctctgtggagatcttccttagcaagcactgcccaatatggtacgggtatcgatgtggtctgaaaccattggagaggttgtcatatatcaactgtgtcatctatccatggacatcaatcccgctgctaatctactgcgccctgccagcgttttgcctgttatcagggaagtttatggtgcctgagatgaatgtctattcgagcatattgttcatagctctatttgtctccatagcagctaccagcatcctagagatgcagtggggaggagtcggaatcgacgattggtggagaaacgagcagttctgggtcattggcggtgtctcctcgcacctctttgcgctgtgccaggggctcctcaaggttctcggtggcgtgagtaccaagttcagggtgactctgaagggaggcggcacggacgagttctcagagctgtacgagttcaagtggacctggctactggtccctccgatgacactgctcctgctaaacgtcgtcgcggtcttggccggcgtgtccaaggcggtgacggacgggtacgaagcctggggcccgctgctcggcaagctgttcttctccttctgggtcgtcctccacctccacccgttcctcaagggcgtgatcggcaggcaggacagggtgccgaccgttgtcgttgtgctgtcaatgctactggcatccatactctctctgttgtgggtccgggtgagccccttcgccaccaagttcgatggacctgttctggaggtctgtggcttggattgtgagtgagggaggtaggagaagatacagcttctttgcttagggaataggttttgagttaccccagtgctagagtagtgagagggttctattctttcgttagctattcaacgttttctatctgattagcgtaggttttagtgaagcggtgttttatgtttatgagcaggagggaaatagagaatggagaagatggtagtgctgctgctgactgttgtagatattgagacaggcacaatagagaatagagtgacacttggtatggccataaatcgctactttttccactagagcgaatagcattctccgtgtacatctgttgagagaactgtgctttttcacttgcaccatttcaaacttcgaatgtggccgtgcttcttcgatcgaaatttgggggaacttggtatcgatcttagtacattttgttttttgtgagggcagtcctagtgcttg

SEQ ID NO: 216272 - DNA, 3096 bp, Zea Mays
atggacgctggagggctcggcttcctcgtcgcgggctcccggcgcgagttcgtcgtcctcaacgtcgacgatttctccaagcaaggatcttcacagggctgtccagactatatttgtcagatatgtggagatgacattgacatactccaggaagaaaatgagtatttcgtcgcatgtaatgattgtgcttttcctgtttgccgcacttgctatgagtacgagcgtcaggagggcacacaagtatgccctcggtgcaagacccggtacaaacgccacaaaggtagtcctcgagtccatggggatgaggaagaagaaggttctgatgacattgagagtgagtttgcttccagtatagctggacgatcaaatatagtgcatccataccgtgtctctgtggcagaaagctccatcaactcatgggacattgatagtgtcagtatcaccaacagtggagctagtgtccatttttatgaagagcatgttggaactccaacaaatcatcatgctcttgttgttcaccctaacaccggagaaattatgcgatataatcccttgcaaacaagaccaataaatcccaatagagacctagcattgtatggctatggatcagttgcctggaagaacagagttgagtggaaaacaaaacaacagaataaaatgcaaaaggtctcatctgatggtgaaggatctgatttaaatgattttgacagcgactgcgatattcccagaccaatttcccaagtggcacccaatacagagagaaacatacttagatcgattatcattaagagagaatacgaagaatttaaggttcgcataaacacagtagttgctaattcatgcaaagttcccgagggaggatggtccctaccagaaggagctccatggcatggaaataatgttcgagaccatgccggaatggtccaggtcatcactggtaatgattgtgtcatggatgatgctggaaataagctgccttggttggtctatgtttcacgtgagaaaaggcctggacatgatcatcataaaaaagccggtgccttgaatgcattgctgcgaacttcagcaattctctccaacgcaccttttgtactgaatgtggattgtgaccactatatgaacaatagcaaagcgctacgggaggcaatgtgttttctgatggacccagtgttgggagagaagatttgttatgttcaatttccgcagagatttgatggcattgatcaacacgatagatattcaaaccacaatgttgtgttttttgatattaacatgaaaggtcttgatgggatccaaggaccaatatatgttgggactggttgtgttttcagaagacatgctttgtatggttatgatgccccaactgcaacaaaacctcctagcaagacatgtaactgctggccaaagtcatgctgcttgtgttgtggatcgaaaagaaaatgttccaaagctaagaaaaaacaagaacaccaaaagaaagtgaaatgcaggaatgcgtccaagcaagtgcatgctctcgaagtagctggaagagaaactgcacctcctgtgcctcgagaaaagtttgagaagagatttgggcagtcagatgcatttttggcttcaacattgcaagataatggtgaaggttgtcacttcgacatgctcaaaagccttgatgattgcatccatgtgctaagttgtgggtacgagaataagacacaatgggggaaagaggttggttggatttatggatctgtcactgaggatatcctcacgggcttcaagatgcactgccatggttggcgatctgtgtactgcatgcccaagagaccagcattcaaaggatctgcacctatcaatctcactgatcgtctccatcaagttctaagatgggcacttggctctgtggagatcttccttagcaagcactgcccaatatggtacgggtatcgatgtggtctgaaaccattggagaggttgtcatatatcaactgtgtcatctatccatggacatcaatcccgctgctaatctactgcgccctgccagcgttttgcctgttatcagggaagtttatggtgcctgagatgaatgtctattcgagcatattgttcatagctctatttgtctccatagcagctaccagcatcctagagatgcagtggggaggagtcggaatcgacgattggtggagaaacgagcagttctgggtcattggcggtgtctcctcgcacctctttgcgctgtgccaggggctcctcaaggttctcggtggcgtgagtaccaagttcagggtgactctgaagggaggcggcacggacgagttctcagagctgtacgagttcaagtggacctggctactggtccctccgatgacactgctcctgctaaacgtcgtcgcggtcttggccggcgtgtccaaggcggtgacggacgggtacgaagcctggggcccgctgctcggcaagctgttcttctccttctgggtcgtcctccacctccacccgttcctcaagggcgtgatcggcaggcaggacagggtgccgaccgttgtcgttgtgctgtcaatgctactggcatccatactctctctgttgtgggtccgggtgagccccttcgccaccaagttcgatggacctgttctggaggtctgtggcttggattgtgagtgagggaggtaggagaagatacagcttctttgcttagggaataggttttgagttaccccagtgctagagtagtgagagggttctattctttcgttagctattcaacgttttctatctgattagcgtaggttttagtgaagcggtgttttatgtttatgagcaggagggaaatagagaatggagaagatggtagtgctgctgctgactgttgtagatattgagacaggcacaatagagaatagagtgacacttggtatggccataaatcgctactttttccactagagcgaatagcattctccgtgtacatctgttgagagaactgtgctttttcacttgcaccatttcaaacttcgaatgtggccgtgcttcttcgatcgaaatttgggggaacttggtatcgatcttagtacattttgttttttgtgagggcagtcctagtgcttg

SEQ ID NO: 216273 - DNA, 3408 bp, Zea Mays
cggaggcgcatcggacggatggacgctggagggctcggcttcctcgtcgcgggctcccggcgcgagttcgtcgtcctcaacgtcgacgatttctccaagcaaggatcttcacagggctgtccagactatatttgtcagatatgtggagatgacattgacatactccaggaagaaaatgagtatttcgtcgcatgtaatgattgtgcttttcctgtttgccgcacttgctatgagtacgagcgtcaggagggcacacaagtatgccctcggtgcaagacccggtacaaacgccacaaaggtagtcctcgagtccatggggatgaggaagaagaaggttctgatgacattgagagtgagtttgcttccagtatagctggacgatcaaatatagtgcatccataccgtgtctctgtggcagaaagctccatcaactcatgggacattgatagtgtcagtatcaccaacagtggagctagtgtccatttttatgaagagcatgttggaactccaacaaatcatcatgctcttgttgttcaccctaacaccggagaaattatgcgatataatcccttgcaaacaagaccaataaatcccaatagagacctagcattgtatggctatggatcagttgcctggaagaacagagttgagtggaaaacaaaacaacagaataaaatgcaaaaggtctcatctgatggtgaaggatctgatttaaatgattttgacagcgactgcgatattcccagaccaatttcccaagtggcacccaatacagagagaaacatacttagatcgattatcattaaggtacgagaaggaaggaaaaccaccagaacttgctcggatcgatgtatttgtcagtacagttgatccaatgaaggagcctcctttaattattgcaaacacagttttgtccatactggctgtggattatcctgttgataaagtttgctgctatgtgtcggatgatggtgctgcaatgcttacttttgaagcacttacagaaacatgtctatttgcacgaaaatgggttcccttctgtaagaaacacaaaatcgagcctcgggctcctgaatggtattttgctcagaaaattgactatctaagagaaaaggttcacccagagtttgttcgagaacgacgtgcaatgaagagagaatacgaagaatttaaggttcgcataaacacagtagttgctaattcatgcaaagttcccgagggaggatggtccctaccagaaggagctccatggcatggaaataatgttcgagaccatgccggaatggtccaggtcatcactggtaatgattgtgtcatggatgatgctggaaataagctgccttggttggtctatgtttcacgtgagaaaaggcctggacatgatcatcataaaaaagccggtgccttgaatgcattgctgcgaacttcagcaattctctccaacgcaccttttgtactgaatgtggattgtgaccactatatgaacaatagcaaagcgctacgggaggcaatgtgttttctgatggacccagtgttgggagagaagatttgttatgttcaatttccgcagagatttgatggcattgatcaacacgatagatattcaaaccacaatgttgtgttttttgatattaacatgaaaggtcttgatgggatccaaggaccaatatatgttgggactggttgtgttttcagaagacatgctttgtatggttatgatgccccaactgcaacaaaacctcctagcaagacatgtaactgctggccaaagtcatgctgcttgtgttgtggatcgaaaagaaaatgttccaaagctaagaaaaaacaagaacaccaaaagaaagtgaaatgcaggaatgcgtccaagcaagtgcatgctctcgaagtagctggaagagaaactgcacctcctgtgcctcgagaaaagtttgagaagagatttgggcagtcagatgcatttttggcttcaacattgcaagataatggtgaaggttgtcacttcgacatgctcaaaagccttgatgattgcatccatgtgctaagttgtgggtacgagaataagacacaatgggggaaagaggttggttggatttatggatctgtcactgaggatatcctcacgggcttcaagatgcactgccatggttggcgatctgtgtactgcatgcccaagagaccagcattcaaaggatctgcacctatcaatctcactgatcgtctccatcaagttctaagatgggcacttggctctgtggagatcttccttagcaagcactgcccaatatggtacgggtatcgatgtggtctgaaaccattggagaggttgtcatatatcaactgtgtcatctatccatggacatcaatcccgctgctaatctactgcgccctgccagcgttttgcctgttatcagggaagtttatggtgcctgagctaccagcatcctagagatgcagtggggaggagtcggaatcgacgattggtggagaaacgagcagttctgggtcattggcggtgtctcctcgcacctctttgcgctgtgccaggggctcctcaaggttctcggtggcgtgagtaccaagttcagggtgactctgaagggaggcggcacggacgagttctcagagctgtacgagttcaagtggacctggctactggtccctccgatgacactgctcctgctaaacgtcgtcgcggtcttggccggcgtgtccaaggcggtgacggacgggtacgaagcctggggcccgctgctcggcaagctgttcttctccttctgggtcgtcctccacctccacccgttcctcaagggcgtgatcggcaggcaggacagggtgccgaccgttgtcgttgtgctgtcaatgctactggcatccatactctctctgttgtgggtccgggtgagccccttcgccaccaagttcgatggacctgttctggaggtctgtggcttggattgtgagtgagggaggtaggagaagatacagcttctttgcttagggaataggttttgagttaccccagtgctagagtagtgagagggttctattctttcgttagctattcaacgttttctatctgattagcgtaggttttagtgaagcggtgttttatgtttatgagcaggagggaaatagagaatggagaagatggtagtgctgctgctgactgttgtagatattgagacaggcacaatagagaatagagtgacacttggtatggccataaatcgctactttttccactagagcgaatagcattctccgtgtacatctgttgagagaactgtgctttttcacttgcaccatttcaaacttcgaatgtggccgtgcttcttcgatcgaaatttgggggaacttggtatcgatcttagtacattttgttttttgtgagggcagtcctagtgcttg

SEQ ID NO: 216274 - DNA, 3126 bp, Zea Mays
ccgcggcgtagaggcggaggcgcatcggacggatggacgctggagggctcggcttcctcgtcgcgggctcccggcgcgagttcgtcgtcctcaacgtcgacgatttctccaagcaaggatcttcacagggctgtccagactatatttgtcagatatgtggagatgacattgacatactccaggaagaaaatgagtatttcgtcgcatgtaatgattgtgcttttcctgtttgccgcacttgctatgagtacgagcgtcaggagggcacacaagtatgccctcggtgcaagacccggtacaaacgccacaaaggtagtcctcgagtccatggggatgaggaagaagaaggttctgatgacattgagagtgagtttgcttccagtatagctggacgatcaaatatagtgcatccataccgtgtctctgtggcagaaagctccatcaactcatgggacattgatagtgtcagtatcaccaacagtggagctagtgtccatttttatgaagagcatgttggaactccaacaaatcatcatgctcttgttgttcaccctaacaccggagaaattatgcgatataatcccttgcaaacaagaccaataaatcccaatagagacctagcattgtatggctatggatcagttgcctggaagaacagagttgagtggaaaacaaaacaacagaataaaatgcaaaaggtctcatctgatggtgaaggatctgatttaaatgattttgacagcgactgcgatattcccaggtgtgctgaaattatttgtgaaatttggttcgccttttcatggattttagaccaatttcccaagtggcacccaatacagagagaaacatacttagatcgattatcattaagagagaatacgaagaatttaaggttcgcataaacacagtagttgctaattcatgcaaagttcccgagggaggatggtccctaccagaaggagctccatggcatggaaataatgttcgagaccatgccggaatggtccaggtcatcactggtaatgattgtgtcatggatgatgctggaaataagctgccttggttggtctatgtttcacgtgagaaaaggcctggacatgatcatcataaaaaagccggtgccttgaatgcattgctgcgaacttcagcaattctctccaacgcaccttttgtactgaatgtggattgtgaccactatatgaacaatagcaaagcgctacgggaggcaatgtgttttctgatggacccagtgttgggagagaagatttgttatgttcaatttccgcagagatttgatggcattgatcaacacgatagatattcaaaccacaatgttgtgttttttgatattaacatgaaaggtcttgatgggatccaaggaccaatatatgttgggactggttgtgttttcagaagacatgctttgtatggttatgatgccccaactgcaacaaaacctcctagcaagacatgtaactgctggccaaagtcatgctgcttgtgttgtggatcgaaaagaaaatgttccaaagctaagaaaaaacaagaacaccaaaagaaagtgaaatgcaggaatgcgtccaagcaagtgcatgctctcgaagtagctggaagagaaactgcacctcctgtgcctcgagaaaagtttgagaagagatttgggcagtcagatgcatttttggcttcaacattgcaagataatggtgaaggttgtcacttcgacatgctcaaaagccttgatgattgcatccatgtgctaagttgtgggtacgagaataagacacaatgggggaaagaggttggttggatttatggatctgtcactgaggatatcctcacgggcttcaagatgcactgccatggttggcgatctgtgtactgcatgcccaagagaccagcattcaaaggatctgcacctatcaatctcactgatcgtctccatcaagttctaagatgggcacttggctctgtggagatcttccttagcaagcactgcccaatatggtacgggtatcgatgtggtctgaaaccattggagaggttgtcatatatcaactgtgtcatctatccatggacatcaatcccgctgctaatctactgcgccctgccagcgttttgcctgttatcagggaagtttatggtgcctgagctaccagcatcctagagatgcagtggggaggagtcggaatcgacgattggtggagaaacgagcagttctgggtcattggcggtgtctcctcgcacctctttgcgctgtgccaggggctcctcaaggttctcggtggcgtgagtaccaagttcagggtgactctgaagggaggcggcacggacgagttctcagagctgtacgagttcaagtggacctggctactggtccctccgatgacactgctcctgctaaacgtcgtcgcggtcttggccggcgtgtccaaggcggtgacggacgggtacgaagcctggggcccgctgctcggcaagctgttcttctccttctgggtcgtcctccacctccacccgttcctcaagggcgtgatcggcaggcaggacagggtgccgaccgttgtcgttgtgctgtcaatgctactggcatccatactctctctgttgtgggtccgggtgagccccttcgccaccaagttcgatggacctgttctggaggtctgtggcttggattgtgagtgagggaggtaggagaagatacagcttctttgcttagggaataggttttgagttaccccagtgctagagtagtgagagggttctattctttcgttagctattcaacgttttctatctgattagcgtaggttttagtgaagcggtgttttatgtttatgagcaggagggaaatagagaatggagaagatggtagtgctgctgctgactgttgtagatattgagacaggcacaatagagaatagagtgacacttggtatggccataaatcgctactttttccactagagcgaatagcattctccgtgtacatctgttgagagaactgtgctttttcacttgcaccatttcaaacttcgaatgtggccgtgcttcttcgatcgaaatttgggggaacttggtatcgatcttagtacattttgttttttgtgagggcagtcctagtgcttg

SEQ ID NO: 216275 - DNA, 4988 bp, Zea Mays
gcgaattcaaaccccgctctgtggcagttgaatgttgtcaaattagctgaaaatggccagaggtcggctgggtctcacctagtcacctgtcgcctgtcccgagccaattgtatatttaggactctaaatatagtgtttcgcaatattgctatccaaaagatttaattcgcaaaaaaaaagactataaatatgttataattgattatactaccatttactatataatcttccttttattacttctttccctgtattttgtacctaaggagaccaaattatcttgtgtgcgcgttctgtctccacgccgccatggacgactggccaccgtcttggccacgaccaccctataccctgtccaggccctcaggctcacccctgctgcactgtccgtcgggcttccatcgagctcggccctgtgcgcgctggccaaggccgcgccgaccgccactttaggcgagatcgcgttgggcgatgtaatgctggacagtggcgcctcgtccgcatcataagcccagcccagggacacgccggccatggaagttgtatcatcgtcccggtgtttcatgagtattacgtgaacattaagagttgtttgcatcctgcaagttacaaataccagctttttagttcctacgcatacaagctgcaacttgcaaatactagcttcctggtgttgcaattggcttcctgttggccagctgccagctgttgatcctatgagcgcggagagcgcagacgagtagtaagttcagttgtgccctataatttcatacgggtaaaaatagctaatcagggacaaaatacatgaaattagattagaaaagcaagacaatactctaaaatggtagtataattaagtagaagatgtttgtaatccttttttgcgacgtaaatctttcggatgacaatattgcaaagcgctatgtttagagtcccaaatatacatttatctcggctgtccctccgtcgcaattgcaatggcgccgtcgtaccccttctcgccgctcgcccacggcccactccacacacccgagtgtcccttcgccgagtgccgaccgagggtctccccgttgtcgccgatccagagagagagagagagagagagagagttgtagaggcggacaggcggcccacggccaagcctgggggaggacctccattgttgccgcattggcgtattgtgtctggttatcagactgagacgacagcgtgtgctttcatttatcaggctgacgcgaggcaccgagagtccgagaccgcgcgatggtggcgcaggcagacgcgggggagacgggtggcgtaggtgccgatggacgcggacgtcgtaacagggagagtgagcgtgggaaggagaggtggagtgtaccctgtgatgcgcgtgcggcggtgcgggtctcacgggggaggggttctaatttggggttggggcgaagatggggggatcttggttggttgcgcagtgtaccgcggcgtagaggcggaggcgcatcggacggatggacgctggagggctcggcttcctcgtcgcgggctcccggcgcgagttcgtcgtcctcaacgtcgacgatttctccaagcaaggatcttcacagggctgtccagactatatttgtcagatatgtggagatgacattgacatactccaggaagaaaatgagtatttcgtcgcatgtaatgattgtgcttttcctgtttgccgcacttgctatgagtacgagcgtcaggagggcacacaagtatgccctcggtgcaagacccggtacaaacgccacaaaggtagtcctcgagtccatggggatgaggaagaagaaggttctgatgacattgagagtgagtttgcttccagtatagctggacgatcaaatatagtgcatccataccgtgtctctgtggcagaaagctccatcaactcatgggacattgatagtgtcagtatcaccaacagtggagctagtgtccatttttatgaagagcatgttggaactccaacaaatcatcatgctcttgttgttcaccctaacaccggagaaattatgcgatataatcccttgcaaacaagaccaataaatcccaatagagacctagcattgtatggctatggatcagttgcctggaagaacagagttgagtggaaaacaaaacaacagaataaaatgcaaaaggtctcatctgatggtgaaggatctgatttaaatgattttgacagcgactgcgatattcccaggtgtgctgaaattatttgtgaaatttggttcgccttttcatggattttagaccaatttcccaagtggcacccaatacagagagaaacatacttagatcgattatcattaaggtacgagaaggaaggaaaaccaccagaacttgctcggatcgatgtatttgtcagtacagttgatccaatgaaggagcctcctttaattattgcaaacacagttttgtccatactggctgtggattatcctgttgataaagtttgctgctatgtgtcggatgatggtgctgcaatgcttacttttgaagcacttacagaaacatgtctatttgcacgaaaatgggttcccttctgtaagaaacacaaaatcgagcctcgggctcctgaatggtattttgctcagaaaattgactatctaagagaaaaggttcacccagagtttgttcgagaacgacgtgcaatgaagagagaatacgaagaatttaaggttcgcataaacacagtagttgctaattcatgcaaagttcccgagggaggatggtccctaccagaaggagctccatggcatggaaataatgttcgagaccatgccggaatggtccaggtcatcactggtaatgattgtgtcatggatgatgctggaaataagctgccttggttggtctatgtttcacgtgagaaaaggcctggacatgatcatcataaaaaagccggtgccttgaatgcattgctgcgaacttcagcaattctctccaacgcaccttttgtactgaatgtggattgtgaccactatatgaacaatagcaaagcgctacgggaggcaatgtgttttctgatggacccagtgttgggagagaagatttgttatgttcaatttccgcagagatttgatggcattgatcaacacgatagatattcaaaccacaatgttgtgttttttgatattaacatgaaaggtcttgatgggatccaaggaccaatatatgttgggactggttgtgttttcagaagacatgctttgtatggttatgatgccccaactgcaacaaaacctcctagcaagacatgtaactgctggccaaagtcatgctgcttgtgttgtggatcgaaaagaaaatgttccaaagctaagaaaaaacaagaacaccaaaagaaagtgaaatgcaggaatgcgtccaagcaagtgcatgctctcgaagtagctggaagagaaactgcacctcctgtgcctcgagaaaagtttgagaagagatttgggcagtcagatgcatttttggcttcaacattgcaagataatggtgaaggttgtcacttcgacatgctcaaaagccttgatgattgcatccatgtgctaagttgtgggtacgagaataagacacaatgggggaaagaggttggttggatttatggatctgtcactgaggatatcctcacgggcttcaagatgcactgccatggttggcgatctgtgtactgcatgcccaagagaccagcattcaaaggatctgcacctatcaatctcactgatcgtctccatcaagttctaagatgggcacttggctctgtggagatcttccttagcaagcactgcccaatatggtacgggtatcgatgtggtctgaaaccattggagaggttgtcatatatcaactgtgtcatctatccatggacatcaatcccgctgctaatctactgcgccctgccagcgttttgcctgttatcagggaagtttatggtgcctgagatgaatgtctattcgagcatattgttcatagctctatttgtctccatagcagctaccagcatcctagagatgcagtggggaggagtcggaatcgacgattggtggagaaacgagcagttctgggtcattggcggtgtctcctcgcacctctttgcgctgtgccaggggctcctcaaggttctcggtggcgtgagtaccaagttcagggtgactctgaagggaggcggcacggacgagttctcagagctgtacgagttcaagtggacctggctactggtccctccgatgacactgctcctgctaaacgtcgtcgcggtcttggccggcgtgtccaaggcggtgacggacgggtacgaagcctggggcccgctgctcggcaagctgttcttctccttctgggtcgtcctccacctccacccgttcctcaagggcgtgatcggcaggcaggacagggtgccgaccgttgtcgttgtgctgtcaatgctactggcatccatactctctctgttgtgggtccgggtgagccccttcgccaccaagttcgatggacctgttctggaggtctgtggcttggattgtgagtgagggaggtaggagaagatacagcttctttgcttagggaataggttttgagttaccccagtgctagagtagtgagagggttctattctttcgttagctattcaacgttttctatctgattagcgtaggttttagtgaagcggtgttttatgtttatgagcaggagggaaatagagaatggagaagatggtagtgctgctgctgactgttgtagatattgagacaggcacaatagagaatagagtgacacttggtatggccataaatcgctactttttccactagagcgaatagcattctccgtgtacatctgttgagagaactgtgctttttcacttgcaccatttcaaacttcgaatgtggccgtgcttcttcgatcgaaatttgggggaacttggtatcgatcttagtacattttgttttttgtgagggcagtcctagtgcttg

SEQ ID NO: 216276 - DNA, 3543 bp, Zea Mays
aacgtccaaaccttaaaactgacggaaagagaagacccaccacatcccgttcactctctcctcctcccctccgctccctcccagtcccagatcccgattcgccgccgcctccggcagatccagccagcagctcccgccgcagaaccgccgcgggcgccatggagaagccatgctctctcctggtccacttcgacaagggctcggcatcgatggcgaacgagatcaaggcggatctggagggcagcgatggccccgccaaggctgacgccatgcgccgcgccatctcgctcctcctcaacggagagaccctccctcagctcttcataaccatcgtccgctacgtgctcccctccgaggaccacaccgtgcagaagcttctcctcctctacctcgagatcatagaccgccgggatccggccggccgcgccctgccggagatgatcctcatctgccagaacctccgcaacaacctccagagccccaacgagtacatccgcggcgtcactctgcggttcctctgcaggctctccgagcccgaggtgctcgagccgctcgtgccgtccgtgcttgcgaacctggagcacaggcaccaattcatccggagacacgctgtctccgcggtttccgcgatctaccgcctcccgcatggtgaccagctcatccccgacgcgccggagctcgtcgagcggttcctcgcatctgagcaggacgcgtccgcgcggaggaacgcattccttatgctctgtgcctgcgcacaggaccgcgccgtcgcctacctgctctccaacgccgatcgagtcgctgagtggcccgatctgctgcagatggccgttgtggatcttatccgcaaggtctgccgatcacaaaaccgtgccaacaagggaaggtatatcaccatcattacgtcgctgctctccgcaaccagcactgcggttgtttatgaatgtgctggtgccctggtgtcactctcttcggcacccacggctgtgcgggccgctgccaacacctactgccagttgctctcgtcgcagagtgacaacaatgtgaagctcattcttctggatcgcctcaacgagctgcgaaccctgcaccgggatgtcatggtgggtgtggtgatggacgtgcttcgtgcactggccagccccaatttagatgtcaagagaaaggttctcgatttagttctcgatttgctcaccccgcgtaatgttgaggaggtggtgctttatctcaagaaggaggtggtcaagacgcaggctggagacctcgagaagggtggcgagtaccgccagatgctggtgcaggccatccatgcttgcgctgttgagtacccagaggtggctggatctgtagtgcacctcctcatggactttcttggtgataccaatgttgctgcagctgttgatgttgtgctgtttgtacgtgagatcattgagaccaatccgaagctgcgtgtttccatgatccagaggcttattgatacattctatcagattcgggcatcccgtgtctgctcatgtgctctctggatccttggggagtactccctctctctatcagaggttgaaagcaccattgctaccattaaacaatgtcttggtgatctgccattctacactgtctctgatgaaggggaggtaactgattccaccaattcagcccaggcggtggtgaacactgtcactgtatcttccaggaggcctgttgttcttgcggatggcacttatgccacacagagcgccgctaccgagaccatttcagccccatcagttgctcatgggtcattagcatctaccctgaacctcagatcactcattttgtcaggtgatttcttcctggctgctgttgttgcatgtaccctgaccaagcttgtgttgaggctggaagaagtgcagccatccaaggttgaatcaaacaaagcttgcactggagcattgctgatcatgacatcgattctgcagctgggccagtcttcttaccttccccacccgattgataatgattcatatgacagaattgtgctgtgtttgagattgctttgcaatactggtgatgatgtcaggaagatttggttgcattcatgcagacagagctttgcgaaaatgcttgctgagaagcagttcagggagacagaggagatgaaggcaaaggcacagatctctcatgcccagccagatgatcttattgatttttaccacctgaagagcaggaagggcatgagccagcttgagttggaagatgaggtgcacgatgatttgaaggctgcaactggtgggtttactaaggatgcagatgatgcaaacaagctcaaccgcattcttcagttgactgggttcagcgatcctgtgtatgctgaagcatttgtaacagttcaccattatgacattgtacttgatgttactgtcattaaccgcacaaaggagacacttcagaacttgtgcttggaattggctacaatgggagacctcaaacttgttgatcgccctcagaactacaccttggctcctgagtctagcaaacagatccgtgctaatatcaaggtttcatcaacagagacgggggttatatttggcaacatagtttacgagacttcaaatgtgatggaacgatcagtggttgtcctaaatgatattcacatcgacatcatggattacatctcacctgctacgtgtgcagatgttactttccggaacatgtgggcagaatttgaatgggaaaataaggtggctgtgaatactgtgattcaggatgagaaggaattcttgaatcacattatcaagtcaacgaacatgaaatgtctgacaccaccgtctgcactggatggggaatgtggtttccttgctgctaacctttatgcaaagagtgtgtttggcgaggacgctttggtgaacatcagcattgagaagcaacatgacggcaagctcagtggctacattcgaataaggagcaagacccagggaattgcactcagcttaggggacaagatcactctcaagcagaaaggtggcagttaactgtgacaagtaatcgcagttgtatcatcatttttcgcatttaggaaatccacgtgccagagagagaccagtgccgtggcattgaactgagtataaatgcttttttgtacaaaaggatcgatcaaggagagagataagaggacagttatgaggaagtcacgaagttgtcggtcgaagatatatgttgctgtagtaacgaagctgttccaaacttccttgaaatagttgtgaagtttatgttgatttctcgacagttgtctggacttggaaacagaagcttggaggcggtgttgtcacgttatttttgtagagatgaattggagctcattttctgttgcatatagatttgccaattgtgttagggtacttttatggtgtttatttaagaaatgaggtagtccattatctttttactcagtttctttggtttgtggaataaattgacgatgagaccccctagaacttcttccctactactacattactagggcctaggcagtgatcatgatatggttgattgcgtggtgacgtc

SEQ ID NO: 216277 - DNA, 2060 bp, Zea Mays
caggcacccatcattttcagctgccgagacgcgagacccagacaaaagcagccagcggaaaagaggggaaccctctcatcccatcccaccagttccccaattccatttctccatccatgacagctcgccatttccccacctgttcctacgctaccgccacctaaaaaaaattccaggcacctagtgcttcccattccaatcttgctcaaaggtcatttcatttcggccggtgcctattttaggccgattggagggaaggctggtctgtgttttattttcctgctgcgagcgctttcttgggcgagttgaatttgggcgcctcttgctccaggcagtattttatcgagctagagtctggtacccggtgattcttgcttggtccaggcgccaaggcgaggaattgggcctagctccagctcaaatctgtgccttgttgcagacagaaggatttctgcatgggcgagttgaatttgggcgcctcttgctccaggcagtattttatcgagctagagtctggtacccggtgattcttgcttggtccaggcgccaaggcgaggaattgggcctagctccagctcaaatctgtgccttgttgcagacagaaggatttctgcatgggcgaccataactaagatgtgagatttggtggcgtcagctcggctggtgggtgattctcggtgcgtacacagacacatccctggagcctggaggcttgagctgatttggcgaggaggacagtgcaggagagagatgtctttcaggagcctgattcaggacatgaaggacgagttcgggagcatctcgcggcatagcctgcggtcccggtctcaccgctccgccgggaacgcggcgcgggcggcggccgcgggaccgtcggaggcgatggatcagagctgctggtcgcagctgccccccgagctcctgcgggaggtgctggtgaggatcgaggcatcggagagctggtggccagcgcgcaagaacgtggtgtcaggcgccggcgtctgccggacctggaggggcatcatgaaggaggccgtgcgcgtcccggaggtgtcagggaagctcacgttccccatctcacttaagcagcctggcccaagggatggcactcttaaatgtttcatcaggagaaatcgaactactcagacatattatctgtatattggattgacagaagcattggctgatgatgggaagtttctacttgctgcacgcaagtgtcgtaagcccacctgcacagactacctaatttctcttgataaggtcgatatgtcaaagggaagcagcacctatattggcaagctaagatcaaatttccttggaacaaagttcactgtctatgatgctcatccaccatatgatggtgctgcggtctcaaagagtcgctctgcacgtgtggttggtttgaagcaggtctcccctagagttccggctggaaattatcccgtttcacatatttcttacgagctaaatgttctgggctccagaggtccaagaaggatgaactgtgttatggattccatccctgcatcagctgttaaggaaggagggaaaactcctacacagactgaatttccacttagcagccttgactctttcccatcatttccattcttcagatctaaatcagctcggatagacagttcaacgtcgcaatcatccagtcagagggaagataggttggtgcttaagaacaagtctcctaggtggcacgaacagctgcagtgttggtgcctgaatttccgtgggcgggtcactgttgcctcggttaaaaacttccagttggtggcttctgaggacaatggaccagagaaccaagagagtgacaaggtgattctccaattcggaaagatcggaaaagacttgttcaccatggactacggttatccaatatcggcatttcaagcttttgcaatttgtctgagcagttttgatacaaaaattgcctgcgaatgaggcaagaagctggatagcggtggcggatagcatgacagcaatagggggatagcatgacagcaataggaaaacggtcgcaaactgcccagatgtcttgatgacgc

SEQ ID NO: 216278 - DNA, 2258 bp, Zea Mays
agacaaaagcagccagcggaaaagaggggaaccctctcatcccatcccaccagttccccaattccatttctccatccatgacagctcgccatttccccacctgttcctacgctaccgccacctaaaaaaaattccaggcacctagtgcttcccattccaatcttgctcaaaggtcatttcatttcggccggtgcctattttaggccgattggagggaaggctggtctgtgttttattttcctgctgcgagcgctttcttgggcgagttgaatttgggcgcctcttgctccaggcagtattttatcgagctagagtctggtacccggtgattcttgcttggtccaggcgccaaggcgaggaattgggcctagctccagctcaaatctgtgccttgttgcagacagaaggatttctgcatgggcgagttgaatttgggcgcctcttgctccaggcagtattttatcgagctagagtctggtacccggtgattcttgcttggtccaggcgccaaggcgaggaattgggcctagctccagctcaaatctgtgccttgttgcagacagaaggatttctgcatgggcgaccataactaagatgtgagatttggtggcgtcagctcggctggtgggtgattctcggtgcgtacacagacacatccctggagcctggaggcttgagctgatttggcgaggaggacagtgcaggagagagatgtctttcaggagcctgattcaggacatgaaggacgagttcgggagcatctcgcggcatagcctgcggtcccggtctcaccgctccgccgggaacgcggcgcgggcggcggccgcgggaccgtcggaggcgatggatcagagctgctggtcgcagctgccccccgagctcctgcgggaggtgctggtgaggatcgaggcatcggagagctggtggccagcgcgcaagaacgtggtgtcaggcgccggcgtctgccggacctggaggggcatcatgaaggaggccgtgcgcgtcccggaggtgtcagggaagctcacgttccccatctcacttaagcagcctggcccaagggatggcactcttaaatgtttcatcaggagaaatcgaactactcagacatattatctgtatattggattgacagaagcattggctgatgatgggaagtttctacttgctgcacgcaagtgtcgtaagcccacctgcacagactacctaatttctcttgataaggtcgatatgtcaaagggaagcagcacctatattggcaagctaagatcaaatttccttggaacaaagttcactgtctatgatgctcatccaccatatgatggtgctgcggtctcaaagagtcgctctgcacgtgtggttggtttgaagcaggtctcccctagagttccggctggaaattatcccgtttcacatatttcttacgagctaaatgttctgggctccagaggtccaagaaggatgaactgtgttatggattccatccctgcatcagctgttaaggaaggagggaaaactcctacacagactgaatttccacttagcagccttgactctttcccatcatttccattcttcagatctaaatcagctcggatagacagttcaacgtcgcaatcatccagtcagagggaagataggttggtgcttaagaacaagtctcctaggtggcacgaacagctgcagtgttggtgcctgaatttccgtgggcgggtcactgttgcctcggttaaaaacttccagttggtggcttctgaggacaatggaccagagaaccaagagagtgacaaggtgattctccaattcggaaagatcggaaaagacttgttcaccatggactacggttatccaatatcggcatttcaagcttttgcaatttgtctgagcagttttgatacaaaaattgcctgcgaatgaggcaagagaaaaataggtgcagatttgcttgtgcaagcaaaacatctgccctctctccacctttaactcaacaatgcttttgtcctcgtctatctgcagaagctggatagcggtggcggatagcatgacagcaatagggggatagcatgacagcaataggaaaacggtcgcaaacgtatatttattcggtttgacttttttctttaattttgaataaataagatatataatgtgcaatacaaatttatatttttgtttttagcattgagtctgtaaaagttcataaaagataaatctcaaatttattatatatcttctcttcttaaataagattcggatac

SEQ ID NO: 216279 - DNA, 3776 bp, Zea Mays
cacagactcgatgccgcgcggtgctacggtggccctcttcgccggtccatcgaggaggcctgccgtggtgctctcggcggtctttgattccacgcaggaagagccccgggcggtgcgcgcggcgcggatttggcggcggcctcatggcatgaacgctctttggttattgagaattggtaacatcttttggacgcgggggatgactttgcagtttgcagcggcactcaaggcccctactttttctcgaatcccaactcatttcttcctcctcttctggattatcatctgggaggcaaaggggtgacttgtcgtagagcattttatgtcaaagatgccctgctttaccgacggagacagaaaattagtgaagacagagatatacaccatacaaccaccttcgatggacgcgggggatgacattgcttgacatggactgcgtggctgaggcaatcggcatacagtacttgcagcctgtactactatacatagacagttctgttttcctccaaagtgctttatccttagaccattctcttctgtcatatccactcccgctccactccatactgagcgtgcgttcttgatccatactgagctctgccgagtgctcgctccaatggctgaacttgcagccagcctggtggttgccccactgctgtccatgttgaaggagaaggtgtccagctctctcctcaaccagtacaacgtgatggagggcatggagaagcaccacaagaccctcatgcgctggctgcctgccatccaagaagttatcgctgacgccgagaggcagacgtctcgccgcggcgtggagaaatggctcgagcagctcaagacgacagcgtacgaggcgaatgaggtctttgacgacttcgagtacgaggcgctccgccgtcgagccaagaaaaatgggcacatcgccaagcttgccattatggcaagggtaaaacttttccctacccacaaccgtgttgcattccatatcaggatgagctacaggcttcgcaggattgttgacaccttcaaggaccttgtggaagaaatgaacacctttggattcaacaagcttgagcccgaggcaacaacgacatggaaggagtggcgtgagacagattctattatcgttgatcctgaaaatattgttgccaggtctagacatgatgagaggaagaaaattgttaacttattggtcaatggtcatgttaccgatggtgatcttatggtcgttcccattgttggaatgggaggactaggcaagaccacactcgctcagctcatctacaacgaccctcaggtcaaggagcacttccatctactaaagtgggattatcagattgatatggacaagcttatccaactatggatggccaatggttttatctcagatcaaaaaaaggtacctgctgaaaccgtaggtaaaaggattgtcaatgagctggtctcgaggtcatttttccagtatgaggagcgaagttggatggggtacaattctacaacttttttgaagattcatgacctcatgcatgatcttgcactgtctgtttcggaaaaggaatgtgtctgtataacaagggaattgattaaaaatagtgagttgcttccaagtgctgcccgccacatacttattcaaaattggataggtaaagagattcatggttatttatatggttctatgaggaaaatgtctcggcctatccaaacatttatgtttgatgggtctagtgaagctgccggtgtgcaacatttatcaagatatagttctttgcgagtactttctgtgccaggaattgggtttcatttaacaataaaaccaaagcatcagtgccaccttaggtttcttgatatcaaggacagtgtcatcaaagaacttccagatgacattagcgtcctttataatcttcagacacttttcgtcatctgtacacagatgggtgcacaagggaggaggagtgcaggagcagccaaccttaagaataagaaggaactgagacaactgtcactagagtggacaagtggtaaggaggagggactacagtgtcatgaggtgctagagggccttgaagctcatgatggactcctggctctaggaatacattactaccaaggcaccagttttccatcttggatgggtatgttgaaaaacatactcgatcgaccttcggttgtccgattgtagtaaagtagaccggcttccaccaatgtgtcagctagcagaactgcaagtccttcatttgaaaagattggaaaatttgcagttcctatgtagcaggtgtacatcctccacgtttggaaaactgaaggatcttaagctacttgatcttgacgtttttgaaggattttgtgaggcagtgcatggatgtgcagtagcatttcctcagcttgagttattggaaattgacagctgtaaaaatctagcagctctaccagaagcatcgatgctgggagaagcatattgtggtggagatcatacagtggcgcgctctgcatttccagaactgaatattctcgtattgcaaggtttgcgtagctttgagagatgggaggctgctgccctttaaactgaagaaagacatgcaatattccctcgggttaagaatggtcctgagcaggcaacatgaggaatgagccagccagttgcttttgccccatctagagtctctagagatatcggggtgtgaaagtctggtagaggaggtattcaactcctcccctgctatgctcttaagagtatggatgtgataggatgtcacgggttgttgtcatctctagaatctctaaggatacaacactgtcacgggttgtcaatcttccctcgtccctcagggtaatagatactacggttcatgtcagggcagctggatgcactcaatacctgtcatcactggaaatcctccgtctgtctcgttgcaaaaacctgtcgtgcttgcccagtgcgcgggcaggaggacgacaggaatactcatctcttcgtgagcttacaattacggtagcagggagacagagccgaacatcaaagcagaaagaaaaatgatccttattaattggttgtacaatacaatatgttatgtgatttggaatacctgctgccgacgacagttgcctccaattcctgcagcttctggcacctagagatgtctagctttccacagcttttcaaggttggtaactatttgcagtttctgtttcgggcgacccattgctttaggttttggagacatttttcggagggttcaagaccaggaaacggatcgacgccgcgtctatgcaaatttttttttcttcttattttcattggagttttatgaacaggattgcgttttgaggtttatagcctgtctattgggtgtcgtgtttatttttatgcactctatgttgtgagtgctagtccatgcagttatgtggagcgagcccaacaacgataccagcctagcaagttggtctcgttgtacccccggaacaacgacaacgtgatggtggtggcgatgcgcaacgccgcggagccggcgtggcgacagcggcatcgtttcatggggaccccgatgccagtgacagaaggaggtggatacagggtcagggagaaaatgtcacttgctcctctctatctttttgagggattgattgataggagctttcgagggattaagaaaaaatgtaggacaaatggttgagaaaaaaaaagtatatgtttggtttgtaaccatagattgtggcaaaatctttcgcttgctgtgctagggtctactgcccaacaagtctgtcacatgcttatacaatca

SEQ ID NO: 216280 - DNA, 3571 bp, Zea Mays
ctcgatgccgcgcggtgctacggtggccctcttcgccggtccatcgaggaggcctgccgtggtgctctcggcggtctttgattccacgcaggaagagccccgggcggtgcgcgcggcgcggatttggcggcggcctcatggcatgaacggtgagcagagatgagtatccctcaaatcgcttataggtatttggtttgaagaataagctagtctattatattatcacttctcatttgtttggtttgtggaatggaatgagttaattcatcacaacatcactcctcatagttattagttattactaacataagaaataaaattattccaccaaatttaagaaatgtacttatgatgatggagcgactctcttagttctttgcagctctttggttattgagaattggtaacatcttttggacgcgggggatgactttgcagtttgcagcggcactcaaggcccctactttttctcgaatcccaactcatttcttcctcctcttctggattatcatctgggaggcaaaggggtgacttgtcgtagagcattttatgtcaaagatgccctgctttaccgacggagacagaaaattagtgaagacagagatatacaccatacaaccaccttcgatggacgcgggggatgacattgcttgacatggactgcgtggctgaggcaatcggcatacagtacttgcagcctgtactactatacatagacagttctgttttcctccaaagtgctttatccttagaccattctcttctgtcatatccactcccgctccactccatactgagcgtgcgttcttgatccatactgagctctgccgagtgctcgctccaatggctgaacttgcagccagcctggtggttgccccactgctgtccatgttgaaggagaaggtgtccagctctctcctcaaccagtacaacgtgatggagggcatggagaagcaccacaagaccctcatgcgctggctgcctgccatccaagaagttatcgctgacgccgagaggcagacgtctcgccgcggcgtggagaaatggctcgagcagctcaagacgacagcgtacgaggcgaatgaggtctttgacgacttcgagtacgaggcgctccgccgtcgagccaagaaaaatgggcacatcgccaagcttgccattatggcaagggtaaaacttttccctacccacaaccgtgttgcattccatatcaggatgagctacaggcttcgcaggattgttgacaccttcaaggaccttgtggaagaaatgaacacctttggattcaacaagcttgagcccgaggcaacaacgacatggaaggagtggcgtgagacagattctattatcgttgatcctgaaaatattgttgccaggtctagacatgatgagaggaagaaaattgttaacttattggtcaatggtcatgttaccgatggtgatcttatggtcgttcccattgttggaatgggaggactaggcaagaccacactcgctcagctcatctacaacgaccctcaggtcaaggagcacttccatctactaaagtgggattatcagattgatatggacaagcttatccaactatggatggccaatggttttatctcagatcaaaaaaaggtacctgctgaaaccgtaggtaaaaggattgtcaatgagctggtctcgaggtcatttttccagtatgaggagcgaagttggatggggtacaattctacaacttttttgaagattcatgacctcatgcatgatcttgcactgtctgtttcggaaaaggaatgtgtctgtataacaagggaattgattaaaaatagtgagttgcttccaagtgctgcccgccacatacttattcaaaattggataggtaaagagattcatggttatttatatggttctatgaggaaaatgtctcggcctatccaaacatttatgtttgatgggtctagtgaagctgccggtgtgcaacatttatcaagatatagttctttgcgagtactttctgtgccaggaattgggtttcatttaacaataaaaccaaagcatcagtgccaccttaggtttcttgatatcaaggacagtgtcatcaaagaacttccagatgacattagcgtcctttataatcttcagacacttttcgtcatctgtacacagatgggtgcacaagggaggaggagtgcaggagcagccaaccttaagaataagaaggaactgagacaactgtcactagagtggacaagtggtaaggaggagggactacagtgtcatgaggtgctagagggccttgaagctcatgatggactcctggctctaggaatacattactaccaaggcaccagttttccatcttggatgggattttgtgaggcagtgcatggatgtgcagtagcatttcctcagcttgagttattggaaattgacagctgtaaaaatctagcagctctaccagaagcatcgatgctgggagaagcatattgtggtggagatcatacagtggcgcgctctgcatttccagaactgaatattctcgtattgcaaggtttgcgtagctttgagagatgggaggctgctgccctttaaactgaagaaagacatgcaatattccctcgggttaagaatggtcctgagcaggcaacatgaggaatgagccagccagttgcttttgccccatctagagtctctagagatatcggggtgtgaaagtctggtagaggaggtattcaactcctcccctgctatgctcttaagagtatggatgtgataggatgtcacgggttgttgtcatctctagaatctctaaggatacaacactgtcacgggttgtcaatcttccctcgtccctcagggtaatagatactacggttcatgtcagggcagctggatgcactcaatacctgtcatcactggaaatcctccgtctgtctcgttgcaaaaacctgtcgtgcttgcccagtgcgcgggcaggaggacgacaggaatactcatctcttcgtgagcttacaattacggtagcagggagacagagccgaacatcaaagcagaaagaaaaatgatccttattaattggttgtacaatacaatatgttatgtgatttggaatacctgctgccgacgacagttgcctccaattcctgcagcttctggcacctagagatgtctagctttccacagcttttcaagtccatgcagttatgtggagcgagcccaacaacgataccagcctagcaagttggtctcgttgtacccccggaacaacgacaacgtgatggtggtggcgatgcgcaacgccgcggagccggcgtggcgacagcggcatcgtttcatggggaccccgatgccagtgacagaaggaggtggatacagggtcagggagaaaatgtcacttgctcctctctatctttttgagggattgattgataggagctttcgagggattaagaaaaaatgtaggacaaatggttgagaaaaaaaaagtatatgtttggtttgtaaccatagattgtggcaaaatctttcgcttgctgtgctagggtctactgcccaacaagtctgtcacatgcttatacaatca

SEQ ID NO: 216281 - DNA, 3207 bp, Zea Mays
atgccgcgcggtgctacggtggccctcttcgccggtccatcgaggaggcctgccgtggtgctctcggcggtctttgattccacgcaggaagagccccgggcggtgcgcgcggcgcggatttggcggcggcctcatggcatgaacggtgagcagagatgagtatccctcaaatcgcttataggtatttggtttgaagaataagctagtctattatattatcacttctcatttgtttggtttgtggaatggaatgagttaattcatcacaacatcactcctcatagttattagttattactaacataagaaataaaattattccaccaaatttaagaaatgtacttatgatgatggagcgactctcttagttctttgcagctctttggttattgagaattggtaacatcttttggacgcgggggatgactttgcagtttgcagcggcactcaaggcccctactttttctcgaatcccaactcatttcttcctcctcttctggattatcatctgggaggcaaaggggtgacttgtcgtagagcattttatgtcaaagatgccctgctttaccgacggagacagaaaattagtgaagacagagatatacaccatacaaccaccttcgatggacgcgggggatgacattgcttgacatggactgcgtggctgaggcaatcggcatacagtacttgcagcctgtactactatacatagacagttctgttttcctccaaagtgctttatccttagaccattctcttctgtcatatccactcccgctccactccatactgagcgtgcgttcttgatccatactgagctctgccgagtgctcgctccaatggctgaacttgcagccagcctggtggttgccccactgctgtccatgttgaaggagaaggtgtccagctctctcctcaaccagtacaacgtgatggagggcatggagaagcaccacaagaccctcatgcgctggctgcctgccatccaagaagttatcgctgacgccgagaggcagacgtctcgccgcggcgtggagaaatggctcgagcagctcaagacgacagcgtacgaggcgaatgaggtctttgacgacttcgagtacgaggcgctccgccgtcgagccaagaaaaatgggcacatcgccaagcttgccattatggcaagggtaaaacttttccctacccacaaccgtgttgcattccatatcaggatgagctacaggcttcgcaggattgttgacaccttcaaggaccttgtggaagaaatgaacacctttggattcaacaagcttgagcccgaggcaacaacgacatggaaggagtggcgtgagacagattctattatcgttgatcctgaaaatattgttgccaggtctagacatgatgagaggaagaaaattgttaacttattggtcaatggtcatgttaccgatggtgatcttatggtcgttcccattgttggaatgggaggactaggcaagaccacactcgctcagctcatctacaacgaccctcaggtcaaggagcacttccatctactaaagtgggattatcagattgatatggacaagcttatccaactatggatggccaatggttttatctcagatcaaaaaaaggtacctgctgaaaccgtaggtaaaaggattgtcaatgagctggtctcgaggtcatttttccagtatgaggagcgaagttggatggggtacaattctacaacttttttgaagattcatgacctcatgcatgatcttgcactgtctgtttcggaaaaggaatgtgtctgtataacaagggaattgattaaaaatagtgagttgcttccaagtgctgcccgccacatacttattcaaaattggataggtaaagagattcatggttatttatatggttctatgaggaaaatgtctcggcctatccaaacatttatgtttgatgggtctagtgaagctgccggtgtgcaacatttatcaagatatagttctttgcgagtactttctgtgccaggaattgggtttcatttaacaataaaaccaaagcatcagtgccaccttaggtttcttgatatcaaggacagtgtcatcaaagaacttccagatgacattagcgtcctttataatcttcagacacttttcgtcatctgtacacagatgggtgcacaagggaggaggagtgcaggagcagccaaccttaagaataagaaggaactgagacaactgtcactagagtggacaagtggtaaggaggagggactacagtgtcatgaggtgctagagggccttgaagctcatgatggactcctggctctaggaatacattactaccaaggcaccagttttccatcttggatgggtatgttgaaaaacatactcgatcgaccttcggttgtccgattgtagtaaagtagaccggcttccaccaatgtgtcagctagcagaactgcaagtccttcatttgaaaagattggaaaatttgcagttcctatgtagcaggtgtacatcctccacgtttggaaaactgaaggatcttaagctacttgatcttgacgtttttgaaggattttgtgaggcagtgcatggatgtgcagtagcatttcctcagcttgagttattggaaattgacagctgtaaaaatctagcagctctaccagaagcatcgatgctgggagaagcatattgtggtggagatcatacagtggcgcgctctgcatttccagaactgaatattctcgtattgcaaggattgcgttttgaggtttatagcctgtctattgggtgtcgtgtttatttttatgcactctatgttgtgagtgctagtccatgcagttatgtggagcgagcccaacaacgataccagcctagcaagttggtctcgttgtacccccggaacaacgacaacgtgatggtggtggcgatgcgcaacgccgcggagccggcgtggcgacagcggcatcgtttcatggggaccccgatgccagtgacagaaggaggtggatacagggtcagggagaaaatgtcacttgctcctctctatctttttgagggattgattgataggagctttcgagggattaagaaaaaatgtaggacaaatggttgagaaaaaaaaagtatatgtttggtttgtaaccatagattgtggcaaaatctttcgcttgctgtgctagggtctactgcccaacaagtctgtcacatgcttatacaatca

SEQ ID NO: 216282 - DNA, 1836 bp, Zea Mays
tctcacaagtaaaccaggacaattaggtcgcagtcgtatcgatttgggaacccctgccccacccaccactgcgggctgcagcctgccgtttcgctcgaacgaagcaatgctccaggagatccaccgagtgtttggcgagtggaccgtccgtttccagattgacgcggccaataaggagaatgctgtcccgttactcttcactgatggtcactttgcacggcaacctcagccggtgctacaaggccatgagcgcgctgcggccagatggggtatccaggcacttcatgtccgctggtggtttcgaacgcgtcgttttaggggtggtgctcgtcatgtccatctcgggagcttcttatacagcaccgtcatcatcggcgctcacagaggaaaacttgcttttcctggaggcttggcgcgcggttgatcgagcatactatgacaaatcttttaatgggcaaagttggtttagataccgtgaaaatgcccttcgcaatgaaccgatgaacacaagggaagagacatgaagtctggtacgcaaggcgcactcacgggtgtaggtttatcgattggttacccaatggcaattaatggatcaccttcaggagttgctgtcatgacagccacccctggtggtcctgcagaaaaggctggcattcttcctggagacaccattttggcaattgacaacagaagcactgaagatatggatatatatgatgccgcagaacgcttacagggccctgaaggaagttcagtagatttgtctattcgtagtgggaccaataccaggcatgtcgttctaaagagacaaacagtcaatttaaaccccgtgaggtcaaggatgtgtgagattccaggttcaaaagatagctcaaagatcggttacatcaaattgacaacatttaaccaaaatgctgcagaatctgttaaggaagccattaagacattgagggacaacaatgttaaatcctttgtgctggatctgcggaataacagtggtggcctttttcctgaaggaattcaaattgcaaagatttggatggacaagggtgttattgtatatatatgcgatagccaaggtgttcgtgacatttatgaggctgatggcgctgatacaattgctgcatcagaaccgttggttgtgctggtaaacaaaggaactgcaagtgcaagtgagatccttgctggagcgctgaaagacaataagagggcagtcgtatatggggaaccaacatatggaaaagggaagattcagtcggttttcggattatctgatggatctggcttggctgttaccgtagcacgctatgaaactcctgcacataccgacattgacaaggttggtgtgattccagaccgaccactgccagcttcatttcctaccgatgaagatgccttctgcagctgccttagggattcaacggctgcttgcaatctgaatgctgctcagctgtttgcaaaatcatgaccaggcccttcattcaacattttgggtcttgggcgttgtacagataaccgtggtgtttcgtaggagctgcttgtgcgtggtgtgtgggtagtccgtaattcttttcattagcattgatttttgtcccagttttatcgcctgtgaaatgaaagcattgtttctgcgtgaaatcacggtcgtgttgaacatgcacttgatgcaacaattttgaatggaagcactaagaaaacctgcaaattgtctttcattttcagtcattttatgcatcagcgttactgaatactcctgtccgcaaaagagtgtcgctatagggtttgtgctggtcaaattttcttaagtttgattgggtttgtaaaaagtattgacaa

SEQ ID NO: 216283 - DNA, 2213 bp, Zea Mays
cagcgtcgccatcccatcgtcgtcgtcttccatagctgagcttgtggtgtctccgcagtccgcacttggcaattccgtggccattatctactcctcggctcctctcctcgcagaagaattcgttcccccaatttggagttggaaaagcgtcgaccccagaaaacgggaggcctcgacctcgctagtctccgttccattcgaaaagccatcgcctggtgagcgagaaggggaaggtcgatggcgacgtgttctcgcccgctcttcgtctccgactcagcggcctccgcctcgccgtctcgggcgtcctttcgccgccttcgcacggtcgcagtcgtatcgatttgggaacccctgccccacccaccactgcgggctgcagcctgccgtttcgctcgaacgaagcaatgctccaggagatccaccgagtgtttggcgagtggaccgtccgtttccagattgacgcggccaataaggagaatgctgtcccgttactcttcactgatggtcactttgcacggcaacctcagccggtgctacaaggccatgagcgcgctgcggccagatggggtatccaggcacttcatgtccgctggtggtttcgaacgcgtcgttttaggggtggtgctcgtcatgtccatctcgggagcttcttatacagcaccgtcatcatcggcgctcacagaggaaaacttgcttttcctggaggcttggcgcgcggttgatcgagcatactatgacaaatcttttaatgggcaaagttggtttagataccgtgaaaatgcccttcgcaatgaaccgatgaacacaagggaagagacatatgcggcaatcaagaaaatgctttcaacattggatgacccttttactcgtttcttagaacctgagaaattgaagagcttgcggtctggtacgcaaggcgcactcacgggtgtaggtttatcgattggttacccaatggcaattaatggatcaccttcaggagttgctgtcatgacagccacccctggtggtcctgcagaaaaggctggcattcttcctggagacaccattttggcaattgacaacagaagcactgaagatatggatatatatgatgccgcagaacgcttacagggccctgaaggaagttcagtagatttgtctattcgtagtgggaccaataccaggcatgtcgttctaaagagacaaacagtcaatttaaaccccgtgaggtcaaggatgtgtgagattccaggttcaaaagatagctcaaagatcggttacatcaaattgacaacatttaaccaaaatgctgcagaatctgttaaggaagccattaagacattgagggacaacaatgttaaatcctttgtgctggatctgcggaataacagtggtggcctttttcctgaaggaattcaaattgcaaagatttggatggacaagggtgttattgtatatatatgcgatagccaaggtgttcgtgacatttatgaggctgatggcgctgatacaattgctgcatcagaaccgttggttgtgctggtaaacaaaggaactgcaagtgcaagtgagatccttgctggagcgctgaaagacaataagagggcagtcgtatatggggaaccaacatatggaaaagggaagattcagtcggttttcggattatctgatggatctggcttggctgttaccgtagcacgctatgaaactcctgcacataccgacattgacaaggttggtgtgattccagaccgaccactgccagcttcatttcctaccgatgaagatgccttctgcagctgccttagggattcaacggctgcttgcaatctgaatgctgctcagctgtttgcaaaatcatgaccaggcccttcattcaacattttgggtcttgggcgttgtacagataaccgtggtgtttcgtaggagctgcttgtgcgtggtgtgtgggtagtccgtaattcttttcattagcattgatttttgtcccagttttatcgcctgtgaaatgaaagcattgtttctgcgtgaaatcacggtcgtgttgaacatgcacttgatgcaacaattttgaatggaagcactaagaaaacctgcaaattgtctttcattttcagtcattttatgcatcagcgttactgaatactcctgtccgcaaaagagtgtcgctatagggtttgtgctggtcaaattttcttaagtttgattgggtttgtaaaaagtattgacaa

SEQ ID NO: 216284 - DNA, 1982 bp, Zea Mays
ttaccaccgcccggccgctgtttggtttgttggttggacttggatattacggccgggcccgtgttacgtcggtcggggggcccgtcgcttttcttgtgcaaacgtgggccccggcctggcacgtaatgtgtgcagtgactgaagtagtggggaaagacgatgacgtcattcatggcagatacacagtgcgacgacattgacatggacatggacatggcgcagctggagtggctgtcggggctcttcgacgacgcatccatcccgcacgagccggcgttccccggcgcggcgcccatcatcaagagctccgcgctggcggccggcgcgctgctgccgccggacaagatggaggacgcgctgctgttccgcagctccagccccatctcggtgctggagcacggcagcttcaacaacgccaacggcggtggcggcggctgctccgcgtcgtcggagtcgtcctcggcgtcctcgtcctcggagtctttctccggcagcgggagcgggagcggcgaaggccacgcgtggtcggcgcccgtgtcgccgccgcccgtgctcgtcataccggcgcgcgcgcggagcaagcgctcccgcccgtccgcgttcacgcgcgccggggcggaggcgcccaccatcctcgtgccgacgcccatgtactcgtccgggccgtcccactcggaccccgagagcatcgctgagtccagcccgcacccggcgccgcccatgaagaaaaagaagaaggccaagaagccgccggcgccgcccgcgcccgcctcttccgacgacaacgacggcgacgccgactacgaggaaggcggcgagcgcgcggagccgcagggcggcgccgtcaggaggtgcacgcactgccagatcgagaagacgccgcagtggcgcgcggggccgctggggcccaagacgctgtgcaacgcctgtggcgtgcgctacaagtccggccgcctgttcccggagtaccgtcccgcggcgagccccaccttcgtgccgtccatccactccaactcgcacaagaaggtggtggagatgcgccagaaggctgtccggagcggtgacccgtcgtgcgacctcctgcagttcatccgccgccgggattgacgtcccggcacggcgtcgccggactgtcggtcggtctcgtcccccttatagctagctatatagtatatgtatacatgctagtatgtatgcatgcatggttgcttcagcagtcgtcggtcgtcgtcgtcgtcgtccatcatggtcatcatcaccacttcaccggtcaccgccatggcatggatcccacccctcatcacatgcattggtttctgtcaacatccatccaatcccaatccatcgccgggcatcccggcgcgtttagttcattaggtcttctttctcatcgggggctagtgttattttacctttcttcttttctgtctattggttaattggttccccctgaatgtttttttgtttgtatagagagagaaagagagaggagggtgagaggagaggcaggagaaatagatgaatcagagtggttgctgcattgcagttgcagttgcttgcaggttaggtactaggtgagaaggagagctaaaccagcagcagagggagacagatctagagaggaaactttgcagctagtcagtcagtcagtcaatcaattagaagaaagcatggagagtgcttttaagcaaatgaaaggggaatttgttggtttgctaattagaagggaggttatgcagggcaggtcagtagtagctatcatcgtccatgatgattttaaaacttaagaagagggggacagccatcatccatcatagtctgtactctgtatccggagcttggtgtactgaactctgaaacttctttttgcagttcatctatgtttagggatttgataagtgttgtttggtttcttctatactagtagtgctacctcttagcgaataattaattatatatgcttttgctctcgttcttttctc

SEQ ID NO: 216285 - DNA, 2122 bp, Zea Mays
gccatgtcttggcctttgcagcctggacgaggttgttcccatgggatccagggggaccaatcttggcatatgttaggttctttattttatttgcaaataaattaaagccgagatgtaaaaggcttctagttagggttgcactttcacgtgcatatcaagttagacaacaaggttgttgccatgcacaccattacagctcgaggacgagctgtcttcaaagagtggggaatgtcatggggcggcaacccagctgcctagggcatggaggcccatagggataggctcaggattaggattagtggataaagattagattagataagattgagttacttggggttagattagataagattgagttagttacttgggggccaagtcttcctatctatataaggatgagttgtacctacttaacggggaatcaatgaatgaagaagaattagtcccagatctctctaatagtctagtcccccccaagccgactccgcccggctatcttcccgacgctgtttatccccctatgaactaggatccataacagatggtgtgtcacttcaaaaatagtcagatgtgatgattaatgagataatgctgcttgccccatgagagtggaaacaaaattagaccttactcaaacagtatggaaaagtattaggcctagatcctaaaaggattccacagaattgggcagccactcaatttgctgaagcattgggcagagcatgggccgagtataacaatgacagtgctgttgttttgatggttgtccaacctgaagaaagaaatatgtacgaccagtactgtcttgtcaatcatctgaaggaatcatatggtgtggcaactataaggaaaacattggcacaagtagaggctcaagggcaggttcttacagatggaacacttgtggtagatggtcggacagtggctgttgtgtatttcagagccgggtatgcaccaactgattacccttcggaagcggagtggagagcgaggcttctgatggaacaatcatctgcagtgaagtgcccttcgatagcctaccatttggtaggaacaaaaaagatccagcaagaactagcaaaacctaatgttcttgaaagatttcttgacaacaaggacgacattgccaaactacgcaagagtttcgcagggttgtggagcttggataatgaagagattgtgagatctgcaatacagaaacctaacctgtttgtcctgaagcctcagcgagaaggcggaggacacactgatcaaactccagaaggaacagggggaggcgcttgcggcgtacatactgatgcagaggatttttccaaaagcatctcttactcctctagtcaggggcggtgattgctttgaggaccttacaatctcggagctgggaatatacggagcctacctgcggaacagagacaaggtgatcttgaataaccagtctggctacttgatgcgcaccaaagtttcttcttcaaacgagggcggcgttgctgcagggtttgccgttttggacagcgttctcctgactgatgagtgagacagcagcgaggtggcagagctatgggtgacacctgacctgcattagtgacagtgcccacagtcaactcaaacgatgacaatatcaactgcaatcgtaggggaaactatgaaattgcttacagaattgcggacagtcggagaagatggcagtgttacgttatgatatagtttcatgtttgtatgctggttgaaaatgtagggaaactcttgttttcactagaaaggaacccctggaggggggagtaacggtgtagaaggtttatgttgtcacagttggcatgcattcatcatataggaatagctaggagatggcaccgttatgccaacacagttataacaaatatcaattgtaaattttatgattggttatcgactaagcaaaacaattttataagaaattgttgtgcggcaatatcgtttgactaaatcttagtcagatgctcgaatattgctatggtttgtaaatataatatatcatatttatagattttgttgtaataaaacataaaaatatgtgttctattagttatgtgggtgtggaagtagggttaacagctaagattagtctgcatttggaggattg

SEQ ID NO: 216286 - DNA, 2410 bp, Zea Mays
ctggttggtggccggtctagacgaagcaagcgatcgggaggaagcacctggacgcctctgtcccggctggagattgacccgccacatgcccacatcggactaggaacaaccgaacaggaacccattcccaattcccctctccggccttcgccgccgccaaggcacgaagccagagcgcgacggcataaatcgcgggagcgcccgccttcgaatcggtttcccccacgccatgtcctccccctgcgtctcgcaccaacagcaggtccgtctccgtctccgcgctgccagccgccttcccgccccagacacggcctcgttcgcgccgcccgcgccccggcggcttcgggtggcgcacgcggcgatgagcgccaaggcgcccctcggcgtggcgccggcggaggagggggccgggacgccggggcagcaggccgtgctggggcagatggtggaggatgccgccgtgtggtgcgccgtccacgggctcgtcgtcggagatcgcgccaaccagagatcaggaacggttcctggggttggcctggttcacgctccattctcgctgcttccagcgcgttttccggcatcgttcttcaatcaagcatgcgagctggctcctatcttcaatgagctcgtggatcgtgtcagcttggatggggagttcttgcaagctgctttgtctagaacaaagcaggttgatgaatttacttcaaggctgctagaaattcatgataagatgatgtctataaataagaaagaggatatacgcttaggattgcaccggtctgactatatgctggattctgaaaccaattcactacttcaaattgagctcaatactatcgcatcatcctttcctggccttggctcccttgtcagtgaacttcacaggaccttactcaaacagtatggaaaagtattaggcctagatcctaaaaggattccacagaattgggcagccactcaatttgctgaagcattgggcagagcatgggccgagtataacaatgacagtgctgttgttttgatggttgtccaacctgaagaaagaaatatgtacgaccagtactgtcttgtcaatcatctgaaggaatcatatggtgtggcaactataaggaaaacattggcacaagtagaggctcaagggcaggttcttacagatggaacacttgtggtagatggtcggacagtggctgttgtgtatttcagagccgggtatgcaccaactgattacccttcggaagcggagtggagagcgaggcttctgatggaacaatcatctgcagtgaagtgcccttcgatagcctaccatttggtaggaacaaaaaagatccagcaagaactagcaaaacctaatgttcttgaaagatttcttgacaacaaggacgacattgccaaactacgcaagagtttcgcagggttgtggagcttggataatgaagagattgtgagatctgcaatacagaaacctaacctgtttgtcctgaagcctcagcgagaaggcggagggaacaacatatatggtcaggatttgcaggacacactgatcaaactccagaaggaacagggggaggcgcttgcggcgtacatactgatgcagaggatttttccaaaagcatctcttactcctctagtcaggggcggtgattgctttgaggaccttacaatctcggagctgggaatatacggagcctacctgcggaacagagacaaggtgatcttgaataaccagtctggctacttgatgcgcaccaaagtttcttcttcaaacgagggcggcgttgctgcagggtttgccgttttggacagcgttctcctgactgatgagtgagacagcagcgaggtggcagagctatgggtgacacctgacctgcattagtgacagtgcccacagtcaactcaaacgatgacaatatcaactgcaatcgtaggggaaactatgaaattgcttacagaattgcggacagtcggagaagatggcagtgttacgttatgatatagtttcatgtttgtatgctggttgaaaatgtagggaaactcttgttttcactagaaaggaacccctggaggggggagtaacggtgtagaaggtttatgttgtcacagttggcatgcattcatcatataggaatagctaggagatggcaccgttatgccaacacagttataacaaatatcaattgtaaattttatgattggttatcgactaagcaaaacaattttataagaaattgttgtgcggcaatatcgtttgactaaatcttagtcagatgctcgaatattgctatggtttgtaaatataatatatcatatttatagattttgttgtaataaaacataaaaatatgtgttctattagttatgtgggtgtggaagtagggttaacagctaagattagtctgcatttggaggattg

SEQ ID NO: 216287 - DNA, 3066 bp, Zea Mays
ctggcctctttctgatctctctaatatgaaggggtgtacatgttccttatataaagatgtgagacccctcagaggcaaagcaggtatttgcccacataaccctaactagggttacttaacacataggtcatcgaaggtcggtcgaagccttcgtggccacggaaaagaggcagcaccgcagaagccgcgtccgattcgttcacgcaaccacgcgttcgtgggccgcctctctctcataaaatccaccgccctcgtcgccaaaatccccccaatcccaccgccagtctccgcccgcgcctcagaagtcagaaccctagccccggcgacgccttcagatccggcgcccttatccggcggaatcgctcgctcctaccaccggttgccgcgtcccggcatctcggctacccggcgtcctgtacccgacttctacgccctcgatctcccccagccgtcgtcacgaggaatcgtttgctccacaggctacgtctccaccaagcctgcatcgacgactcgaaggatccgtgccgtcgtcgatcgccgatcgcctcttcgtagatcgaatctgttcagtgttctgctattcgttgtatttcatctgagatctgaaaaaagtattcgggccatctcgagatagagaggccttcataggcggagaaaaagaaacaggactcgccatccatcatgggtgttgtctattaccaatataagagtgaaaaggaaatctgttctatgcccgtgccccatgcttttatttctgtgtctgaactcaagcagcttatcatgacgagcggtaggcacggccgtggtcgaacccgcggtcgtgccacagaggatattgtcatctccaacgcccaaactggcgaagaatatgcagatgaaagagcatccataccacagaacacaactgtgttggtccgcagaatttccattcctgggcaactgtcagagaagattgttttgtcccctaggccggaagtcacagaagaatgttctgtaccttgcaagtcggtggttactgactcaagctcaaagtcatgttcttccacagtagtgcaagatgaagatgctgtaattgcagcagtaattgatgctgctgaactcaaatgggaacagctcccctctaaaagaggacaagacagtggaaggtttacatcaagacgtaactatgggccgttggaaggggaaacacctccacccggctatgtctgccgctcttgtggtgttccaggccatttcattcaacactgctcacaggaaaacaagatgcctccacctggatacatttgctacagatgccgaattccagggcattttatccaccattgtccaagcattggcgatcccaagttcgacaacaataaaatgagtcggtctcttgtcccagtagttacacctgtcgatggcattttggattcacttgtcccgtctgccccagccggggctgttgatgacttgccagcagagctccactgccgactatgtaaaaaagtgatgagagatgcagtattgacaagcaagtgctgttttgacagtttttgtgatagatgcattcgggattatattattaaagagtcgaagtgcatttgtggagtggagacactagcagatgacctcattccaaatcaaacacttcggagcacaatcagcaatatgttgggaacacagacaagcagtggtggtagtggtacaacaagacacagaagttcgtcaggcagcaaccctaacccaaaaatacagagccacactgcttctgttgcgtcagcaagggaggtgaagcagtctatagaccatcagctaccagcggtatctgcacctgattatgtgctccaggttgccacagaaggtgacctggtgaaccagcctctagagaaattagcagccactgctgaaatccttagcaaatatgaaggcaattctgcagaagtgtcagtagagaaggcggtagcaaatgctgaagccctcaaagtgaaggatggaagtgaaacgacttcgaatgccaccactgtttcagggtcccgagaacatgatgtcacaaggacagatcaagcaaagaagaagcggaagaaggcagacttaaccaagaacgttcagcctaacaatgttggctatggttacaatgtttcttttgaccctgcatattacaatcccttcatcaatggacatccttgggcaactgaaccctacatgtatagctcaatggggatgccgtacgctggttatccgatggatccatattgtgcaaatccaatggatccatattgtgagtatccaatggatccatattgtgtgaatccaatgcaaggctatccagcaagctaccaaaggcctgaaactgagcccatgcgtcgtgggagcactgcggctgccagagcacctttaaagcaccgtgagaggagtgaccggcaccggcccaaggacactcgtcttcagccccaatcaacagagcacaagcgacggctggtctcctctcatggaacaaggtcaaactcagatagaagggaccatgggcattcttatggggcatcctgagtagacttatttgaggatcattctactaggaagcggatgcccgttttctcccggagtagtatgatggtagacaaatcggtggagatcgagacggttccaggagtatgatgactcgtgagtcgtgaagaggacgcaagctacgaggaacgtaatttcaagacgagatggggtcatagatcatcaggaggcgtggacacaaggcactgtcctaaacttggcagaccaagtgcagcaatatattgctggtcaccagtgctcacctattgatcttcttatactcgtaattgtatgtatgcccctgaaagcagaagaaagattgtcacaaagcagagggaactttcggttccctagcgaaatgtattgatattaaacattttttttgtattaatgctaagagtgttgccagctctctctataatgcgaactctccaaataatttcgctatgtttccgagctctcaaattatttggtctcccttctaccctgtgagaaccgtgttgtcgttgataataagtgcaccaaagacttccagtcttt

SEQ ID NO: 216288 - DNA, 605 bp, Zea Mays
tattgcttcacctgtatgtctggattagtggattaattcagcacccttggctttatcatattattgtttatggtagatggaacaacaattgactggaaagtgttcatgcaggtcctaaattcaccatgggatgtatgctacgatcccgcagaggaggccgtgtatattgcaatggctgggcaacaccagatctggaagcacaatttacatgatggagtaaccaaagttattagcggtgatggctatgagaggaatctgaatggctcaagcgccaccagcacatcgtttgcacagccttctgggatttcattagcttttgaaatgcatgagttacttgttgctgatagtgaaagtagttccattcgagttgttaatctgaagacaggaggctcaagattgctggcaggaggagatccagtatttccagaatatttgtttaggtttggagattatgacgggactggctcagatgtgctacttcaacatcccttgggtgttgtttatgccaatgacaatcaagtatatatagctgattcctacaaccgtaaggtagtaaccttattttgacacccatcaagtgtaagatgtgtatagctaagttgtcc

SEQ ID NO: 216289 - DNA, 2936 bp, Zea Mays
gaagcgtaggcacactgctctccggcgagcagccagccgccggcggatcggatccggatctcgaccagcactggcattgccgcgacggagatgccgaccccgaagcagcggctcccctgctcgaccttcggccgaggcggaggagggaggcgcgccgcctgcggctccgccgtgctgccacccgtggtggtcctcgtgttcctatcccaacggtaagaatgatgatcaggaaccaacggcaatgaagaacctcaaatcttttttgcctaaggaggtcagaatgtcttgtgaccagccatgcaagggtttcaattgcttcactaaaaatactttcgatttttcacatttcacatatcctccttaggttaaaatgctttagatacttctcctatcgtactaatactaagtccagctgttctacttttcaattatgtgtgtagcttatgcaccaaactatgtcaatggatggcccatgtcataattgtagtgaataaatcatagatttagaccttgttaatgacccagttttttgtctcattctttgcaactgttgttatttccctgtcttatgtagttatctgttatagaaaatattattcccagtctagtctgtctgactaaccttgttccactatttttgtgcactttctgtatttgccgtttctccatttcctcttcttttttgctttctggttctatttcccttttctttttctgtttgggtccaaacttattatttgatcttttcattatttaacttattatctactggctatactattggagtctgtttattgcaggtttgtgttaattcagtaattagtattcatggtgttggttgtgtttgaaacagccgttaatatcttttatgtgtccttaatttttttgtgtttggatattttttttcgtcttcaggtgtttgatgctataactgctagacaacaagaatcagacactttgagtcttgatttttttaggaatcacgcatcgccctcttggaaaactaatgatctagtcactgagaagagcatggatgtcgatgacaaggctaaagctgaaatcagtttgccagaacatgatctaccaacaaatagatcacccaaagatccagatgaacatcaagctgacaatgcagcaaaagtagctcgaaggggagacaaggcgcgagaagagagcaatggatttggttcataaagatgatgaagcacatgttaagcaggagaatgccgctattgagcgatcaaaagctgtcgattctgctgtgcttggaaaatacagcatatggcgaaaagagaacgagaattcagattctacagttaggctgatgagggaccaaattattatggctcgtgtctattctgcgcttgctaaatcaaagaacaagagtgatctatatcaaaaactgcagacccgaatcaaggaaagccagcgggctgttggagatgcttctgctgatgctggcctgcatcacagcgcacctgagaaaatcatagcgatgggtcaagttttatcaaaggctagagaagaagtttataattgtatggcaatcactcagaaactaagggctatgcttcagtcagcagatgaacaggtcaggtgcttgaagaagcagagtacatttcttagccaattggctgcaaagacaattccaaacagcattcactgcttgtctatgcgtttgacgattgattactatctcctcctccttgaggaacgaaaatttccaaggagtgaaaatttagaaaatccaaatctctatcactatgcacttttctcagataatgtcttggcagcttctgttgttgtgaactcaaccatcatgaatgctaagaaaccagagaaacatgttttccatcttgtgactgacaagttaaactttggagccatgaacatgtggtttctgctgaacccacctggcaaggctaccatccatgttgagaatgtggacgaatttaagtggttgaactcatcatactgtcctgtgttgcggcaacttgagtctgctgccatgaaagagtactatttcaaagctgatcggcccaccagtctctcagcaggttcttcaaacctaaagtatcggaaccccaagtacctctctatgctgaaccacttgaggttctatctcccagaggtctatccaaaggtggataagatactcttcctcgacgatgacatagttgtgcagaaagatttgacagggttgtgggatgttaatcttaatggaaaggtcaatggtgctgtggaaacctgtggggagagtttccaccgttttgacaagtatctcaatttttcaaatccacacattgctcggaactttgatccaaatgcatgtggctgggcttatgggatgaacatctttgatctgaaggagtggaagaagaaagatattactgggatctaccacaaatggcaaaatatgaatgaaggcagagttctttggaagcttgggacacttccgcctggcctcttgaccttctacaagttgacgcacccactggacaagtcatggcatgttcttggactaggatacaacccaagcgtagaccgttcagagatagacagtgctgctgttgttcattacaatgggaacatgaagccatggttggagctagcaatgaccaaataccgaccatattggaccaggtatatcaagtatgatcacccttacatccgtggatgcaacttgagggagtagtagatatagtcgtgctgaaacactgacagatgaggacgagcctgctggacagaagtgttccatgtccttgcggtgcgttgttttactgagcaaactggtactacctgaagctcttggttggacataacgacatagttgctcatgtgagagtagaccagacttagacacaatcacacaagaggattcactcacgtggaatacatttgccctacgttgaaattgatgctactttgaaaaccag

SEQ ID NO: 216290 - DNA, 2305 bp, Zea Mays
gcgaagcgtaggcacactgctctccggcgagcagccagccgccggcggatcggatccggatctcgaccagcactggcattgccgcgacggagatgccgaccccgaagcagcggctcccctgctcgaccttcggccgaggcggaggagggaggcgcgccgcctgcggctccgccgtgctgccacccgtggtggtcctcgtgttcctatcccaacggtaagaatgatgatcaggaaccaacggcaatgaagaacctcaaatcttttttgcctaaggaggtgtttgatgctataactgctagacaacaagaatcagacactttgagtcttgatttttttaggaatcacgcatcgccctcttggaaaactaatgatctagtcactgagaagagcatggatgtcgatgacaaggctaaagctgaaatcagtttgccagaacatgatctaccaacaaatagatcacccaaagatccagatgaacatcaagctgacaatgcagcaaaagtagctcgaaggaaacttagggagacaaggcgcgagaagagagcaatggatttggttcataaagatgatgaagcacatgttaagcaggagaatgccgctattgagcgatcaaaagctgtcgattctgctgtgcttggaaaatacagcatatggcgaaaagagaacgagaattcagattctacagttaggctgatgagggaccaaattattatggctcgtgtctattctgcgcttgctaaatcaaagaacaagagtgatctatatcaaaaactgcagacccgaatcaaggaaagccagcgggctgttggagatgcttctgctgatgctggcctgcatcacagcgcacctgagaaaatcatagcgatgggtcaagttttatcaaaggctagagaagaagtttataattgtatggcaatcactcagaaactaagggctatgcttcagtcagcagatgaacaggtcaggtgcttgaagaagcagagtacatttcttagccaattggctgcaaagacaattccaaacagcattcactgcttgtctatgcgtttgacgattgattactatctcctcctccttgaggaacgaaaatttccaaggagtgaaaatttagaaaatccaaatctctatcactatgcacttttctcagataatgtcttggcagcttctgttgttgtgaactcaaccatcatgaatgctaagaaaccagagaaacatgttttccatcttgtgactgacaagttaaactttggagccatgaacatgtggtttctgctgaacccacctggcaaggctaccatccatgttgagaatgtggacgaatttaagtggttgaactcatcatactgtcctgtgttgcggcaacttgagtctgctgccatgaaagagtactatttcaaagctgatcggcccaccagtctctcagcaggttcttcaaacctaaagtatcggaaccccaagtacctctctatgctgaaccacttgaggttctatctcccagaggtctatccaaaggtggataagatactcttcctcgacgatgacatagttgtgcagaaagatttgacagggttgtgggatgttaatcttaatggaaaggtcaatggtgctgtggaaacctgtggggagagtttccaccgttttgacaagtatctcaatttttcaaatccacacattgctcggaactttgatccaaatgcatgtggctgggcttatgggatgaacatctttgatctgaaggagtggaagaagaaagatattactgggatctaccacaaatggcaaaatatgaatgaaggcagagttctttggaagcttgggacacttccgcctggcctcttgaccttctacaagttgacgcacccactggacaagtcatggcatgttcttggactaggatacaacccaagcgtagaccgttcagagatagacagtgctgctgttgttcattacaatgggaacatgaagccatggttggagctagcaatgaccaaataccgaccatattggaccaggtatatcaagtatgatcacccttacatccgtggatgcaacttgagggagtagtagatatagtcgtgctgaaacactgacagatgaggacgagcctgctggacagaagtgttccatgtccttgcggtgcgttgttttactgagcaaactggtactacctgaagctcttggttggacataacgacatagttgctcatgtgagagtagaccagacttagacacaatcacacaagaggattcactcacgtggaatacatttgccctacgttgaaattgatgctactttgaaaaccag

SEQ ID NO: 216291 - DNA, 2935 bp, Zea Mays
aaaatgaagaactccggcgaagcgaagcgtaggcacactgctctccggcgagcagccagccgccggcggatcggatccggatctcgaccagcactggcattgccgcgacggagatgccgaccccgaagcagcggctcccctgctcgaccttcggccgaggcggaggagggaggcgcgccgcctgcggctccgccgtgctgccacccgtggtggtcctcgtgttcctgttcgtggtcgcgccttcgctcttcttcgtcgtgcgcaatggcggtcgcggctacggccacggccacgtagccgtagcctccgatcccaacggtaagaatgatgatcaggaaccaacggcaatgaagaacctcaaatcttttttgcctaaggaggtcagaatgtcttgtgaccagccatgcaagggtttcaattgcttcactaaaaatactttcgatttttcacatttcacatatcctccttaggttaaaatgctttagatacttctcctatcgtactaatactaagtccagctgttctacttttcaattatgtgtgtagcttatgcaccaaactatgtcaatggatggcccatgtcataattgtagtgaataaatcatagatttagaccttgttaatgacccagttttttgtctcattctttgcaactgttgttatttccctgtcttatgtagttatctgttatagaaaatattattcccagtctagtctgtctgactaaccttgttccactatttttgtgcactttctgtatttgccgtttctccatttcctcttcttttttgctttctggttctatttcccttttctttttctgtttgggtccaaacttattatttgatcttttcattatttaacttattatctactggctatactattggagtctgtttattgcaggtgtttgatgctataactgctagacaacaagaatcagacactttgagtcttgatttttttaggaatcacgcatcgccctcttggaaaactaatgatctagtcactgagaagagcatggatgtcgatgacaaggctaaagctgaaatcagtttgccagaacatgatctaccaacaaatagatcacccaaagatccagatgaacatcaagctgacaatgcagcaaaagtagctcgaaggaaacttagggagacaaggcgcgagaagagagcaatggatttggttcataaagatgatgaagcacatgttaagcaggagaatgccgctattgagcgatcaaaagctgtcgattctgctgtgcttggaaaatacagcatatggcgaaaagagaacgagaattcagattctacagttaggctgatgagggaccaaattattatggctcgtgtctattctgcgcttgctaaatcaaagaacaagagtgatctatatcaaaaactgcagacccgaatcaaggaaagccagcgggctgttggagatgcttctgctgatgctggcctgcatcacagcgcacctgagaaaatcatagcgatgggtcaagttttatcaaaggctagagaagaagtttataattgtatggcaatcactcagaaactaagggctatgcttcagtcagcagatgaacaggtcaggtgcttgaagaagcagagtacatttcttagccaattggctgcaaagacaattccaaacagcattcactgcttgtctatgcgtttgacgattgattactatctcctcctccttgaggaacgaaaatttccaaggagtgaaaatttagaaaatccaaatctctatcactatgcacttttctcagataatgtcttggcagcttctgttgttgtgaactcaaccatcatgaatgctaagaaaccagagaaacatgttttccatcttgtgactgacaagttaaactttggagccatgaacatgtggtttctgctgaacccacctggcaaggctaccatccatgttgagaatgtggacgaatttaagtggttgaactcatcatactgtcctgtgttgcggcaacttgagtctgctgccatgaaagagtactatttcaaagctgatcggcccaccagtctctcagcaggttcttcaaacctaaagtatcggaaccccaagtacctctctatgctgaaccacttgaggttctatctcccagaggtctatccaaaggtggataagatactcttcctcgacgatgacatagttgtgcagaaagatttgacagggttgtgggatgttaatcttaatggaaaggtcaatggtgctgtggaaacctgtggggagagtttccaccgttttgacaagtatctcaatttttcaaatccacacattgctcggaactttgatccaaatgcatgtggctgggcttatgggatgaacatctttgatctgaaggagtggaagaagaaagatattactgggatctaccacaaatggcaaaatatgaatgaaggcagagttctttggaagcttgggacacttccgcctggcctcttgaccttctacaagttgacgcacccactggacaagtcatggcatgttcttggactaggatacaacccaagcgtagaccgttcagagatagacagtgctgctgttgttcattacaatgggaacatgaagccatggttggagctagcaatgaccaaataccgaccatattggaccaggtatatcaagtatgatcacccttacatccgtggatgcaacttgagggagtagtagatatagtcgtgctgaaacactgacagatgaggacgagcctgctggacagaagtgttccatgtccttgcggtgcgttgttttactgagcaaactggtactacctgaagctcttggttggacataacgacatagttgctcatgtgagagtagaccagacttagacacaatcacacaagaggattcactcacgtggaatacatttgccctacgttgaaattgatgctactttgaaaaccag

SEQ ID NO: 216292 - DNA, 3835 bp, Zea Mays
cttaaaaatgaagaactccggcgaagcgaagcgtaggcacactgctctccggcgagcagccagccgccggcggatcggatccggatctcgaccagcactggcattgccgcgacggagatgccgaccccgaagcagcggctcccctgctcgaccttcggccgaggcggaggagggaggcgcgccgcctgcggctccgccgtgctgccacccgtggtggtcctcgtgttcctgttcgtggtcgcgccttcgctcttcttcgtcgtgcgcaatggcggtcgcggctacggccacggccacgtagccgtagcctccggtccgattcgcgttccctcctcgagagcacctgttgcttgtgccgacgcgaggtgttcaattctgcattgccttgttcgatgagcgccgagattgggtggagctcggtggaatctgtctaggttttgggattgatgcgctctccagccgtagtttgatgcgacttagttggataaggggatcatctgagtagtttcagagcggtttagggcttttatatttgttactggctgcgctgttgcttgatttcccgtttggatggaaccgtgtatgtggctctaaggaaatgaacctagtcaccctagggattgcagaaatcattatcccctggcactcagatattattggattacaggaattgttgtcccttatatgttgatgtttctaggttgtatatatatgatatataagtgggtagcgatgggttaatgttatggaaattgaagtgcatgcatacaatagtgactaacaaaactataatgaaactgtgtaataggtggtcataagcattaaaagcatgctgaacaataatacatggcatggccattgttggccgaaatgtagtatatctatataaaacaatgtattactcctccttttccaaaatgtattttgatttagtttgcttcttagtcaaagttctgtaaccttggcaaagtttatagaaaaacatcaaaatcgacgacattaaattagtttatttaatgtcctagatgttaatatatttttatctgaacttcgtcaaacttaaagatgtctgacttaggaccaaactaaaatgatatatattttggaacgaagggggtatattttttgtgaatttcaacattgcattatctgaatgcattgttttacacctgaaattggtaagcattgacatattttgtttgtctgcagatcccaacggtaagaatgatgatcaggaaccaacggcaatgaagaacctcaaatcttttttgcctaaggaggtcagaatgtcttgtgaccagccatgcaagggtttcaattgcttcactaaaaatactttcgatttttcacatttcacatatcctccttaggttaaaatgctttagatacttctcctatcgtactaatactaagtccagctgttctacttttcaattatgtgtgtagcttatgcaccaaactatgtcaatggatggcccatgtcataattgtagtgaataaatcatagatttagaccttgttaatgacccagttttttgtctcattctttgcaactgttgttatttccctgtcttatgtagttatctgttatagaaaatattattcccagtctagtctgtctgactaaccttgttccactatttttgtgcactttctgtatttgccgtttctccatttcctcttcttttttgctttctggttctatttcccttttctttttctgtttgggtccaaacttattatttgatcttttcattatttaacttattatctactggctatactattggagtctgtttattgcaggtgtttgatgctataactgctagacaacaagaatcagacactttgagtcttgatttttttaggaatcacgcatcgccctcttggaaaactaatgatctagtcactgagaagagcatggatgtcgatgacaaggctaaagctgaaatcagtttgccagaacatgatctaccaacaaatagatcacccaaagatccagatgaacatcaagctgacaatgcagcaaaagtagctcgaaggaaacttagggagacaaggcgcgagaagagagcaatggatttggttcataaagatgatgaagcacatgttaagcaggagaatgccgctattgagcgatcaaaagctgtcgattctgctgtgcttggaaaatacagcatatggcgaaaagagaacgagaattcagattctacagttaggctgatgagggaccaaattattatggctcgtgtctattctgcgcttgctaaatcaaagaacaagagtgatctatatcaaaaactgcagacccgaatcaaggaaagccagcgggctgttggagatgcttctgctgatgctggcctgcatcacagcgcacctgagaaaatcatagcgatgggtcaagttttatcaaaggctagagaagaagtttataattgtatggcaatcactcagaaactaagggctatgcttcagtcagcagatgaacaggtcaggtgcttgaagaagcagagtacatttcttagccaattggctgcaaagacaattccaaacagcattcactgcttgtctatgcgtttgacgattgattactatctcctcctccttgaggaacgaaaatttccaaggagtgaaaatttagaaaatccaaatctctatcactatgcacttttctcagataatgtcttggcagcttctgttgttgtgaactcaaccatcatgaatgctaagaaaccagagaaacatgttttccatcttgtgactgacaagttaaactttggagccatgaacatgtggtttctgctgaacccacctggcaaggctaccatccatgttgagaatgtggacgaatttaagtggttgaactcatcatactgtcctgtgttgcggcaacttgagtctgctgccatgaaagagtactatttcaaagctgatcggcccaccagtctctcagcaggttcttcaaacctaaagtatcggaaccccaagtacctctctatgctgaaccacttgaggttctatctcccagaggtctatccaaaggtggataagatactcttcctcgacgatgacatagttgtgcagaaagatttgacagggttgtgggatgttaatcttaatggaaaggtcaatggtgctgtggaaacctgtggggagagtttccaccgttttgacaagtatctcaatttttcaaatccacacattgctcggaactttgatccaaatgcatgtggctgggcttatgggatgaacatctttgatctgaaggagtggaagaagaaagatattactgggatctaccacaaatggcaaaatatgaatgaaggcagagttctttggaagcttgggacacttccgcctggcctcttgaccttctacaagttgacgcacccactggacaagtcatggcatgttcttggactaggatacaacccaagcgtagaccgttcagagatagacagtgctgctgttgttcattacaatgggaacatgaagccatggttggagctagcaatgaccaaataccgaccatattggaccaggtatatcaagtatgatcacccttacatccgtggatgcaacttgagggagtagtagatatagtcgtgctgaaacactgacagatgaggacgagcctgctggacagaagtgttccatgtccttgcggtgcgttgttttactgagcaaactggtactacctgaagctcttggttggacataacgacatagttgctcatgtgagagtagaccagacttagacacaatcacacaagaggattcactcacgtggaatacatttgccctacgttgaaattgatgctactttgaaaaccag

SEQ ID NO: 216293 - DNA, 3309 bp, Zea Mays
cttaaaaatgaagaactccggcgaagcgaagcgtaggcacactgctctccggcgagcagccagccgccggcggatcggatccggatctcgaccagcactggcattgccgcgacggagatgccgaccccgaagcagcggctcccctgctcgaccttcggccgaggcggaggagggaggcgcgccgcctgcggctccgccgtgctgccacccgtggtggtcctcgtgttcctgttcgtggtcgcgccttcgctcttcttcgtcgtgcgcaatggcggtcgcggctacggccacggccacgtagccgtagcctccggtccgattcgcgttccctcctcgagagcacctgttgcttgtgccgacgcgaggtgttcaattctgcattgccttgttcgatgagcgccgagattgggtggagctcggtggaatctgtctaggttttgggattgatgcgctctccagccgtagtttgatgcgacttagttggataaggggatcatctgagtagtttcagagcggtttagggcttttatatttgttactggctgcgctgttgcttgatttcccgtttggatggaaccgtgtatgtggctctaaggaaatgaacctagtcaccctagggattgcagaaatcattatcccctggcactcagatattattggattacaggaattgttgtcccttatatgttgatgtttctaggttgtatatatatgatatataagtgggtagcgatgggttaatgttatggaaattgaagtgcatgcatacaatagtgactaacaaaactataatgaaactgtgtaataggtggtcataagcattaaaagcatgctgaacaataatacatggcatggccattgttggccgaaatgtagtatatctatataaaacaatgtattactcctccttttccaaaatgtattttgatttagtttgcttcttagtcaaagttctgtaaccttggcaaagtttatagaaaaacatcaaaatcgacgacattaaattagtttatttaatgtcctagatgttaatatatttttatctgaacttcgtcaaacttaaagatgtctgacttaggaccaaactaaaatgatatatattttggaacgaagggggtatattttttgtgaatttcaacattgcattatctgaatgcattgttttacacctgaaattggtaagcattgacatattttgtttgtctgcagatcccaacggtaagaatgatgatcaggaaccaacggcaatgaagaacctcaaatcttttttgcctaaggaggtgtttgatgctataactgctagacaacaagaatcagacactttgagtcttgatttttttaggaatcacgcatcgccctcttggaaaactaatgatctagtcactgagaagagcatggatgtcgatgacaaggctaaagctgaaatcagtttgccagaacatgatctaccaacaaatagatcacccaaagatccagatgaacatcaagctgacaatgcagcaaaagtagctcgaaggaaacttagggagacaaggcgcgagaagagagcaatggatttggttcataaagatgatgaagcacatgttaagcaggagaatgccgctattgagcgatcaaaagctgtcgattctgctgtgcttggaaaatacagcatatggcgaaaagagaacgagaattcagattctacagttaggctgatgagggaccaaattattatggctcgtgtctattctgcgcttgctaaatcaaagaacaagagtgatctatatcaaaaactgcagacccgaatcaaggaaagccagcgggctgttggagatgcttctgctgatgctggcctgcatcacagcgcacctgagaaaatcatagcgatgggtcaagttttatcaaaggctagagaagaagtttataattgtatggcaatcactcagaaactaagggctatgcttcagtcagcagatgaacaggtcaggtgcttgaagaagcagagtacatttcttagccaattggctgcaaagacaattccaaacagcattcactgcttgtctatgcgtttgacgattgattactatctcctcctccttgaggaacgaaaatttccaaggagtgaaaatttagaaaatccaaatctctatcactatgcacttttctcagataatgtcttggcagcttctgttgttgtgaactcaaccatcatgaatgctaagaaaccagagaaacatgttttccatcttgtgactgacaagttaaactttggagccatgaacatgtggtttctgctgaacccacctggcaaggctaccatccatgttgagaatgtggacgaatttaagtggttgaactcatcatactgtcctgtgttgcggcaacttgagtctgctgccatgaaagagtactatttcaaagctgatcggcccaccagtctctcagcaggttcttcaaacctaaagtatcggaaccccaagtacctctctatgctgaaccacttgaggttctatctcccagaggtctatccaaaggtggataagatactcttcctcgacgatgacatagttgtgcagaaagatttgacagggttgtgggatgttaatcttaatggaaaggtcaatggtgctgtggaaacctgtggggagagtttccaccgttttgacaagtatctcaatttttcaaatccacacattgctcggaactttgatccaaatgcatgtggctgggcttatgggatgaacatctttgatctgaaggagtggaagaagaaagatattactgggatctaccacaaatggcaaaatatgaatgaaggcagagttctttggaagcttgggacacttccgcctggcctcttgaccttctacaagttgacgcacccactggacaagtcatggcatgttcttggactaggatacaacccaagcgtagaccgttcagagatagacagtgctgctgttgttcattacaatgggaacatgaagccatggttggagctagcaatgaccaaataccgaccatattggaccaggtatatcaagtatgatcacccttacatccgtggatgcaacttgagggagtagtagatatagtcgtgctgaaacactgacagatgaggacgagcctgctggacagaagtgttccatgtccttgcggtgcgttgttttactgagcaaactggtactacctgaagctcttggttggacataacgacatagttgctcatgtgagagtagaccagacttagacacaatcacacaagaggattcactcacgtggaatacatttgccctacgttgaaattgatgctactttgaaaaccag

SEQ ID NO: 216294 - DNA, 3942 bp, Zea Mays
cttaaaaatgaagaactccggcgaagcgaagcgtaggcacactgctctccggcgagcagccagccgccggcggatcggatccggatctcgaccagcactggcattgccgcgacggagatgccgaccccgaagcagcggctcccctgctcgaccttcggccgaggcggaggagggaggcgcgccgcctgcggctccgccgtgctgccacccgtggtggtcctcgtgttcctgttcgtggtcgcgccttcgctcttcttcgtcgtgcgcaatggcggtcgcggctacggccacggccacgtagccgtagcctccggtccgattcgcgttccctcctcgagagcacctgttgcttgtgccgacgcgaggtgttcaattctgcattgccttgttcgatgagcgccgagattgggtggagctcggtggaatctgtctaggttttgggattgatgcgctctccagccgtagtttgatgcgacttagttggataaggggatcatctgagtagtttcagagcggtttagggcttttatatttgttactggctgcgctgttgcttgatttcccgtttggatggaaccgtgtatgtggctctaaggaaatgaacctagtcaccctagggattgcagaaatcattatcccctggcactcagatattattggattacaggaattgttgtcccttatatgttgatgtttctaggttgtatatatatgatatataagtgggtagcgatgggttaatgttatggaaattgaagtgcatgcatacaatagtgactaacaaaactataatgaaactgtgtaataggtggtcataagcattaaaagcatgctgaacaataatacatggcatggccattgttggccgaaatgtagtatatctatataaaacaatgtattactcctccttttccaaaatgtattttgatttagtttgcttcttagtcaaagttctgtaaccttggcaaagtttatagaaaaacatcaaaatcgacgacattaaattagtttatttaatgtcctagatgttaatatatttttatctgaacttcgtcaaacttaaagatgtctgacttaggaccaaactaaaatgatatatattttggaacgaagggggtatattttttgtgaatttcaacattgcattatctgaatgcattgttttacacctgaaattggtaagcattgacatattttgtttgtctgcagatcccaacggtaagaatgatgatcaggaaccaacggcaatgaagaacctcaaatcttttttgcctaaggaggtcagaatgtcttgtgaccagccatgcaagggtttcaattgcttcactaaaaatactttcgatttttcacatttcacatatcctccttaggttaaaatgctttagatacttctcctatcgtactaatactaagtccagctgttctacttttcaattatgtgtgtagcttatgcaccaaactatgtcaatggatggcccatgtcataattgtagtgaataaatcatagatttagaccttgttaatgacccagttttttgtctcattctttgcaactgttgttatttccctgtcttatgtagttatctgttatagaaaatattattcccagtctagtctgtctgactaaccttgttccactatttttgtgcactttctgtatttgccgtttctccatttcctcttcttttttgctttctggttctatttcccttttctttttctgtttgggtccaaacttattatttgatcttttcattatttaacttattatctactggctatactattggagtctgtttattgcaggtttgtgttaattcagtaattagtattcatggtgttggttgtgtttgaaacagccgttaatatcttttatgtgtccttaatttttttgtgtttggatattttttttcgtcttcaggtgtttgatgctataactgctagacaacaagaatcagacactttgagtcttgatttttttaggaatcacgcatcgccctcttggaaaactaatgatctagtcactgagaagagcatggatgtcgatgacaaggctaaagctgaaatcagtttgccagaacatgatctaccaacaaatagatcacccaaagatccagatgaacatcaagctgacaatgcagcaaaagtagctcgaaggggagacaaggcgcgagaagagagcaatggatttggttcataaagatgatgaagcacatgttaagcaggagaatgccgctattgagcgatcaaaagctgtcgattctgctgtgcttggaaaatacagcatatggcgaaaagagaacgagaattcagattctacagttaggctgatgagggaccaaattattatggctcgtgtctattctgcgcttgctaaatcaaagaacaagagtgatctatatcaaaaactgcagacccgaatcaaggaaagccagcgggctgttggagatgcttctgctgatgctggcctgcatcacagcgcacctgagaaaatcatagcgatgggtcaagttttatcaaaggctagagaagaagtttataattgtatggcaatcactcagaaactaagggctatgcttcagtcagcagatgaacaggtcaggtgcttgaagaagcagagtacatttcttagccaattggctgcaaagacaattccaaacagcattcactgcttgtctatgcgtttgacgattgattactatctcctcctccttgaggaacgaaaatttccaaggagtgaaaatttagaaaatccaaatctctatcactatgcacttttctcagataatgtcttggcagcttctgttgttgtgaactcaaccatcatgaatgctaagaaaccagagaaacatgttttccatcttgtgactgacaagttaaactttggagccatgaacatgtggtttctgctgaacccacctggcaaggctaccatccatgttgagaatgtggacgaatttaagtggttgaactcatcatactgtcctgtgttgcggcaacttgagtctgctgccatgaaagagtactatttcaaagctgatcggcccaccagtctctcagcaggttcttcaaacctaaagtatcggaaccccaagtacctctctatgctgaaccacttgaggttctatctcccagaggtctatccaaaggtggataagatactcttcctcgacgatgacatagttgtgcagaaagatttgacagggttgtgggatgttaatcttaatggaaaggtcaatggtgctgtggaaacctgtggggagagtttccaccgttttgacaagtatctcaatttttcaaatccacacattgctcggaactttgatccaaatgcatgtggctgggcttatgggatgaacatctttgatctgaaggagtggaagaagaaagatattactgggatctaccacaaatggcaaaatatgaatgaaggcagagttctttggaagcttgggacacttccgcctggcctcttgaccttctacaagttgacgcacccactggacaagtcatggcatgttcttggactaggatacaacccaagcgtagaccgttcagagatagacagtgctgctgttgttcattacaatgggaacatgaagccatggttggagctagcaatgaccaaataccgaccatattggaccaggtatatcaagtatgatcacccttacatccgtggatgcaacttgagggagtagtagatatagtcgtgctgaaacactgacagatgaggacgagcctgctggacagaagtgttccatgtccttgcggtgcgttgttttactgagcaaactggtactacctgaagctcttggttggacataacgacatagttgctcatgtgagagtagaccagacttagacacaatcacacaagaggattcactcacgtggaatacatttgccctacgttgaaattgatgctactttgaaaaccag

SEQ ID NO: 216295 - DNA, 251 bp, Zea Mays
gagtcaaaaacagttgttgtgccatctctaggactagctttttatttcattcagacctttggacgggttgtgccatctctgggatgagcactaacatctgctgtttcccttgttctagaaatgctgtcgagaagggagaaggccacaaacttcaaaccagactatgatattgatatccatatgaaggaatgttgcgaacaacgatttcactggttagattcccaatcagcttaagaagataaacaatctac

SEQ ID NO: 216296 - DNA, 316 bp, Zea Mays
ggcatggtaaagagtcaaaaacagttgttgtgccatctctaggactagctttttatttcattcagacctttggacgggttgtgccatctctgggatgagcactaacatctgctgtttcccttgttctagaaatgctgtcgagaagggagaaggccacaaacttcaaaccagactatgatattgatatccatatgaaggtcttagctatgagtgggcaagaatccagtattcttacaggctacaaactgaaggaatgttgcgaacaacgatttcactggttagattcccaatcagcttaagaagataaacaatctac

SEQ ID NO: 216297 - DNA, 2081 bp, Zea Mays
  misc_feature (2080)..(2081): n is a, c, g, or t
cgggaggaagactgcatgcaatttggacagatgttttgctttgaccgtggactagtgcctaagtaaaggggtgaaaaatattagtgtagctcacaagttcctttcgatgtgaatttctttaactttcaatgctatgcttgtgacctggcagagtcaaatcattcctctgtactgtacagtatttatgtggcaataggctcttcctgtgacacaaagcaactataatttctgttggtgttggcggattcttttcttgccaaatatatgctgttattatgttgcttgttatggtggaggaatgaggaatcatctgtagttcgaatcatgttttgtaatcacttctctttgctgtcctgcaaggccacggctgtggaaccataacttttgcaccacttcatcatgatgaaactattatattctccttctcttttggtagcatcttgtcagccttttagtattgtatacggaaaacagagatccttccatcatgaagtcatcacctttgcgtcatttgggagacatgcttgccttcaagcgtcagtggaggactgctaataagtttgctcccctgaaacaactattggaaacagtcacctaatttctttcttgacatggtttaaaggacaatttctctttgcatggtgtttctgggctgtgtaccacagcttccaccgacagcttagttgtattacgaagtatgaactatggacacagaaagtgcgtgacagcctaactgttaagcgttatatggatttaaatagctttggtttgattgatgcactgctggtcatggtataatctacatccacatcatcaatagactgccatatggtgcatttactagcctcaaacaatagatgatgggcatgtttggttcagcttttttctgaccagcttttctgaaaatctggctgtgaggagaatctggctgtgtagagaatctaggtattattaggattacgtgcggagaaagataaagttgtccatagggcttagaatctagaaagcgatggatttctattattgaaacgactcaaccgattttgtgtttatgttgattttaaatggtttttactcaaacgaattttataaaagctggctgaaaagctgagcgtttggcagcccgcagtagcttctggtggccagaagctgcagaaagccgaaacaaacaggggcgatgtcttctgccagcatcaggggtgcctacaactgtaaacaagttgtttcttttttttcctcttgcgtaaattacattgtgggaaatttaaaccttcctgctggatgaaattctatttaggaactctcactagctttttctcctttttttcttttgacatgttttacttgtctattcaggaacaccatatacaaacgaatcatggacctgtatctgttgcagtgtatggtgaccatgacaagcctgcccttgttacttatcccgatattgctttaaaccatatgtcctgcttccaaggactattgttctgtcctgaagccgcttcactgctgcttcataatttttgtatttaccatatcagccccccagggcatgagttaggagctgctccaatttcaccgaatgctcctataccgtctgttgacgatttggcagatcagattaggctctgttatgtgctttggtgtcactgcaggtgcctacattctaactctgtttgcgtcaaagtatagggagcgggtactaggtctcatccttgtttcacctctgtgtaaaggccccacttggactgagtggttatacagtaaggtgatatccaatctgctgtattactatggcatgtgtgggttggtgaaggagtgcctacttcagcggtacttcagcaaggaagtgcaaggattctctgaattgcccgagtcagacatagtgcaggcttgtagaagcttgctagatcagcggcagagcatgaatgtgtggcgctttgtacaaacaatgaatcagtacgtaaacatctcacacctgtatactaatgatgattgtgcggtggaaaaactcggaggtgaagttaccgcgtacttaatttgttttgaattaattttcaggagatatgacttgactgaacann

SEQ ID NO: 216298 - DNA, 2240 bp, Zea Mays
  misc_feature (2239)..(2240): n is a, c, g, or t
cgtctacgcccccttcatcaaacgactttagcgctaaagattctggccccgacgctcttgggtgctgcctcggtgtcctaaccaccagttttttttctttcttgtatcgcttgttttagcaggggttcctaaactgtctagttctttatttgcttggttgggctcgtttggtggttctccgtggaattgttcctttctttctgaacgaattccttactcaaggagggtgtgatttctgttttggtgttggttaattttaatgaaattgttcgtctttccgggaggaagactgcatgcaatttggacagatgttttgctttgaccgtggactagtgcctaagtaaaggggtgaaaaatattagtgtagctcacaagttcctttcgatgtgaatttctttaactttcaatgctatgcttgtgacctggcagagtcaaatcattcctctgtactgtacagtatttatgtggcaataggctcttcctgtgacacaaagcaactataatttctgttggtgttggcggattcttttcttgccaaatatatgctgttattatgttgcttgttatggtggaggaatgaggaatcatctgtagttcgaatcatgttttgtaatcacttctctttgctgtcctgcaaggccacggctgtggaaccataacttttgcaccacttcatcatgatgaaactattatattctccttctcttttggtagcatcttgtcagccttttagtattgtatacggaaaacagagatccttccatcatgaagtcatcacctttgcgtcatttgggagacatgcttgccttcaagcgtcagtggaggactgctaataagtttgctcccctgaaacaactattggaaacagtcacctaatttctttcttgacatggtttaaaggacaatttctctttgcatggtgtttctgggctgtgtaccacagcttccaccgacagcttagttgtattacgaagtatgaactatggacacagaaagtgcgtgacagcctaactgttaagcgttatatggatttaaatagctttggtttgattgatgcactgctggtcatggtataatctacatccacatcatcaatagactgccatatggtgcatttactagcctcaaacaatagatgatgggcatgtttggttcagcttttttctgaccagcttttctgaaaatctggctgtgaggagaatctggctgtgtagagaatctaggtattattaggattacgtgcggagaaagataaagttgtccatagggcttagaatctagaaagcgatggatttctattattgaaacgactcaaccgattttgtgtttatgttgattttaaatggtttttactcaaacgaattttataaaagctggctgaaaagctgagcgtttggcagcccgcagtagcttctggtggccagaagctgcagaaagccgaaacaaacaggggcgatgtcttctgccagcatcaggggtgcctacaactgaacaccatatacaaacgaatcatggacctgtatctgttgcagtgtatggtgaccatgacaagcctgcccttgttacttatcccgatattgctttaaaccatatgtcctgcttccaaggactattgttctgtcctgaagccgcttcactgctgcttcataatttttgtatttaccatatcagccccccagggcatgagttaggagctgctccaatttcaccgaatgctcctataccgtctgttgacgatttggcagatcaggttgtggatgtcctcgatttctttggattaggctctgttatgtgctttggtgtcactgcaggtgcctacattctaactctgtttgcgtcaaagtatagggagcgggtactaggtctcatccttgtttcacctctgtgtaaaggccccacttggactgagtggttatacagtaaggtgatatccaatctgctgtattactatggcatgtgtgggttggtgaaggagtgcctacttcagcggtacttcagcaaggaagtgcaaggattctctgaattgcccgagtcagacatagtgcaggcttgtagaagcttgctagatcagcggcagagcatgaatgtgtggcgctttgtacaaacaatgaatcagtacgtaaacatctcacacctgtatactaatgatgattgtgcggtggaaaaactcggaggtgaagttaccgcgtacttaatttgttttgaattaattttcaggagatatgacttgactgaacann

SEQ ID NO: 216299 - DNA, 871 bp, Zea Mays
  misc_feature (870)..(871): n is a, c, g, or t
gttagttgagttcctcgatcgctcgtactgtcccgcagtagcttctggtggccagaagctgcagaaagccgaaacaaacaggggcgatgtcttctgccagcatcaggggtgcctacaactgaacaccatatacaaacgaatcatggacctgtatctgttgcagtgtatggtgaccatgacaagcctgcccttgttacttatcccgatattgctttaaaccatatgtcctgcttccaaggactattgttctgtcctgaagccgcttcactgctgcttcataatttttgtatttaccatatcagccccccagggcatgagttaggagctgctccaatttcaccgaatgctcctataccgtctgttgacgatttggcagatcaggttgtggatgtcctcgatttctttggattaggctctgttatgtgctttggtgtcactgcaggtgcctacattctaactctgtttgcgtcaaagtatagggagcgggtactaggtctcatccttgtttcacctctgtgtaaaggccccacttggactgagtggttatacagtaaggtgatatccaatctgctgtattactatggcatgtgtgggttggtgaaggagtgcctacttcagcggtacttcagcaaggaagtgcaaggattctctgaattgcccgagtcagacatagtgcaggcttgtagaagcttgctagatcagcggcagagcatgaatgtgtggcgctttgtacaaacaatgaatcagtacgtaaacatctcacacctgtatactaatgatgattgtgcggtggaaaaactcggaggtgaagttaccgcgtacttaatttgttttgaattaattttcaggagatatgacttgactgaacann

SEQ ID NO: 216300 - DNA, 879 bp, Zea Mays
  misc_feature (878)..(879): n is a, c, g, or t
cttgcacttgctcttgctcttgcgcccccgccattcgtgaagctgcattttcgtcggccgctgaagcagcacgacacgagatggcgggctcctcgccgccgcgtctccggcggccttcgtctgcctacgaacaccatatacaaacgaatcatggacctgtatctgttgcagtgtatggtgaccatgacaagcctgcccttgttacttatcccgatattgctttaaaccatatgtcctgcttccaaggactattgttctgtcctgaagccgcttcactgctgcttcataatttttgtatttaccatatcagccccccagggcatgagttaggagctgctccaatttcaccgaatgctcctataccgtctgttgacgatttggcagatcaggttgtggatgtcctcgatttctttggattaggctctgttatgtgctttggtgtcactgcaggtgcctacattctaactctgtttgcgtcaaagtatagggagcgggtactaggtctcatccttgtttcacctctgtgtaaaggccccacttggactgagtggttatacagtaaggtgatatccaatctgctgtattactatggcatgtgtgggttggtgaaggagtgcctacttcagcggtacttcagcaaggaagtgcaaggattctctgaattgcccgagtcagacatagtgcaggcttgtagaagcttgctagatcagcggcagagcatgaatgtgtggcgctttgtacaaacaatgaatcagtacgtaaacatctcacacctgtatactaatgatgattgtgcggtggaaaaactcggaggtgaagttaccgcgtacttaatttgttttgaattaattttcaggagatatgacttgactgaacann

SEQ ID NO: 216301 - DNA, 889 bp, Zea Mays
  misc_feature (888)..(889): n is a, c, g, or t
gcgccgaggagagagagagaacggtgcgcccgcctgctcctcctcctcccccttccgtcatttataagcgacggcaacacaggcgacgaagccggggagaggggggcgcacgaggcaatttatagcgaggagaagaggagcggccgggcccgagcagagcaggccgggccagccatctctcctctgcggcgtcggcgcccgggatgggggactctggcggctccgttgtgtcggtcgacgtcgagcgcatctccttcggcggcaaggaacaccatatacaaacgaatcatggacctgtatctgttgcagtgtatggtgaccatgacaagcctgcccttgttacttatcccgatattgctttaaaccatatgtcctgcttccaaggactattgttctgtcctgaagccgcttcactgctgcttcataatttttgtatttaccatatcagccccccagggcatgagttaggagctgctccaatttcaccgaatgctcctataccgtctgttgacgatttggcagatcagattaggctctgttatgtgctttggtgtcactgcaggtgcctacattctaactctgtttgcgtcaaagtatagggagcgggtactaggtctcatccttgtttcacctctgtgtaaaggccccacttggactgagtggttatacagtaaggtgatatccaatctgctgtattactatggcatgtgtgggttggtgaaggagtgcctacttcagcggtacttcagcaaggaagtgcaaggattctctgaattgcccgagtcagacatagtgcaggcttgtagaagcttgctagatcagcggcagagcatgaatgtgtggcgctttgtacaaacaatgaatcagagatatgacttgactgaacann

SEQ ID NO: 216302 - DNA, 1011 bp, Zea Mays
  misc_feature (1010)..(1011): n is a, c, g, or t
ctgcgctgcaataatagagaagtgcaggaatggcggagcgaatataggacaagcgaaaggaagggcaacaaaagggaggggagagagaggggtggggcgccgaggagagagagagaacggtgcgcccgcctgctcctcctcctcccccttccgtcatttataagcgacggcaacacaggcgacgaagccggggagaggggggcgcacgaggcaatttatagcgaggagaagaggagcggccgggcccgagcagagcaggccgggccagccatctctcctctgcggcgtcggcgcccgggatgggggactctggcggctccgttgtgtcggtcgacgtcgagcgcatctccttcggcggcaaggaacaccatatacaaacgaatcatggacctgtatctgttgcagtgtatggtgaccatgacaagcctgcccttgttacttatcccgatattgctttaaaccatatgtcctgcttccaaggactattgttctgtcctgaagccgcttcactgctgcttcataatttttgtatttaccatatcagccccccagggcatgagttaggagctgctccaatttcaccgaatgctcctataccgtctgttgacgatttggcagatcaggttgtggatgtcctcgatttctttggattaggctctgttatgtgctttggtgtcactgcaggtgcctacattctaactctgtttgcgtcaaagtatagggagcgggtactaggtctcatccttgtttcacctctgtgtaaaggccccacttggactgagtggttatacagtaaggtgatatccaatctgctgtattactatggcatgtgtgggttggtgaaggagtgcctacttcagcggtacttcagcaaggaagtgcaaggattctctgaattgcccgagtcagacatagtgcaggcttgtagaagcttgctagatcagcggcagagcatgaatgtgtggcgctttgtacaaacaatgaatcagagatatgacttgactgaacann

SEQ ID NO: 216303 - DNA, 1673 bp, Zea Mays
gtctcgttcccgcccacgcgcttctatctctcaccagcagaccgcgccgccgccgcgccaccgctctccggatcatcggccgtccacctcctcctcctcctcgcccgctcaccggccgtccctgctgcggtgccgtccacttcctctccctgccgccgtagctcgcacaacccccatctcgccctcttccttcttgccacaccgtcgctaccaccgccccgcgctgagagggaccgacgccatggacctcctcgagaagatgatggcgcttgactctgcacaggatcagctttggtcaaatctatctcagcaagccaatgatgactgaagccgatggagagacagctactttatttccaaaatcagcaaggctcaggaacttgacatactctgcaccactgtatgttgatgtgtcatacagagtaatgaagaaaggacatgactgtgaggaagttacagagactgcagagtatccaaaagtgtttattgggaaggttccaatcatgttgcgctctagttactgcacactgtatcaataatctgagaaggatctcactgaacttggggagtgtccttatgaccaaggtggttatttcattatcaatggaagcgaaaaggttcttattgcccaggagaagatgagcactaaccatgtctatgtttttaagaagaggcatcctaataaatttgcatatgtggctgaagtccgttccatggctgagaaccagaacagaccagccagcggcatgtttgtacggatgctttcacgagcaggagcaaaaggggagattggtttccaatgtgacaataaccagggcgagtgtcgggctaaattttcttgccatcttgactgttttgcttgggtgaagcgagacagttaccttccacaaggaagccaaggtctaaagcacacttgcaggctgttacaaaagccaagctacgttacgatcctctggaggttaatccagaagatatggttcgctttgcaatggagcagccacagacaatggcttcgtattctgtatcagacgatgttgcaacatactatctatacatgacttatgtccatcctttcatcttttctcttgcaaccataatacctatgttacctgatgaggtactgtggaaaggaagtgggacactttgtgaaattctgctaatggttcaggcattcaaggctggaggcacataactatgaatagtgcatcttctaaaatctctcactaaatcagccagctcttctcactaaatcagccagctcttctgcttgtcccattgtcatccagatacttatttgggatgttgaagtacaaccaaatagacatgctgtcctaggagcaagcgagtctcgccctgatctggaatgggtttacaagccccatataataaatcataacagtgcgggagcattttttggatgtccttcacacagatgcaggcaatgaaagaaacagaaaatagacaatgttagcgcggagtgagacagataggaattgggatagaatcatccttgttctcagatcagctgtacattctttattatggtagtatatcatacctgtacgagtagactgacggttgcttccaaatactccatgtgtttgaaatatgtattgtatgtgatattctgtgttgcatgtgattttatgtttgtctaattttttatttctgta

SEQ ID NO: 216304 - DNA, 1662 bp, Zea Mays
gtctcgttcccgcccacgcgcttctatctctcaccagcagaccgcgccgccgccgcgccaccgctctccggatcatcggccgtccacctcctcctcctcctcgcccgctcaccggccgtccctgctgcggtgccgtccacttcctctccctgccgccgtagctcgcacaacccccatctcgccctcttccttcttgccacaccgtcgctaccaccgccccgcgctgagagggaccgacgccatggacctcctcgagaagatgatggcgcttggatcagctttggtcaaatctatctcagcaagccaatgatgactgaagccgatggagagacagctactttatttccaaaatcagcaaggctcaggaacttgacatactctgcaccactgtatgttgatgtgtcatacagagtaatgaagaaaggacatgactgtgaggaagttacagagactgcagagtatccaaaagtgtttattgggaaggttccaatcatgttgcgctctagttactgcacactgtatcaataatctgagaaggatctcactgaacttggggagtgtccttatgaccaaggtggttatttcattatcaatggaagcgaaaaggttcttattgcccaggagaagatgagcactaaccatgtctatgtttttaagaagaggcatcctaataaatttgcatatgtggctgaagtccgttccatggctgagaaccagaacagaccagccagcggcatgtttgtacggatgctttcacgagcaggagcaaaaggggagattggtttccaatgtgacaataaccagggcgagtgtcgggctaaattttcttgccatcttgactgttttgcttgggtgaagcgagacagttaccttccacaaggaagccaaggtctaaagcacacttgcaggctgttacaaaagccaagctacgttacgatcctctggaggttaatccagaagatatggttcgctttgcaatggagcagccacagacaatggcttcgtattctgtatcagacgatgttgcaacatactatctatacatgacttatgtccatcctttcatcttttctcttgcaaccataatacctatgttacctgatgaggtactgtggaaaggaagtgggacactttgtgaaattctgctaatggttcaggcattcaaggctggaggcacataactatgaatagtgcatcttctaaaatctctcactaaatcagccagctcttctcactaaatcagccagctcttctgcttgtcccattgtcatccagatacttatttgggatgttgaagtacaaccaaatagacatgctgtcctaggagcaagcgagtctcgccctgatctggaatgggtttacaagccccatataataaatcataacagtgcgggagcattttttggatgtccttcacacagatgcaggcaatgaaagaaacagaaaatagacaatgttagcgcggagtgagacagataggaattgggatagaatcatccttgttctcagatcagctgtacattctttattatggtagtatatcatacctgtacgagtagactgacggttgcttccaaatactccatgtgtttgaaatatgtattgtatgtgatattctgtgttgcatgtgattttatgtttgtctaattttttatttctgta

SEQ ID NO: 216305 - DNA, 1671 bp, Zea Mays
ctctcacctgtctcgttcccgcccacgcgcttctatctctcaccagcagaccgcgccgccgccgcgccaccgctctccggatcatcggccgtccacctcctcctcctcctcgcccgctcaccggccgtccctgctgcggtgccgtccacttcctctccctgccgccgtagctcgcacaacccccatctcgccctcttccttcttgccacaccgtcgctaccaccgccccgcgctgagagggaccgacgccatggacctcctcgagaagatgatggcgcttgactctgcacaggatcagctttggtcaaatctatctcagcaagccaatgatgactgaagccgatggagagacagctactttatttccaaaatcagcaaggctcaggaacttgacatactctgcaccactgtatgttgatgtgtcatacagagtaatgaagaaaggacatgactgtgaggaagttacagagactgcagagtatccaaaagtgtttattgggaaggttccaatcatgttgcgctctagttactgcacactgtatcaataatctgagaaggatctcactgaacttggggagtgtccttatgaccaaggtggttatttcattatcaatggaagcgaaaaggttcttattgcccaggagaagatgagcactaaccatgtctatgtttttaagaagaggcatcctaataaatttgcatatgtggctgaagtccgttccatggctgagaaccagaacagaccagccagcggcatgtttgtacggatgctttcacgagcaggagcaaaaggggagattggtttccaatgtgacaataaccagggcgagtgtcgggctaaattttcttgccatcttgactgttttgcttgggtgaagcgagacagttaccttccacaaggaagccaaggtctaaaggctgttacaaaagccaagctacgttacgatcctctggaggttaatccagaagatatggttcgctttgcaatggagcagccacagacaatggcttcgtattctgtatcagacgatgttgcaacatactatctatacatgacttatgtccatcctttcatcttttctcttgcaaccataatacctatgttacctgatgaggtactgtggaaaggaagtgggacactttgtgaaattctgctaatggttcaggcattcaaggctggaggcacataactatgaatagtgcatcttctaaaatctctcactaaatcagccagctcttctcactaaatcagccagctcttctgcttgtcccattgtcatccagatacttatttgggatgttgaagtacaaccaaatagacatgctgtcctaggagcaagcgagtctcgccctgatctggaatgggtttacaagccccatataataaatcataacagtgcgggagcattttttggatgtccttcacacagatgcaggcaatgaaagaaacagaaaatagacaatgttagcgcggagtgagacagataggaattgggatagaatcatccttgttctcagatcagctgtacattctttattatggtagtatatcatacctgtacgagtagactgacggttgcttccaaatactccatgtgtttgaaatatgtattgtatgtgatattctgtgttgcatgtgattttatgtttgtctaattttttatttctgta

SEQ ID NO: 216306 - DNA, 2967 bp, Zea Mays
ttggctaagagacctgccaggctgccagcgtacgctagccaagtccctgagtaggcctcctgttttcccccacggcccacgctagccaagtccaggttctgaggttcacaaatcacaaccctagttggcggcgctcagatccggtggcatcctcctcccgcgtccctgtagcggcctccgacgacgaccttgtagcggcagcgtgtggcggcaatcgagcaagactgaagttaaggaagcagcagaaccatggcatcccgtttctggggacagggggacagtgagtctgaggaggaggaggtggaagaagttgagtcagaacagggcagtgatagtgatgatgatggaggtcgaggtggtgcgggacgcggtgcccaaaaccgatatttgaagaatcaagaagatgacagcgatgagtctgatacaggtcaccgtgtgatccgctccctgagggacaagcgcaacgaggagatgagatctattgttgatcagatgcgtaatgcaatgaagatcaatgactgggtgagcttgcaggagagttttgagaagcttaacaaacatcttgagaaggttgttcgtgtcaatgaatctactgaggtaccaaaaatgtatatcaaagctcttgtgttgctggaggacttccttgccgaagcccttgcaaacaaggaggccaggaagaagatgagcagcagcaattcgaaggcactcaatgcgatgaggcaaaaactcaagaagaacaacaagcagtatgaagagcagatccagaagtgcagggagcatccagagagttttgaagatgaagctgcagatgataaagatgtggatgatgacgatgctgatgaaagtgatgcagagattgaagatcctgataaaatagctatgtcagaatcagaagaggaacaagatgaagaggatgatgataaggatggttgggaacagaaaaggagtaagaaggataagctgatggataagcagttcttgaaagatccaagtgaaatcacatgggatattgtcgataagaaactcaaagagattatagcatctaggggaaagaaaggtactggaaggatcgagcgtgttgagcagttaacatttttgacccgtgtggccaaaacaccagctcagaagcttgaaatcctcttccatgtgatttctgcgcagtttgatgttaaccctagtctacttgggcatatgccagtcaatgtgtggaagaagtgtgtcaataatatgcttcttgtgcttgatatactccagcagtatcctaacattgtagtagacacctcatttgagcctgatgagaatgaaactcaaaagggtgcagactacaatggaacaatacatgttgtcggtgacctggttgcattccttgagagactggactctgaatttttgaagaccttacagtgcacagatccatacacaaaagattatgttcagaggctcagagaggaacccctgtttctggttgtcgcacagaacgtccaagattatcttgaaagggttggaaacttcaaagctgctgccaaggttgcactgcgccgtgttgaactagtttactacaagccccaagaagtgtacgatgcaatgagaaaactcgcagagcagcctgaggactgtgtggatgatgatgatgcagaggctggtgatgaacataaagcagtagatgacaatagaggaccatcaccatttgttgtgattccagaggctgtgcacaggaagcctacttttccagaaagcggtagaactttgatggatggattgatgttcttaatttacaagtatggggatgaaaggaccaaagcccgtgcaatgctgtgtgacatatatcaccatgcgatctctgatgagttttcagtggctcgcgacttgcttttaatgagtcatttgcaagatggtattcagctcatggacatatcatcgcagattttattcaacagagtcatggcccagttagggctgtgtgctttcagggctggtttgataaatgaagcccatggttgcttgactgagctctattctactgggagggtgaaagaattgcttgcacaaggtgtgcaacaaagccgataccatgaaaaaactcccgaacaggaaagacttgagaggagaaggcaaatgccttaccatatgcatataaacctggagcttttggaagccacacacttgatctgtgcgatgctgattgaagtccccaatatggctgccagcacctatgacaagcggagacctatgagcaaaacattccgaaggcttcttgaagtgagtgaaaggcagacatttgttgggccgcccgagaatgtgagggaccatgtaatggctgccacaagagccctcaacaagggtgatcaccaaaaggctttcagtgtcataaattcgttggagatttggaagcttttgaggaacagagagcatgttcttgagatgttggagcttaagatcaaggaggaagctcttagaacctatctcttttcatactcgtcttcgtacgagtccttaagccttaaccagctcactaccatgtttgatctcagcgagcagcatgcccacagcattgttagcaagatgatgatgcatgaagagcttcatgctagctgggaccagccaacaaagtgcatcgtattccatagtgtggaccaaactaggcttcaggggctactcttccagatggcagataagctctcggtcctggtggagatcaatgagagggcatacgaggcaagaactggtggtactctcgagggggtacctcccaggcgcaggggcgagggtcaggataatatgggaaagtggcaggataactttgtctcgtcacaggggcggcagggtggtggcaacaggtttggatactccggcagaggtgcaatatctggtcaaagtggtggtggacaccagagggacaggggcaatcagggttaccgcgggggctatggtggcgtttcaaggtttcaggatgcaaggggacggtcc

SEQ ID NO: 216307 - DNA, 3396 bp, Zea Mays
ttggctaagagacctgccaggctgccagcgtacgctagccaagtccctgagtaggcctcctgttttcccccacggcccacgctagccaagtccaggttctgaggttcacaaatcacaaccctagttggcggcgctcagatccggtggcatcctcctcccgcgtccctgtagcggcctccgacgacgaccttgtagcggcagcgtgtggcggcaatcggtgtactctttgcagagcaagactgaagttaaggaagcagcagaaccatggcatcccgtttctggggacagggggacagtgagtctgaggaggaggaggtggaagaagttgagtcagaacagggcagtgatagtgatgatgatggaggtcgaggtggtgcgggacgcggtgcccaaaaccgatatttgaagaatcaagaagatgacagcgatgagtctgatacaggtcaccgtgtgatccgctccctgagggacaagcgcaacgaggagatgagatctattgttgatcagatgcgtaatgcaatgaagatcaatgactgggtgagcttgcaggagagttttgagaagcttaacaaacatcttgagaaggttgttcgtgtcaatgaatctactgaggtaccaaaaatgtatatcaaagctcttgtgttgctggaggacttccttgccgaagcccttgcaaacaaggaggccaggaagaagatgagcagcagcaattcgaaggcactcaatgcgatgaggcaaaaactcaagaagaacaacaagcagtatgaagagcagatccagaagtgcagggagcatccagagagttttgaagatgaagctgcagatgataaagatgtggatgatgacgatgctgatgaaagtgatgcagagattgaagatcctgataaaatagctatgtcagaatcagaagaggaacaagatgaagaggatgatgataaggatggttgggaacagaaaaggagtaagaaggataagctgatggataagcagttcttgaaagatccaagtgaaatcacatgggatattgtcgataagaaactcaaagagattatagcatctaggggaaagaaaggtactggaaggatcgagcgtgttgagcagttaacatttttgacccgtgtggccaaaacaccagctcagaagcttgaaatcctcttccatgtgatttctgcgcagtttgatgttaaccctagtctacttgggcatatgccagtcaatgtgtggaagaagtgtgtcaataatatgcttcttgtgcttgatatactccagcagtatcctaacattgtagtagacacctcatttgagcctgatgagaatgaaactcaaaagggtgcagactacaatggaacaatacatgttgtcggtgacctggttgcattccttgagagactggactctgaatttttgaagaccttacagtgcacagatccatacacaaaagattatgttcagaggctcagagaggaacccctgtttctggttgtcgcacagaacgtccaagattatcttgaaagggttggaaacttcaaagctgctgccaaggttgcactgcgccgtgttgaactagtttactacaagccccaagaagtgtacgatgcaatgagaaaactcgcagagcagcctgaggactgtgtggatgatgatgatgcagaggctggtgatgaacataaagcagtagatgacaatagaggaccatcaccatttgttgtgattccagaggctgtgcacaggaagcctacttttccagaaagcggtagaactttgatggatggattgatgttcttaatttacaagtatggggatgaaaggaccaaagcccgtgcaatgctgtgtgacatatatcaccatgcgatctctgatgagttttcagtggctcgcgacttgcttttaatgagtcatttgcaagatggtattcagctcatggacatatcatcgcagattttattcaacagagtcatggcccagttagggctgtgtgctttcagggctggtttgataaatgaagcccatggttgcttgactgagctctattctactgggagggtgaaagaattgcttgcacaaggtgtgcaacaaagccgataccatgaaaaaactcccgaacaggaaagacttgagaggagaaggcaaatgccttaccatatgcatataaacctggagcttttggaagccacacacttgatctgtgcgatgctgattgaagtccccaatatggctgccagcacctatgacaagcggagacctatgagcaaaacattccgaaggcttcttgaagtgagtgaaaggcagacatttgttgggccgcccgagaatgtgagggaccatgtaatggctgccacaagagccctcaacaagggtgatcaccaaaaggctttcagtgtcataaattcgttggagatttggaagcttttgaggaacagagagcatgttcttgagatgttggagcttaagatcaaggaggaagctcttagaacctatctcttttcatactcgtcttcgtacgagtccttaagccttaaccagctcactaccatgtttgatctcagcgagcagcatgcccacagcattgttagcaagatgatgatgcatgaagagcttcatgctagctgggaccagccaacaaagtgcatcgtattccatagtgtggaccaaactaggcttcaggggctactcttccagatggcagataagctctcggtcctggtggagatcaatgagagggcatacgaggcaagaactggtggtactctcgagggggtacctcccaggcgcaggggcgagggtcaggataatatgggaaagtggcaggataactttgtctcgtcacaggggcggcagggtggtggcaacaggtttggatactccggcagaggtgcaatatctggtcaaagtggtggtggacaccagagggacaggggcaatcagggttaccgcgggggctatggtggcgtttcaaggtttcaggatgcaaggggtcgcaaccagtctattccatcaggcagaggtggtgatggtggtgcacgcatggtgaacctgaacaggatgggtagagtttagaagtgataattttcagctcgagtaagcctgaaattctcctaaaagccaagttttgaatcactgctttttacatagtttcctgttctgggctgagccatccacctgtttcctacatttcgttgtagccttttaatttaaggggctaggaaattgaactaagagtttggtactgtttcgtgggagtgtgacttcactccaatatttgatatctatctgtgacacttgctataacctgtacttttcttgtttgtgttatgtggtttttatttggttatgaaaaataaaaaggcatgtcgcagatagaagatcgttattctattcgcgtttgaaaagctttac

SEQ ID NO: 216308 - DNA, 2763 bp, Zea Mays
ttggctaagagacctgccaggctgccagcgtacgctagccaagtccctgagtaggcctcctgttttcccccacggcccacgctagccaagtccaggttctgaggttcacaaatcacaaccctagttggcggcgctcagatccggtggcatcctcctcccgcgtccctgtagcggcctccgacgacgaccttgtagcggcagcgtgtggcggcaatcgagcaagactgaagttaaggaagcagcagaaccatggcatcccgtttctggggacagggggacagtgagtctgaggaggaggaggtggaagaagttgagtcagaacagggcagtgatagtgatgatgatggaggtcgaggtggtgcgggacgcggtgcccaaaaccgatatttgaagaatcaagaagatgacagcgatgagtctgatacaggtcaccgtgtgatccgctccctgagggacaagcgcaacgaggagatgagatctattgttgatcagatgcgtaatgcaatgaagatcaatgactgggtgagcttgcaggagagttttgagaagcttaacaaacatcttgagaaggttgttcgtgtcaatgaatctactgaggtaccaaaaatgtatatcaaagctcttgtgttgctggaggacttccttgccgaagcccttgcaaacaaggaggccaggaagaagatgagcagcagcaattcgaaggcactcaatgcgatgaggcaaaaactcaagaagaacaacaagcagtatgaagagcagatccagaagtgcagggagcatccagagagttttgaagatgaagctgcagatgataaagatgtggatgatgacgatgctgatgaaagtgatgcagagattgaagatcctgataaaatagctatgtcagaatcagaagaggaacaagatgaagaggatgatgataaggatggttgggaacagaaaaggagtaagaaggataagctgatggataagcagttcttgaaagatccaagtgaaatcacatgggatattgtcgataagaaactcaaagagattatagcatctaggggaaagaaaggaccatcaccatttgttgtgattccagaggctgtgcacaggaagcctacttttccagaaagcggtagaactttgatggatggattgatgttcttaatttacaagtatggggatgaaaggaccaaagcccgtgcaatgctgtgtgacatatatcaccatgcgatctctgatgagttttcagtggctcgcgacttgcttttaatgagtcatttgcaagatggtattcagctcatggacatatcatcgcagattttattcaacagagtcatggcccagttagggctgtgtgctttcagggctggtttgataaatgaagcccatggttgcttgactgagctctattctactgggagggtgaaagaattgcttgcacaaggtgtgcaacaaagccgataccatgaaaaaactcccgaacaggaaagacttgagaggagaaggcaaatgccttaccatatgcatataaacctggagcttttggaagccacacacttgatctgtgcgatgctgattgaagtccccaatatggctgccagcacctatgacaagcggagacctatgagcaaaacattccgaaggcttcttgaagtgagtgaaaggcagacatttgttgggccgcccgagaatgtgagggaccatgtaatggctgccacaagagccctcaacaagggtgatcaccaaaaggctttcagtgtcataaattcgttggagatttggaagcttttgaggaacagagagcatgttcttgagatgttggagcttaagatcaaggaggaagctcttagaacctatctcttttcatactcgtcttcgtacgagtccttaagccttaaccagctcactaccatgtttgatctcagcgagcagcatgcccacagcattgttagcaagatgatgatgcatgaagagcttcatgctagctgggaccagccaacaaagtgcatcgtattccatagtgtggaccaaactaggcttcaggggctactcttccagatggcagataagctctcggtcctggtggagatcaatgagagggcatacgaggcaagaactggtggtactctcgagggggtacctcccaggcgcaggggcgagggtcaggataatatgggaaagtggcaggataactttgtctcgtcacaggggcggcagggtggtggcaacaggtttggatactccggcagaggtgcaatatctggtcaaagtggtggtggacaccagagggacaggggcaatcagggttaccgcgggggctatggtggcgtttcaaggtttcaggatgcaaggggtcgcaaccagtctattccatcaggcagaggtggtgatggtggtgcacgcatggtgaacctgaacaggatgggtagagtttagaagtgataattttcagctcgagtaagcctgaaattctcctaaaagccaagttttgaatcactgctttttacatagtttcctgttctgggctgagccatccacctgtttcctacatttcgttgtagccttttaatttaaggggctaggaaattgaactaagagtttggtactgtttcgtgggagtgtgacttcactccaatatttgatatctatctgtgacacttgctataacctgtacttttcttgtttgtgttatgtggtttttatttggttatgaaaaataaaaaggcatgtcgcagatagaagatcgttattctattcgcgtttgaaaagctttac

SEQ ID NO: 216309 - DNA, 3385 bp, Zea Mays
ctcattggctaagagacctgccaggctgccagcgtacgctagccaagtccctgagtaggcctcctgttttcccccacggcccacgctagccaagtccaggttctgaggttcacaaatcacaaccctagttggcggcgctcagatccggtggcatcctcctcccgcgtccctgtagcggcctccgacgacgaccttgtagcggcagcgtgtggcggcaatcgagcaagactgaagttaaggaagcagcagaaccatggcatcccgtttctggggacagggggacagtgagtctgaggaggaggaggtggaagaagttgagtcagaacagggcagtgatagtgatgatgatggaggtcgaggtggtgcgggacgcggtgcccaaaaccgatatttgaagaatcaagaagatgacagcgatgagtctgatacaggtcaccgtgtgatccgctccctgagggacaagcgcaacgaggagatgagatctattgttgatcagatgcgtaatgcaatgaagatcaatgactgggtgagcttgcaggagagttttgagaagcttaacaaacatcttgagaaggttgttcgtgtcaatgaatctactgaggtaccaaaaatgtatatcaaagctcttgtgttgctggaggacttccttgccgaagcccttgcaaacaaggaggccaggaagaagatgagcagcagcaattcgaaggcactcaatgcgatgaggcaaaaactcaagaagaacaacaagcagtatgaagagcagatccagaagtgcagggagcatccagagagttttgaagatgaagctgcagatgataaagatgtggatgatgacgatgctgatgaaagtgatgcagagattgaagatcctgataaaatagctatgtcagaatcagaagaggaacaagatgaagaggatgatgataaggatggttgggaacagaaaaggagtaagaaggataagctgatggataagcagttcttgaaagatccaagtgaaatcacatgggatattgtcgataagaaactcaaagagattatagcatctaggggaaagaaaggtactggaaggatcgagcgtgttgagcagttaacatttttgacccgtgtggccaaaacaccagctcagaagcttgaaatcctcttccatgtgatttctgcgcagtttgatgttaaccctagtctacttgggcatatgccagtcaatgtgtggaagaagtgtgtcaataatatgcttcttgtgcttgatatactccagcagtatcctaacattgtagtagacacctcatttgagcctgatgagaatgaaactcaaaagggtgcagactacaatggaacaatacatgttgtcggtgacctggttgcattccttgagagactggactctgaatttttgaagaccttacagtgcacagatccatacacaaaagattatgttcagaggctcagagaggaacccctgtttctggttgtcgcacagaacgtccaagattatcttgaaagggttggaaacttcaaagctgctgccaaggttgcactgcgccgtgttgaactagtttactacaagccccaagaagtgtacgatgcaatgagaaaactcgcagagcagcctgaggactgtgtggatgatgatgatgcagaggctggtgatgaacataaagcagtagatgacaatagaggaccatcaccatttgttgtgattccagaggctgtgcacaggaagcctacttttccagaaagcggtagaactttgatggatggattgatgttcttaatttacaagtatggggatgaaaggaccaaagcccgtgcaatgctgtgtgacatatatcaccatgcgatctctgatgagttttcagtggctcgcgacttgcttttaatgagtcatttgcaagatggtattcagctcatggacatatcatcgcagattttattcaacagagtcatggcccagttagggctgtgtgctttcagggctggtttgataaatgaagcccatggttgcttgactgagctctattctactgggagggtgaaagaattgcttgcacaaggtgtgcaacaaagccgataccatgaaaaaactcccgaacaggaaagacttgagaggagaaggcaaatgccttaccatatgcatataaacctggagcttttggaagccacacacttgatctgtgcgatgctgattgaagtccccaatatggctgccagcacctatgacaagcggagacctatgagcaaaacattccgaaggcttcttgaagtgagtgaaaggcagacatttgttgggccgcccgagaatgtgagggaccatgtaatggctgccacaagagccctcaacaagggtgatcaccaaaaggctttcagtgtcataaattcgttggagatttggaagcttttgaggaacagagagcatgttcttgagatgttggagcttaagatcaaggaggaagctcttagaacctatctcttttcatactcgtcttcgtacgagtccttaagccttaaccagctcactaccatgtttgatctcagcgagcagcatgcccacagcattgttagcaagatgatgatgcatgaagagcttcatgctagctgggaccagccaacaaagtgcatcgtattccatagtgtggaccaaactaggcttcaggggctactcttccagatggcagataagctctcggtcctggtggagatcaatgagagggcatacgaggcaagaactggtggtactctcgagggggtacctcccaggcgcaggggcgagggtcaggataatatgggaaagtggcaggataactttgtctcgtcacaggggcggcagggtggtggcaacaggtttggatactccggcagaggtgcaatatctggtcaaagtggtggtggacaccagagggacaggggcaatcagggttaccgcgggggctatggtggcgtttcaaggtttcaggatgcaaggggtcgcaaccagtctattccatcaggcagaggtggtgatggtggtgcacgcatggtgaacctgaacaggatgggtagagtttagaagtgataattttcagctcgagtaagcctgaaattctcctaaaagccaagttttgaatcactgctttttacatagtttcctgttctgggctgagccatccacctgtttcctacatttcgttgtagccttttaatttaaggggctaggaaattgaactaagagtttggtactgtttcgtgggagtgtgacttcactccaatatttgatatctatctgtgacacttgctataacctgtacttttcttgtttgtgttatgtggtttttatttggttatgaaaaataaaaaggcatgtcgcagatagaagatcgttattctattcgcgtttgaaaagctttac

SEQ ID NO: 216310 - DNA, 2118 bp, Zea Mays
ttggctaagagacctgccaggctgccagcgtacgctagccaagtccctgagtaggcctcctgttttcccccacggcccacgctagccaagtccaggttctgaggttcacaaatcacaaccctagttggcggcgctcagatccggtggcatcctcctcccgcgtccctgtagcggcctccgacgacgaccttgtagcggcagcgtgtggcggcaatcgagcaagactgaagttaaggaagcagcagaaccatggcatcccgtttctggggacagggggacagtgagtctgaggaggaggaggtggaagaagttgagtcagaacagggcagtgatagtgatgatgatggaggtcgaggtggtgcgggacgcggtgcccaaaaccgatatttgaagaatcaagaagatgacagcgatgagtctgatacaggtcaccgtgtgatccgctccctgagggacaagcgcaacgaggagatgagatctattgttgatcagatgcgtaatgcaatgaagatcaatgactgggtgagcttgcaggagagttttgagaagcttaacaaacatcttgagaaggttgttcgtgtcaatgaatctactgaggtaccaaaaatgtatatcaaagctcttgtgttgctggaggacttccttgccgaagcccttgcaaacaaggaggccaggaagaagatgagcagcagcaattcgaaggcactcaatgcgatgaggcaaaaactcaagaagaacaacaagcagtatgaagagcagatccagaagtgcagggagcatccagagagttttgaagatgaagctgcagatgataaagatgtggatgatgacgatgctgatgaaagtgatgcagagattgaagatcctgataaaatagctatgtcagaatcagaagaggaacaagatgaagaggatgatgataaggatggttgggaacagaaaaggagtaagaaggataagctgatggataagcagttcttgaaagatccaagtgaaatcacatgggatattgtcgataagaaactcaaagagattatagcatctaggggaaagaaaggtactggaaggatcgagcgtgttgagcagttaacatttttgacccgtgtggccaaaacaccagctcagaagcttgaaatcctcttccatgtgatttctgcgcagtttgatgttaaccctagtctacttgggcatatgccagtcaatgtgtggaagaagtgtgtcaataatatgcttcttgtgcttgatatactccagcagtatcctaacattgtagtagacacctcatttgagcctgatgagaatgaaactcaaaagggtgcagactacaatggaacaatacatgttgtcggtgacctggttgcattccttgagagactggactctgaatttttgaagaccttacagtgcacagatccatacacaaaagattatgttcagaggctcagagaggaacccctgtttctggttgtcgcacagaacgtccaagattatcttgaaagggttggaaacttcaaagctgctgccaaggttgcactgcgccgtgttgaactagtttactacaagccccaagaagtgtacgatgcaatgagaaaactcgcagagcagcctgaggactgtgtggatgatgatgatgcagaggctggtgatgaacataaagcagtagatgacaatagaggaccatcaccatttgttgtgattccagaggctgtgcacaggaagcctacttttccagaaagcggtagaactttgatggatggattgatgttcttaatttacaagtatggggatgaaaggaccaaagcccgtgcaatgctgtgtgacatatatcaccatgcgatctctgatgagttttcagtggctcgcgacttgcttttaatgagtcatttgcaagatggtattcagctcatggacatatcatcgcagattttattcaacagagtcatggcccagttagggctgtgtgctttcagggctggtttgataaatgaagcccatggttgcttgactgagctctattctactgggagggtgaaagaattgcttgcacaaggtgtgcaacaaagccgataccatgaaaaaactcccgaacagacttggttggcatgagtggggtctggg

SEQ ID NO: 216311 - DNA, 6991 bp, Zea Mays
tcccgacccgtcatcgccgccgccattgtcccgccgcgcagggtttagggttcagtagcggcggcaccagtttttctcctcatcaagggagtcgcggccaccgccaacgagacaagctgtcggcgatgtcgtctatcgcatcgcagctgaaggccatcaagtcggcgctcggcgctgcgccggagccggctcggcggcccgtcacccggccgtctgtgctcttcgacgccaaagaggccgccgacatcgacctccgggccatcctgcccattgccctctctgggttggagcaccttaccagcgtagacgagagatttgcaaaatacagcaacactctgttcagggagactagccttgaggtgaaccgcgaacagttgactcccaaggagaacgacaaactcaacaagtctatctccacctaccttcgccttctagctggctatttgcatcttccctctgccctcaagacccttgaataccttatccgcagatacctggtgcatgtatacaattcggatgagttgctgctgagcgcactgccataccatgatacacatgcgtttgttcggatcgtgcagttggtcaacttagggaatagtaactgggcatttcttggcggtgtcaagtcctcaggtgcaccgccacccaggagtgttctagtgcaacagtgcatccgtgataaggctgtgctggagaccctatgcaactatgctacaccaacaaaggaattcagtcactcgaagacagtcgtctgcttttgcactgctgtgattgttgagtgtttgggtgctgtccctaagcttgacacagatgtagtgcagagggtgttgggatttgtgtttgactctcttaatcctgcagtgacgcgagaccaggaatataaggctggcgctcttatgattgttggagtacttggaacccgtgcgactctagcgcctaaacttgttcaaaatttgattcttttcgttgcaaggactgcacaacatgatgcattcgagtcagttgacttgccatggcttcgtgtttcagtgatggctcttataagtcttgttcagtcccaatctgtccatgttttccctaagaagccactgatggttttgaaagacatcagggatttttctggtatactttctgtattatccagtgaatacaacatcgagaaattcattaggctttatgttgaatcattaattgactacagtattgtcgatggtacctgccacacacacctgattgaaactattgagagtctgccaatgaagaatttcattgaaagtgtcgtgtgcaaaattcttggaaactgtatcaaggtatctcgggccacaggaatcccagatattaatcacacagaattatgggctaagaaaatttttaaggcaattgaaagaaaatatcccctggagctacgtgatgctattcataaatttcttgagaactctgaaactaattcaccgggaggggattctttggctgaggtttttgggatattgtttgatgaaaacaagaatttgccaactgaaatatctgactcaaacatttggttcagtctcgatcatccaaaggctacggttcgtcaatctgctctctcaaaagttgctacatctggcatcttcaataacagaactctaaatcctcaggtggttcaaaggcattaaaagcttctgatgttgctgtttcttgcttggaaaagctggtaacggaataccaatcgcatcatatggaacatgccaaggatatagctacattagtgtttcgtctccttattgttcacccaaagacccttagggtgaacataaaggccttggagctagctaagaaaatacggtgggagttctacgcaagtagttctcttgtatatgatggggtcgattttgataaaatgaagaacatgagtgcagactccattgcttctattaacatgaacaacatcaaagcttttgctgaaactttcctagcagacccaaataagcatgtggagtggttagctaactctggaagtggaagtagattttctaaaactctgtttctgctcatagtattgcaaacacttgtttccacagaagctttggatgagcaggtgaatctttgtcatgcttgtttgccagtcctgaaggatgaatgtcatcacatacagcccaaagatagcgatgttggtgatgagatcagcattactaaccttgagatgtgcagtttagaattggtgaagcattttttcaacagagacacagaggcattgaatgttagaatccttgtatgtatattttggggtatagtaagggtgcagtcctcctgtattaagcagaatcccgtggttggcagtggtggaaacacaatgctggatgatttgtttctcttcttccttgtttcacctgccaaaaatatcttccagaagcacctacagtatcttgttaattgcattggagcaccttttcaatttatttcaaagtacttcctggatgaagatttatcagaaagagtccaagtggagagtcttcttgtgtttgcatctatttgttccaagtgcgcttcctctgacaataatagcttggatgaaagcatctgtgtgcagcttctactaggttttccttccattattctaccacttgctcatgtcaacaaggatataagggcatctgcaattaagtgtattgaggggttatctttggtgtggcagcgcttgagcacttctgtaccaagaaatggaaacaacaccaaattacctcaatgtttgtcatctccaacttttggtagtttccttgaattgttggttaaccaaaagaccatgatctgctcggacgcaaaatttcttcctgcatatatttcatctatgctgagcccatgtaaagatattctggttcccgagaatctccatgaaagatttgatccgcatacaaaggatactattcttactttcatcttgcgctctgctttgaggctccctccttacggaaagttcatggttctgtcagtcctgaaaggagtaggaagcatcttatttcatgcagaagatgtgaagtctctgttttttgatcttctggaccgtcgtgatcagtaccagaatcgacataattgcaagcagatcctatccacccatgaaatgcataccttgtgcttgcttttggaggttttattctcaacgccagatcatgtgaatattggttttaacatgtttgaacctttgatgaaagctttaaaggttgatgcttcgtctccaggtgattctgttgttgtgatgccatgtcttactgtcctgcagaatcttcaaccagggttctttgataatttgaagactgatactaaggaaaaagttgttggacgccttatttccttggttcgaactgagagtttcgtagttcgaaatgctgcacgggatgctttactgcgtattaatgttcattcttccactttagtaaaatttattgaattaatttcaacacttggtgatgcaagaggacattcaaaaaggataaagagaaatgaagatcgggaccttaatgtgttctgcaattttgcggagatatttggagaaaattctgtagcttctattcttgtttctcttctagatatcttgtttcttaagaaagatgtgaagcaaaggtcgcgtttattacaacctcttttccagattctatcgaagctcctttctgatcaatgggtctcagttattgttagtcagtataacgaccaacaagatacctcatctgaaatccctgatttatctagttttgtaaaagaagttcaacacttggtactgctggccctcaaagatattacagatacactacaatcgggtcaccatgatgcaatggtcagcagttccgatgtaggtcttcttattgattgtgtacggtccatccaggacataggaactcggaatcatggcttttccttgatagcttctttgggaaaggcttgcccgcaactggtctcagagagtattgttgatttgtttgtcgctattggggatgctattaaacaggacgatagccactcgcaacgtgttttggaggatttattatctgtcttagtcccatgttggttatcaaggaccacaagcatagaaaagcttcttcagatattcattaaagctttagcagatgtgcctgaacataggcgattgacgcttatggtttacctcttaaggaccatgggaaaagaaaataatttgagtactgtgatcatgcatctgttacactcggtggttgagcggatttcacactcgttttctgtacatcatggggacgattatagattggctatgtcacaggagtgggagtatggattggcagtaaatgtgcttgaccagttttcgtataaattgtggtttccttgtttgagtaagcttctaaaaaacatcagggtgcatgagaagcaagatctgcatcttatgctacatttggcaatgaggcttattctatttaagttgcaagatacagaacttaattttgaacttgaatctgaggaagctgctaattctatccagggttctcttggggcacttatggaggaagttatcttgtgtggtgtgtatgccagagataaaaaaagagatatttgtactgacattactaaagaagtcagagattttgcaaatacaatactcaaaactattacaggctggatgcgtgcttcgacatacttgatgggaattactctgctgttggatcattcagataatcatgtgaaaagaaagacacttcggattttgtctgaaacggccagaggaaacagtttggttcagaagaatcaaaggaaagcacgaaaactgaagcatatatctggtactactattaaagtagacaagagctctggtccttatttcagcaaattgtgcttaaagattctggagttgattgacagagttggtgattcggacactaaagtgaaagtagctgctatttcttcgcttgaaacactagcaaaagaatatccctctgataatcctgtttatagcaactgccttgcaacaatcattgatcaaattggctctgatgaggcagctgtgtcttctgcattaattcatactgtgggctctctggtaaatgtgatcggatcaaaagcattaccacaactcccattaatcatgaaaaacataatgctaatgtcacatcaaatttcatgttgccctagcggaaattatgctcatggttccactagaactgccgctgaactttctaaccaagacataactgtgttgctatctgcactgacaacaattgaggtgattgtggaaaagctgggtgaatttgttaatccatatttgaaagaaatacttgatctggtagtactgcatcctgaatgcagcactcaaatgcatgccaaattagatgcaaaagcagcacgtgttcgagagctattgactgtaaaagttccagtccggcttatcctctcacctttactgaatctgtactctcttactgcaaattgtggagatgcaagtcttacgttggcattcagcatgcttgctagtctagttggtacaatggaccggctggctgtaggaacttaccattcaaaaatatatgaacattgtttagcagctcttgatctccgtcgtcaacaccctgactctttgaagaatataaatatggtggaacaaagtattattcatgccataatctctcttaccatgaaacttacggagggcacttttaggccactttttcttcgtactttggaatgggctgaggctgaagttgatgaatcctcatcaaagaaaagtttggaccgtgcaattgttttctacaaattggttaacaaacttgctgaaaaacacaggtccttgttcacaccttacttcaaatatctactcgagggatctatacaatatctctctgaagacgatgctttgggtggttcgaagcataagaagaagaagaccaaacttgtagatgttcaagttgaacagaaggataaattattggggttaaaattgtggaatttaagagctctagttttgaaatccttacaccaatgtttcctctatgataatgaccagaagatccttgattcctctaatttccaggttcttttgaaacctattgtctcccagttcgttgtggaaccaccaaaatctgttgaatcagttcttgacgctccatcaattgaagaagtagatgaaactataattctgtgcttgggccaaatggcagtaactgcacggacagatgttctttggaagcctcttaaccatgaggtgctgatgcagactaggagtgatgaagttcgccccaaaatgctgggcctgaaggttatcaggtacatggtccaacatctgaaggaggagtatgtcgttctcgtaccagagaccataccgttcctaggcgaattgctcgaggatgtggagcttcctgtcaagaccctgtcgcaggagatcttgaaagagatggaaaccctcagtggcgaaagcctccagcagtacctatgaggcatcatctcctcgcggtagtaccgtttggctgatgaactgtagaacatctactcatttcctgtggattaccagttcaacagatcggcatacttgtcggatgtctggaaactgaaattacatgctgtccaattcatggaaggcaagtgcaattaacttaaccttcaaggaggcaaatgcagtttaaggaaaacttacacgttgaaagcacccatattatgttttcggatgagttcctatgtagctacgttgaaagagtacttttctacacaattgattgaggtgttctcgatttgatctctttttgagcttttggtgtcgttgggattttgcgctaaatattggaaattagaccaaggggctgtttgttcgttgtgaaggaattataatttacttaatatagtaggttatttggtttggaatttaatattccatcacatgttaaagtttagatataatcctatcctaaatttatagggtgagaatatggaaattggctatatattactagtttatgattctactttgtaatttatgacatgctataataaaaatgtagcatat

SEQ ID NO: 216312 - DNA, 5921 bp, Zea Mays
gtttttctcctcatcaagggagtcgcggccaccgccaacgagacaagctgtcggcgatgtcgtctatcgcatcgcagctgaaggccatcaagtcggcgctcggcgctgcgccggagccggctcggcggcccgtcacccggccgtctgtgctcttcgacgccaaagaggccgccgacatcgacctccgggccatcctgcccattgccctctctgggttggagcaccttaccagcgtagacgagagatttgcaaaatacagcaacactctgttcagggagactagccttgaggtgaaccgcgaacagttgactcccaaggagaacgacaaactcaacaagtctatctccacctaccttcgccttctagctggctatttgcatcttccctctgccctcaagacccttgaataccttatccgcagatacctggtgcatgtatacaattcggatgagttgctgctgagcgcactgccataccatgatacacatgcgtttgttcggatcgtgcagttggtcaacttagggaatagtaactgggcatttcttggcggtgtcaagtcctcaggtgcaccgccacccaggagtgttctagtgcaacagtgcatccgtgataaggctgtgctggagaccctatgcaactatgctacaccaacaaaggaattcagtcactcgaagacagtcgtctgcttttgcactgctgtgattgttgagtgtttgggtgctgtccctaagcttgacacagatgtagtgcagagggtgttgggatttgtgtttgactctcttaatcctgcagtgacgcgagaccaggaatataaggctggcgctcttatgattgttggagtacttggaacccgtgcgactctagcgcctaaacttgttcaaaatttgattcttttcgttgcaaggactgcacaacatgatgcattcgagtcagttgacttgccatggcttcgtgtttcagtgatggctcttataagtcttgttcagtcccaatctgtccatgttttccctaagaagccactgatggttttgaaagacatcagggatttttctggtatactttctgtattatccagtgaatacaacatcgagaaattcattaggctttatgttgaatcattaattgactacagtattgtcgatggtacctgccacacacacctgattgaaactattgagagtctgccaatgaagaatttcattgaaagtgtcgtgtgcaaaattcttggaaactgtatcaaggtatctcgggccacaggaatcccagatattaatcacacagaattatgggctaagaaaatttttaaggcaattgaaagaaaatatcccctggagctacgtgatgctattcataaatttcttgagaactctgaaactaattcaccgggaggggattctttggctgaggtttttgggatattgtttgatgaaaacaagaatttgccaactgaaatatctgactcaaacatttggttcagtctcgatcatccaaaggctacggttcgtcaatctgctctctcaaaagttgctacatctggcatcttcaataacagaactctaaatcctcagaagtttatcaatatgcaagatgctatattacgtagtctgtatgatgatgatctaagtgttgtccaagctgctttatccatagaaggactagctgctgttgccaatcctgatagcctgttaaaagcatatgattgcgtgctcaccaaatgcatcaaaatcatcaacaaaggtggttcaaaggcattaaaagcttctgatgttgctgtttcttgcttggaaaagctggtaacggaataccaatcgcatcatatggaacatgccaaggatatagctacattagtgtttcgtctccttattgttcacccaaagacccttagggtgaacataaaggccttggagctagctaagaaaatacggtgggagttctacgcaagtagttctcttgtatatgatggggtcgattttgataaaatgaagaacatgagtgcagactccattgcttctattaacatgaacaacatcaaagcttttgctgaaactttcctagcagacccaaataagcatgtggagtggttagctaactctggaagtggaagtagattttctaaaactctgtttctgctcatagtattgcaaacacttgtttccacagaagctttggatgagcaggtgaatctttgtcatgcttgtttgccagtcctgaaggatgaatgtcatcacatacagcccaaagatagcgatgttggtgatgagatcagcattactaaccttgagatgtgcagtttagaattggtgaagcattttttcaacagagacacagaggcattgaatgttagaatccttgtatgtatattttggggtatagtaagggtgcagtcctcctgtattaagcagaatcccgtggttggcagtggtggaaacacaatgctggatgatttgtttctcttcttccttgtttcacctgccaaaaatatcttccagaagcacctacagtatcttgttaattgcattggagcaccttttcaatttatttcaaagtacttcctggatgaagatttatcagaaagagtccaagtggagagtcttcttgtgtttgcatctatttgttccaagtgcgcttcctctgacaataatagcttggatgaaagcatctgtgtgcagcttctactaggttttccttccattattctaccacttgctcatgtcaacaaggatataagggcatctgcaattaagtgtattgaggggttatctttggtgtggcagcgcttgagcacttctgtaccaagaaatggaaacaacaccaaattacctcaatgtttgtcatctccaacttttggtagtttccttgaattgttggttaaccaaaagaccatgatctgctcggacgcaaaatttcttcctgcatatatttcatctatgctgagcccatgtaaagatattctggttcccgagaatctccatgaaagatttgatccgcatacaaaggatactattcttactttcatcttgcgctctgctttgaggctccctccttacggaaagttcatggttctgtcagtcctgaaaggagtaggaagcatcttatttcatgcagaagatgtgaagtctctgttttttgatcttctggaccgtcgtgatcagtaccagaatcgacataattgcaagcagatcctatccacccatgaaatgcataccttgtgcttgcttttggaggttttattctcaacgccagatcatgtgaatattggttttaacatgtttgaacctttgatgaaagctttaaaggttgatgcttcgtctccaggtgattctgttgttgtgatgccatgtcttactgtcctgcagaatcttcaaccagggttctttgataatttgaagactgatactaaggaaaaagttgttggacgccttatttccttggttcgaactgagagtttcgtagttcgaaatgctgcacgggatgctttactgcgtattaatgttcattcttccactttagtaaaatttattgaattaatttcaacacttggtgatgcaagaggacattcaaaaaggataaagagaaatgaagatcgggaccttaatgtgttctgcaattttgcggagatatttggagaaaattctgtagcttctattcttgtttctcttctagatatcttgtttcttaagaaagatgtgaagcaaaggtcgcgtttattacaacctcttttccagattctatcgaagctcctttctgatcaatgggtctcagttattgttagtcagtataacgaccaacaagatacctcatctgaaatccctgatttatctagttttgtaaaagaagttcaacacttggtactgctggccctcaaagatattacagatacactacaatcgggtcaccatgatgcaatggtcagcagttccgatgtaggtcttcttattgattgtgtacggtccatccaggacataggaactcggaatcatggcttttccttgatagcttctttgggaaaggcttgcccgcaactggtctcagagagtattgttgatttgtttgtcgctattggggatgctattaaacaggacgatagccactcgcaacgtgttttggaggatttattatctgtcttagtcccatgttggttatcaaggaccacaagcatagaaaagcttcttcagatattcattaaagctttagcagatgtgcctgaacataggcgattgacgcttatggtttacctcttaaggaccatgggaaaagaaaataatttgagtactgtgatcatgcatctgttacactcggtggttgagcggatttcacactcgttttctgtacatcatggggacgattatagattggctatgtcacaggagtgggagtatggattggcagtaaatgtgcttgaccagttttcgtataaattgtggtttccttgtttgagtaagcttctaaaaaacatcagggtgcatgagaagcaagatctgcatcttatgctacatttggcaatgaggcttattctatttaagttgcaagatacagaacttaattttgaacttgaatctgaggaagctgctaattctatccagggttctcttggggcacttatggaggaagttatcttgtgtggtgtgtatgccagagataaaaaaagagatatttgtactgacattactaaagaagtcagagattttgcaaatacaatactcaaaactattacaggctggatgcgtgcttcgacatacttgatgggaattactctgctgttggatcattcagataatcatgtgaaaagaaagacacttcggattttgtctgaaacggccagaggaaacagtttggttcagaagaatcaaaggaaagcacgaaaactgaagcatatatctggtactactattaaagtagacaagagctctggtccttatttcagcaaattgtgcttaaagattctggagttgattgacagagttggtgattcggacactaaagtgaaagtagctgctatttcttcgcttgaaacactagcaaaagaatatccctctgataatcctgtttatagcaactgccttgcaacaatcattgatcaaattggctctgatgaggcagctgtgtcttctgcattaattcatactgtgggctctctggtaaatgtgatcggatcaaaagcattaccacaactcccattaatcatgaaaaacataatgctaatgtcacatcaaatttcatgttgccctagcggaaattatgctcatggttccactagaactgccgctgaactttctaaccaagacataactgtgttgctatctgcactgacaacaattgaggtgattgtggaaaagctgggtgaatttgttaatccatatttgaaagaaatacttgatctggtagtactgcatcctgaatgcagcactcaaatgcatgccaaattagatgcaaaagcagcacgtgttcgagagctattgactgtaaaagttccagtccggcttatcctctcacctttactgaatctgtactctcttactgcaaattgtggagatgcaagtcttacgttggcattcagcatgcttgctagtctagttggtacaatggaccggctggctgtaggaacttaccattcaaaaatatatgaacattgtttagcagctcttgatctccgtcgtcaacaccctgactctttgaagaatataaatatggtggaacaaagtattattcatgccataatctctcttaccatgaaacttacggagggcacttttaggccactttttcttcgtactttggaatgggctgaggctgaagttgatgaatcctcatcaaagaaaagtttggaccgtgcaattgttttctacaaattggttaacaaacttgctgaaaaacacagatttatgtttactgagaatagcatcccaaagatcaagataatc

SEQ ID NO: 216313 - DNA, 4549 bp, Zea Mays
cctggatgaagtttatgtagatttatcagaaagagtccaagtggagagtcttcttgtgtttgcatctatttgttccaagtgcgcttcctctgacaataatagcttggatgaaagcatctgtgtgcagcttctactaggttttccttccattattctaccacttgctcatgtcaacaaggatataagggcatctgcaattaagtgtattgaggggttatctttggtgtggcagcgcttgagcacttctgtaccaagaaatggaaacaacaccaaattacctcaatgtttgtcatctccaacttttggtagtttccttgaattgttggttaaccaaaagaccatgatctgctcggacgcaaaatttcttcctgcatatatttcatctatgctgagcccatgtaaagatattctggttcccgagaatctccatgaaagatttgatccgcatacaaaggatactattcttactttcatcttgcgctctgctttgaggctccctccttacggaaagttcatggttctgtcagtcctgaaaggagtaggaagcatcttatttcatgcagaagatgtgaagtctctgttttttgatcttctggaccgtcgtgatcagtaccagaatcgacataattgcaagcagatcctatccacccatgaaatgcataccttgtgcttgcttttggaggttttattctcaacgccagatcatgtgaatattggttttaacatgtttgaacctttgatgaaagctttaaaggttgatgcttcgtctccaggtgattctgttgttgtgatgccatgtcttactgtcctgcagaatcttcaaccagggttctttgataatttgaagactgatactaaggaaaaagttgttggacgccttatttccttggttcgaactgagagtttcgtagttcgaaatgctgcacgggatgctttactgcgtattaatgttcattcttccactttagtaaaatttattgaattaatttcaacacttggtgatgcaagaggacattcaaaaaggataaagagaaatgaagatcgggaccttaatgtgttctgcaattttgcggagatatttggagaaaattctgtagcttctattcttgtttctcttctagatatcttgtttcttaagaaagatgtgaagcaaaggtcgcgtttattacaacctcttttccagattctatcgaagctcctttctgatcaatgggtctcagttattgttagtcagtataacgaccaacaagatacctcatctgaaatccctgatttatctagttttgtaaaagaagttcaacacttggtactgctggccctcaaagatattacagatacactacaatcgggtcaccatgatgcaatggtcagcagttccgatgtaggtcttcttattgattgtgtacggtccatccaggacataggaactcggaatcatggcttttccttgatagcttctttgggaaaggcttgcccgcaactggtctcagagagtattgttgatttgtttgtcgctattggggatgctattaaacaggacgatagccactcgcaacgtgttttggaggatttattatctgtcttagtcccatgttggttatcaaggaccacaagcatagaaaagcttcttcagatattcattaaagctttagcagatgtgcctgaacataggcgattgacgcttatggtttacctcttaaggaccatgggaaaagaaaataatttgagtactgtgatcatgcatctgttacactcggtggttgagcggatttcacactcgttttctgtacatcatggggacgattatagattggctatgtcacaggagtgggagtatggattggcagtaaatgtgcttgaccagttttcgtataaattgtggtttccttgtttgagtaagcttctaaaaaacatcagggtgcatgagaagcaagatctgcatcttatgctacatttggcaatgaggcttattctatttaagttgcaagatacagaacttaattttgaacttgaatctgaggaagctgctaattctatccagggttctcttggggcacttatggaggaagttatcttgtgtggtgtgtatgccagagataaaaaaagagatatttgtactgacattactaaagaagtcagagattttgcaaatacaatactcaaaactattacaggctggatgcgtgcttcgacatacttgatgggaattactctgctgttggatcattcagataatcatgtgaaaagaaagacacttcggattttgtctgaaacggccagaggaaacagtttggttcagaagaatcaaaggaaagcacgaaaactgaagcatatatctggtactactattaaagtagacaagagctctggtccttatttcagcaaattgtgcttaaagattctggagttgattgacagagttggtgattcggacactaaagtgaaagtagctgctatttcttcgcttgaaacactagcaaaagaatatccctctgataatcctgtttatagcaactgccttgcaacaatcattgatcaaattggctctgatgaggcagctgtgtcttctgcattaattcatactgtgggctctctggtaaatgtgatcggatcaaaagcattaccacaactcccattaatcatgaaaaacataatgctaatgtcacatcaaatttcatgttgccctagcggaaattatgctcatggttccactagaactgccgctgaactttctaaccaagacataactgtgttgctatctgcactgacaacaattgaggtgattgtggaaaagctgggtgaatttgttaatccatatttgaaagaaatacttgatctggtagtactgcatcctgaatgcagcactcaaatgcatgccaaattagatgcaaaagcagcacgtgttcgagagctattgactgtaaaagttccagtccggcttatcctctcacctttactgaatctgtactctcttactgcaaattgtggagatgcaagtcttacgttggcattcagcatgcttgctagtctagttggtacaatggaccggctggctgtaggaacttaccattcaaaaatatatgaacattgtttagcagctcttgatctccgtcgtcaacaccctgactctttgaagaatataaatatggtggaacaaagtattattcatgccataatctctcttaccatgaaacttacggagggcacttttaggccactttttcttcgtactttggaatgggctgaggctgaagttgatgaatcctcatcaaagaaaagtttggaccgtgcaattgttttctacaaattggttaacaaacttgctgaaaaacacaggtccttgttcacaccttacttcaaatatctactcgagggatctatacaatatctctctgaagacgatgctttgggtggttcgaagcataagaagaagaagaccaaacttgtagatgttcaagttgaacagaaggataaattattggggttaaaattgtggaatttaagagctctagttttgaaatccttacaccaatgtttcctctatgataatgaccagaagatccttgattcctctaatttccaggttcttttgaaacctattgtctcccagttcgttgtggaaccaccaaaatctgttgaatcagttcttgacgctccatcaattgaagaagtagatgaaactataattctgtgcttgggccaaatggcagtaactgcacggacagatgttctttggaagcctcttaaccatgaggtgctgatgcagactaggagtgatgaagttcgccccaaaatgctgggcctgaaggttatcaggtacatggtccaacatctgaaggaggagtatgtcgttctcgtaccagagaccataccgttcctaggcgaattgctcgaggatgtggagcttcctgtcaagaccctgtcgcaggagatcttgaaagagatggaaaccctcagtggcgaaagcctccagcagtacctatgaggcatcatctcctcgcggtagtaccgtttggctgatgaactgtagaacatctactcatttcctgtggattaccagttcaacagatcggcatacttgtcggatgtctggaaactgaaattacatgctgtccaattcatggaaggcaagtgcaattaacttaaccttcaaggaggcaaatgcagtttaaggaaaacttacacgttgaaagcacccatattatgttttcggatgagttcctatgtagctacgttgaaagagtacttttctacacaattgattgaggtgttctcgatttgatctctttttgagcttttggtgtcgttgggattttgcgctaaatattggaaattagaccaaggggctgtttgttcgttgtgaaggaattataatttacttaatatagtaggttatttggtttggaatttaatattccatcacatgttaaagtttagatataatcctatcctaaatttatagggtgagaatatggaaattggctatatattactagtttatgattctactttgtaatttatgacatgctataataaaaatgtagcatat

SEQ ID NO: 216314 - DNA, 4804 bp, Zea Mays
atccttcggttttgtattcttcgcttcctttcgccttcctcttcgcctctctctcgtgttctggcgtcgccgtcgccgctggcgcgagatggtggagacgcggcgaagcgccgcggcgaagcgctcggcggcggtggtggaggaggagaagggctcgctggcatcgccagcgctggagcccgcggaggacgcgccggcgggtcttggagcgggtgacgatgtcgcgtcgtcgcagcccccgaagcgcgcgaaggttgggtgcacggagtcggataccgcgaagccgtcggtggcgccggctgccggcgctgttgcgggtccactgcccaacacggctgggctgcaggccaggaccggcgccatggacaagctggaggccttcttgaagtccaaggaggctcagtccaatccggccggtcataagcaggggactaatgataaagatttatcggcgaagatgaagagagtcatggatttgtcggaggatatatcggagaagataaagagaagcaaggataggttggctgtgttattgaataagccggctgcaggcaccagcaggcgtcaggagccctggtgcagactaatttcacaacattccatgcaccctaccctttctatttacggtgcgattttcacaattggtcatggagcgcatcatgatttcagactggatgaatcatccactgcctcatctgtttgtagactgaagcaagctaagcgaggtgcactccttgaaatctttgaatccaaagttgttcgtgtaaacgggaaatctttggacaaggctgccaaggttaccttaaatggaggagatgaaattatcttctgttcaccagtgaggcatgcttatatatttgagcaacttcatgaggagaaatcaagcacttcagtgttatcttccacttgcacttgcagtagtatccagctggggcaacactcacatttcaatgatattcaggatcatgtgtcatctaaagggcgcaaagcctcatcctttctctttggaagaggtctatcagcagacccacttaatatatgtaaaacgacggagggccggagccagtttatctctgaagataatatatcatctggtcggtgtcagctactaaaggaggatttgattaatgcaacggttgatgtgagtgacatctctgagtcatttgatagttgcccatattatctaagtgagcataccaaacatgctctaatgtcagcagcatttgtacatttacattgcaagaactacttcaagtttacaaaagatatatcttctcttagtcaacgagtgctgctatctggcccaacaggaactgatatgtatcaagaatatctggtgaaggcccttgcaaagtattttggtgctagattgctcactatagattcttccatgctgtttggtgggcaaacttccaaggaatcagaatcatacaaaaagggtgatagagtgaggtatattggctcaggcattatccttgatggacagagccctccagattttggttcacagggtgaaatatttcttccttttgaagaaaacagatcatcaaaggttggtgtaaggtttgataaaaaaattctgggaggaaacaatcttggaggcaattgtgaagttgatcatgttgattctttatgccccgacattccaggatgggaggttacgttcaaacatccatttgatgtgatagttgagtttatctctgaagaaattcggcatggccctttaatcctttttctgaaggacacagagaaaatttgtgggaataatgattcctatcatggtctgaagagcaagctaaaacattttccagctggcgcttttataattggatctcaaatccagcctgacaatcgcaaagagaaggcaaatgttagttctccttttctttcgaagttccggtacagccaagctatacttggcctcacattacaggacattgatgggggaaatgataataataaagaaacatcaaaggcaataatgaagcatttgatcaaacttttcccgaataaagtgacacttgaggcaccacaagctgaaatggagctttcacggtggaaccagatgttaaaccgagatattgaagtccttaaaggaaatgcaaacatttcaaaaatacgctcttttctaacaaggcttggattggaatgcactgaccctgaagcgatattggtcacggatcgcattcttacaaatgagtgtattgataaaataattggttttgctttgagccatcaacttaagaactgtacaaatccagacccccctttgggtagtgtgcagtttgctctatccagcggaagtcttaagcatggcgttgacatgttgaaaagtatccagtctggctcgaagagcagcaccaaaaggaaatcacttaaggatattgctactgaaaacgaatttgaaaagagccttcttgctgatgtcacccctccacatgaaattggtgttacctttgaggacattggagctttagaaagtgtcaaagatactctgaaggagttggtgatgcttcctttgcaaagacccgaacttttcaaccgaggacaacttatgaagccatgtaaaggaattttactttttggcccacctggtacggggaagacaaatgctggctaaggctgtggcaactgaggctggtgctaatttcataaacatatcgatgtcaagcatctcttcaaagtggcttggtgaaggagaaaaatttgtgaaagctgtgttttcactggcaagtaaaattgctccaagtgtaatttttgtggacgaggttgatggcatgttgggaaggcgggagaaccctggagaacatgaagccatgcggaagatgaaaaatgagtttatggtgaactgggatggtctgagaacaagggagaaagaacgtgtattagtacttgctgcaactaacaggccatttgatcttgatgaggctgttgttaggcggcttccaaggaggttgatggtgaatttgccagatgcatcaaataggagaaaaattcttagtgtaatactagccaaggaagatttggcagacgacgttgatctagaaactatagctaacctgacagaagggtactcaggcagtgatctcaagaatctgtgtgttactgctgcacaccgtcctattagggagattcttgaaaaggaaaagaaggagagagcttcagcagaagcagaaaatagatcattgcctccgtcacacactagcaatgatgtccgtgcattaagaacaagtgatttcatacatgcgcatgaacaggtgtgtgcaagtgttccctcggattccagtaacatgagcgagcttgtgcaatggaatgatctctatggagaaggcggatcaaggaaaaagacaacgctaagctacttcatgtagcttaggttataaatatattgggagaagtgccctggcacaaagcagcaatagttggaggcggtgcagttggaaaaaaaaagctatgctcatctgccagacatccatatcaaagagaattgatggttcaggtggagcggaatagaatggaatggaatagtatacatacacatggttgctgcctctgctctgggccatgcatcatgcatctggacaggacggctatcctggcttgcagttgccctatgcagttttgagtgcaatggtcaccatctgtgaagcacggataccacagagatcctggccccaaccactcttttcacaaatggagctgaggacctttggagttctaccaaaagtgatcttaaatctttgttctttgactttccgttttgtgaacggaaggccccactctgctagtatggattgttgatcctccgtttctctggtactgactgaactgctcatacaaaactcgttcaacaggcagaaatgctgcctggtggccttctagagtgcttctttgacgccgcagagagcacatcaaaaaaaatgtgtttgtttcgaacgatttgtgctgcattccattcacggcgatatcaggtgccgttgtttgtgtttggttccgcaatcaagggagtgaaagccattagcacatccaatcaaacaaatagcgatatctctttcactgtaccagttagcgctggtctcggatgctattaacattgctgttgtctgtctcggaaccaaacaccgcctaactcgtcggctgttaaatatttctgaactgaattactgcacttggttggggtttcatgcttatcaagttggcttatatagccaacaatactttgtgcagttctgcatcctctgcctgcttatgcgcgatctcattggctgagcggtacgaagataaaacggtagctaatccgaagcgatggcttctctttttctttctacggtattttgtctctatgaattacagttacagcagtcagaacagctgatttaaaaccgcagcgaaaaggctgattgccttgcccatttttgggtgggtggaggttaatacagatttctgtaatttttttactttaatattgtttgacatattgtgcaaggcaaatgatttcctaatgatttgttctacttgatattgtaatccatattgacctatatgctatgctcagttccttagagcatctccagtacttgatattgtaatccatattgacctaggggaaaaaaaggagaatttaacctgatgacactggtggactatgctatgctcagttccttggaacatctctagtagttttgtaaaaaaatctctctaaagacagatgtaaggagttgctacataataatagggagtaaaaatatctgtactctcatgtagtctttatttttagttaccaaatattataaattatgcctgc

SEQ ID NO: 216315 - DNA, 4796 bp, Zea Mays
ttccgtctcccctgctaatgcattactaatccaacgaatccttcggttttgtattcttcgcttcctttcgccttcctcttcgcctctctctcgtgttctggcgtcgccgtcgccgctggcgcgagatggtggagacgcggcgaagcgccgcggcgaagcgctcggcggcggtggtggaggaggagaagggctcgctggcatcgccagcgctggagcccgcggaggacgcgccggcgggtcttggagcgggtgacgatgtcgcgtcgtcgcagcccccgaagcgcgcgaaggttgggtgcacggagtcggataccgcgaagccgtcggtggcgccggctgccggcgctgttgcgggtccactgcccaacacggctgggctgcaggccaggaccggcgccatggacaagctggaggccttcttgaagtccaaggaggctcagtccaatccggccggtcataagcaggggactaatgataaagatttatcggcgaagatgaagagagtcatggatttgtcggaggatatatcggagaagataaagagaagcaaggataggttggctgtgttattgaataagccggctgcaggcaccagcaggcgtcaggagccctggtgcagactaatttcacaacattccatgcaccctaccctttctatttacggtgcgattttcacaattggtcatggagcgcatcatgatttcagactggatgaatcatccactgcctcatctgtttgtagactgaagcaagctaagcgaggtgcactccttgaaatctttgaatccaaagttgttcgtgtaaacgggaaatctttggacaaggctgccaaggttaccttaaatggaggagatgaaattatcttctgttcaccagtgaggcatgcttatatatttgagcaacttcatgaggagaaatcaagcacttcagtgttatcttccacttgcacttgcagtagtatccagctggggcaacactcacatttcaatgatattcaggatcatgtgtcatctaaagggcgcaaagcctcatcctttctctttggaagaggtcggtgttcattgttgtcttgtggtctatcagcagacccacttaatatatgtaaaacgacggagggccggagccagtttatctctgaagataatatatcatctggtcggtgtcagctactaaaggaggatttgattaatgcaacggttgatgtgagtgacatctctgagtcatttgatagttgcccatattatctaagtgagcataccaaacatgctctaatgtcagcagcatttgtacatttacattgcaagaactacttcaagtttacaaaagatatatcttctcttagtcaacgagtgctgctatctggcccaacaggaactgatatgtatcaagaatatctggtgaaggcccttgcaaagtattttggtgctagattgctcactatagattcttccatgctgtttggtgggcaaacttccaaggaatcagaatcatacaaaaagggtgatagagtgaggtatattggctcaggcattatccttgatggacagagccctccagattttggttcacagggtgaaatatttcttccttttgaagaaaacagatcatcaaaggttggtgtaaggtttgataaaaaaattctgggaggaaacaatcttggaggcaattgtgaagttgatcatggtttgttctgttctgttgattctttatgccccgacattccaggatgggaggttacgttcaaacatccatttgatgtgatagttgagtttatctctgaagaaattcggcatggccctttaatcctttttctgaaggacacagagaaaatttgtgggaataatgattcctatcatggtctgaagagcaagctaaaacattttccagctggcgcttttataattggatctcaaatccagcctgacaatcgcaaagagaaggcaaatgttagttctccttttctttcgaagttccggtacagccaagctatacttggcctcacattacaggacattgatgggggaaatgataataataaagaaacatcaaaggcaataatgaagcatttgatcaaacttttcccgaataaagtgacacttgaggcaccacaagctgaaatggagctttcacggtggaaccagatgttaaaccgagatattgaagtccttaaaggaaatgcaaacatttcaaaaatacgctcttttctaacaaggcttggattggaatgcactgaccctgaagcgatattggtcacggatcgcattcttacaaatgagtgtattgataaaataattggttttgctttgagccatcaacttaagaactgtacaaatccagacccccctttgggtagtgtgcagtttgctctatccagcggaagtcttaagcatggcgttgacatgttgaaaagtatccagtctggctcgaagagcagcaccaaaaggaaatcacttaaggatattgctactgaaaacgaatttgaaaagagccttcttgctgatgtcacccctccacatgaaattggtgttacctttgaggacattggagctttagaaagtgtcaaagatactctgaaggagttggtgatgcttcctttgcaaagacccgaacttttcaaccgaggacaacttatgaagccatgtaaaggaattttactttttggcccacctggtacggggaagacaaatgctggctaaggctgtggcaactgaggctggtgctaatttcataaacatatcgatgtcaagcatctcttcaaaggttgatggcatgttgggaaggcgggagaaccctggagaacatgaagccatgcggaagatgaaaaatgagtttatggtgaactgggatggtctgagaacaagggagaaagaacgtgtattagtacttgctgcaactaacaggccatttgatcttgatgaggctgttgttaggcggcttccaaggaggttgatggtgaatttgccagatgcatcaaataggagaaaaattcttagtgtaatactagccaaggaagatttggcagacgacgttgatctagaaactatagctaacctgacagaagggtactcaggcagtgatctcaagaatctgtgtgttactgctgcacaccgtcctattagggagattcttgaaaaggaaaagaaggagagagcttcagcagaagcagaaaatagatcattgcctccgtcacacactagcaatgatgtccgtgcattaagaacaagtgatttcatacatgcgcatgaacaggtgtgtgcaagtgttccctcggattccagtaacatgagcgagcttgtgcaatggaatgatctctatggagaaggcggatcaaggaaaaagacaacgctaagctacttcatgtagcttaggttataaatatattgggagaagtgccctggcacaaagcagcaatagttggaggcggtgcagttggaaaaaaaaagctatgctcatctgccagacatccatatcaaagagaattgatggttcaggtggagcggaatagaatggaatggaatagtatacatacacatggttgctgcctctgctctgggccatgcatcatgcatctggacaggacggctatcctggcttgcagttgccctatgcagttttgagtgcaatggtcaccatctgtgaagcacggataccacagagatcctggccccaaccactcttttcacaaatggagctgaggacctttggagttctaccaaaagtgatcttaaatctttgttctttgactttccgttttgtgaacggaaggccccactctgctagtatggattgttgatcctccgtttctctggtactgactgaactgctcatacaaaactcgttcaacaggcagaaatgctgcctggtggccttctagagtgcttctttgacgccgcagagagcacatcaaaaaaaatgtgtttgtttcgaacgatttgtgctgcattccattcacggcgatatcaggtgccgttgtttgtgtttggttccgcaatcaagggagtgaaagccattagcacatccaatcaaacaaatagcgatatctctttcactgtaccagttagcgctggtctcggatgctattaacattgctgttgtctgtctcggaaccaaacaccgcctaactcgtcggctgttaaatatttctgaactgaattactgcacttggttggggtttcatgcttatcaagttggcttatatagccaacaatactttgtgcagttctgcatcctctgcctgcttatgcgcgatctcattggctgagcggtacgaagataaaacggtagctaatccgaagcgatggcttctctttttctttctacggtattttgtctctatgaattacagttacagcagtcagaacagctgatttaaaaccgcagcgaaaaggctgattgccttgcccatttttgggtgggtggaggttaatacagatttctgtaatttttttactttaatattgtttgacatattgtgcaaggcaaatgatttcctaatgatttgttctacttgatattgtaatccatattgacctatatgctatgctcagttccttagagcatctccagtacttgatattgtaatccatattgacctaggggaaaaaaaggagaatttaacctgatgacactggtggactatgctatgctcagttccttggaacatctctagtagttttgtaaaaaaatctctctaaagacagatgtaaggagttgctacataataatagggagtaaaaatatctgtactctcatgtagtctttatttttagttaccaaatattataaattatgcctgc

SEQ ID NO: 216316 - DNA, 3590 bp, Zea Mays
ggaatctactactactctataagggtgtaaggagggcgtccaccatgcccccgcccgacgcccccttgcccccgtccatctcgccgcaaggcacgcggcgcgcctcgcgatgccccctcgcccccgtttgtctcgccgtgatgcgtgcggcgcgcctcgcgatgccctctcgcccatgcccctgctcgcctcttctccgccccatccccctgtgtctagcgcgctacccgcccctcccaacgtcgtcctctccgtcccatcctcccatcgtgcgacaaccgatccacgcctcgaggcccaggccgtgccacgccggtggggaagcgaaactcacttacaggacgcggatctccttccaaactcgaaggcgacgatccggcacaggggcaaccttccatggtaggcgagatccacggcccactcgcgatgcgcccccatgtcagccactcccgttcgtcacctcacgatccgatgaaggcgaagggcgcacctaaagcattgtggcaagccggtatctgccgcagcggcggtagaggtcttcgaggagcacaaaggtgagggcggaggaggcgtaggaaccgagggtaccaaagtcgattcaacagaatgagacagtggtttgcaaggatctgtgcacgaggttggtgttgcggtggagggagcaaacaacacaggtgtagctgcttgtggggtggggacaatgaggcagcaagactcaaggtccaggatgatgaacaacaacagcggcgtcgacgcaggaggccctggttcaggcatgggtctgggagtgccggatgtgccattggggtcaatagtaattcacgataatgcagggtgctgtcagcaagaacatggagagccttgccgtcttggccttccaatattttatgaatttggtgattggataaaggaacaatcttttccttttgcagattaagacaaaaggggtcacaatgacagcgctgttggctaaggcgacagcaacggctctgcttcagcatcctatggtgaacttgcagctgcagggatggaaagagcttcacatacaaaaatagtatcaacattgctatagcagtggccatagatggtgggttgattacatcggttcttcaagatgctggaaacagaaggagttagttgataaggcgctagcaaagcagttgcagccccatgagtacaactctgatatttttttgcctcatacacaaatatgaatatgtagcacattgttgtatatcttttctaatgctctgaataagatgtggtggtacagtgcagaataatatgttctgttttttattcaactattcaaatcttatttttattcggctattcaaatcatattttttttattagctgattgccggagagattgaaatcaaaggggttgagctgcaggagagttgtagtttgtcgttcttttccatggtaggcattttcattgggatcatacaattattctctgtcgatgtttacaagaaaatagtatctaaaaacaagatgcttctgttccatgagggtgtgattgagactgaaacggtgggtaccagagtgaaggagtcggaggcagttttagtagagaaagaggtcgaactgatcgatgagcctcagattcaagagagccctccagttcctgcattgttggatgatgaggtggattttgcttaatcgtcacttgctattagagaatccgacattcccgtgaaaaaggtgctgataatcgtgacaatcacttctgttcggccacagcaaccatattacttgaatcagctagcccatgttttgaaagttgtattggtacctcttctatggttagtggtggaatggcctgaacagtcctatgaaacagcaaaaactctgttacagtccactcaggtggaagaggttgtttgtagatgttttttgttttcatatctgaactgtaatagtaaggttacaataatttttcacatagctgatggaacttctgtttgtgtgaagccaacagatggtccctcctgctaattagaaaccaatttttttagactttttcagcctcctctactgctcatgttgctggcttgtaataggtgggctaggggttatctagagatgacaaggccctcaagttggctttccagcactggatcgaagcgatgagtacaaacgggcagtggggattggtgggttttactgcccattcttgctcttttcatgagcacgtgggagagcgccgcagctgctgcggctgtggcggatgtggcggccatggcgtggcgacctgtggcaaatggcggcatgaagaagaagctgatttgaggagtcgtcgctggactgggagaagtacatgaaggacaataacaaaattctcggagaatttgagtgccttgacaaatcaccatttagatactttcttggggaactatatggtggcaattcactgggaagcacaattgcagtgggcaatgagaagaagcggcagcgggtgtacaacactatgtttcatgtcccatggagatgtgaacggggaaattcagagtcgtgttcgcctcaattcctgcacccatctttgcagctctatattgttcaacaaaagatttgggaactgggatagctgaagatgcctctactgaagatgatgatttcagtggcgacctaccaccagagtttgaaaatatcatgatattcaatggtgttgaaaccgagagtgacattgctcctccagtgctcgaggaaaacaaggatgctgttgtatctgcaacaaaaactgcaaagtccctggatgggtttgccttaaaaacagggcaggaggaggagggtccggaagaggttgatgctactgaaaaagcaatggaagtggttgataatgttgtgaagtccctggatgaagaggtagaatcaaaggagatgcagaagcagcaaccgcatgattataatagcatgagcctaggggtggtaacgggtcatttaatttagcctagcaaatttacggatcgaatcaagttagggccggatcataaaataatacaattttgaactaataaaattaagggctttgttggttcgtgaagcaagtattagggccatgatccattaccactcctacatgagcctcaggaatcttaaagccacacacaagaaatatctcattgctgcaaaggaagaggaggtcaccgaagggaagaggcttcctctcgaggaggtggaagagaacgcatgcatcagccactgaacagaacaagcaggcgatttttttgtgtggatggcgtctgccacaaaaggattgaatcgaggagtgtgctctggttgtgaagtgataactaggctaccacatgttcattttcaaaagttttcgtgtgtgatcgtgatcaggggtgaaactgtggtttcagccaacaaacttgcagttcctattgcttctccccacttttttcctttatatatattttgtatcggttacagaacatggtttatccagtggtatgctgatgaaagatgctaagtttcgcttaatataatgtatatgaaggtcctgggtacctcaaattttgtccacattgaaccagtacgaatgacatcttccttgaaagttatagaaatgcttcaaagtt

SEQ ID NO: 216317 - DNA, 3982 bp, Zea Mays
ggaatctactactactctataagggtgtaaggagggcgtccaccatgcccccgcccgacgcccccttgcccccgtccatctcgccgcaaggcacgcggcgcgcctcgcgatgccccctcgcccccgtttgtctcgccgtgatgcgtgcggcgcgcctcgcgatgccctctcgcccatgcccctgctcgcctcttctccgccccatccccctgtgtctagcgcgctacccgcccctcccaacgtcgtcctctccgtcccatcctcccatcgtgcgacaaccgatccacgcctcgaggcccaggccgtgccacgccggtggggaagcgaaactcacttacaggacgcggatctccttccaaactcgaaggcgacgatccggcacaggggcaaccttccatggtaggcgagatccacggcccactcgcgatgcgcccccatgtcagccactcccgttcgtcacctcacgatccgatgaaggcgaagggcgcacctaaagcattgtggcaagccggtatctgccgcagcggcggtagaggtcttcgaggagcacaaaggtgagggcggaggaggcgtaggaaccgagggtaccaaagtcgattcaacagaatgagacagtggtttgcaaggatctgtgcacgaggttggtgttgcggtggagggagcaaacaacacaggtgtagctgcttgtggggtggggacaatgaggcagcaagactcaaggtccaggatgatgaacaacaacagcggcgtcgacgcaggaggccctggttcaggcatgggtctgggagtgccggatgtgccattggggtcaatagtaattcacgataatgcaggattaagacaaaaggggtcacaatgacagcgctgttggctaaggcgacagcaacggctctgcttcagcatcctatggtgaacttgcagctgcagggatggaaagagcttcacatacaaaaatagtatcaacattgctatagcagtggccatagatggtgggttgattacatcggttcttcaagatgctggtaaggtcaaacactttaccgtgcacaatgaatgttgattttttatgatttatttaaatgagtggttacttgttggtttatgcgtcttgacatttattcattgtcaaggaaacagaaggagttagttgataaggcgctagcaaagcagttgcagccccatgagtacaactctgatatttttttgcctcatacacaaatatgaatatgtagcacattgttgtatatcttttctaatgctctgaataagatgtggtggtacagtgcagaataatatgttctgttttttattcaactattcaaatcttatttttattcggctattcaaatcatattttttttattagctgattgccggagagattgaaatcaaaggggttgagctgcaggagagttgtagtttgtcgttcttttccatggtaggcattttcattgggatcatacaattattctctgtcgatgtttacaagaaaatagtatctaaaaacaagatgcttctgttccatgagggtgtgattgagactgaaacggtgggtaccagagtgaaggagtcggaggcagttttagtagagaaagaggtcgaactgatcgatgagcctcagattcaagagagccctccagttcctgcattgttggatgatgaggtggattttgcttaatcgtcacttgctattagagaatccgacattcccgtgaaaaaggtgctgataatcgtgacaatcacttctgttcggccacagcaaccatattacttgaatcagctagcccatgttttgaaagttgtattggtacctcttctatggttagtggtggaatggcctgaacagtcctatgaaacagcaaaaactctgttacagtccactcaggtggaagaggttgtttgtagatgttttttgttttcatatctgaactgtaatagtaaggttacaataatttttcacatagctgatggaacttctgtttgtgtgaagccaacagatggtccctcctgctaattagaaaccaatttttttagactttttcagcctcctctactgctcatgttgctggcttgtaataggtgggctaggggttatctagagatgacaaggccctcaagttggctttccagcactggatcgaagcgatgagtacaaacgggcagtggggattggtgggttttactgcccattcttgctcttttcatggtacaattatcctgtttttttcctacagtgatgttttattttgtggcaccatctttcgaccataaacaaatacactcactttgatgaatgttgatatactttcagcattcaattgtagatagaattcttgctttcgtgtagatctaggtcatcgtgtcgccgtctttgtttggctggttgtagagcccccgctctaggtttgtttagctcctcggttcttctagctccggtatggtttcctttttgcgcatagtggcggcatctgatgcatagttcgacggtccctcgcgttgctccggtatgtcgtgttcctctcatatttcttcgtctattttttggcctattgtagaattgttttgtttgtttcccgttttctttatagagcacgtgggagagcgccgcagctgctgcggctgtggcggatgtggcggccatggcgtggcgacctgtggcaaatggcggcatgaagaagaagctgatttgaggagtcgtcgctggactgggagaagtacatgaaggacaataacaaaattctcggagaatttgagtgccttgacaaatcaccatttagatactttcttggggaactatatggtggcaattcactgggaagcacaattgcagtgggcaatgagaagaagcggcagcgggtgtacaacactatgtttcatgtcccatggagatgtgaacggggaaattcagagtcgtgttcgcctcaattcctgcacccatctttgcagctctatattgttcaacaaaagatttgggaactgggatagctgaagatgcctctactgaagatgatgatttcagtggcgacctaccaccagagtttgaaaatatcatgatattcaatggtgttgaaaccgagagtgacattgctcctccagtgctcgaggaaaacaaggatgctgttgtatctgcaacaaaaactgcaaagtccctggatgggtttgccttaaaaacagggcaggaggaggagggtccggaagaggttgatgctactgaaaaagcaatggaagtggttgataatgttgtgaagtccctggatgaagaggtagaatcaaaggagatgcagaagcagcaaccgcatgattataatagcatgagcctaggggtggtaacgggtcatttaatttagcctagcaaatttacggatcgaatcaagttagggccggatcataaaataatacaattttgaactaataaaattaagggctttgttggttcgtgaagcaagtattagggccatgatccattaccactcctacatgagcctcaggaatcttaaagccacacacaagaaatatctcattgctgcaaaggaagaggaggtcaccgaagggaagaggcttcctctcgaggaggtggaagagaacgcatgcatcagccactgaacagaacaagcaggcgatttttttgtgtggatggcgtctgccacaaaaggattgaatcgaggagtgtgctctggttgtgaagtgataactaggctaccacatgttcattttcaaaagttttcgtgtgtgatcgtgatcaggggtgaaactgtggtttcagccaacaaacttgcagttcctattgcttctccccacttttttcctttatatatattttgtatcggttacagaacatggtttatccagtggtatgctgatgaaagatgctaagtttcgcttaatataatgtatatgaaggtcctgggtacctcaaattttgtccacattgaaccagtacgaatgacatcttccttgaaagttatagaaatgcttcaaagtt

SEQ ID NO: 216318 - DNA, 3574 bp, Zea Mays
ggaatctactactactctataagggtgtaaggagggcgtccaccatgcccccgcccgacgcccccttgcccccgtccatctcgccgcaaggcacgcggcgcgcctcgcgatgccccctcgcccccgtttgtctcgccgtgatgcgtgcggcgcgcctcgcgatgccctctcgcccatgcccctgctcgcctcttctccgccccatccccctgtgtctagcgcgctacccgcccctcccaacgtcgtcctctccgtcccatcctcccatcgtgcgacaaccgatccacgcctcgaggcccaggccgtgccacgccggtggggaagcgaaactcacttacaggacgcggatctccttccaaactcgaaggcgacgatccggcacaggggcaaccttccatggtaggcgagatccacggcccactcgcgatgcgcccccatgtcagccactcccgttcgtcacctcacgatccgatgaaggcgaagggcgcacctaaagcattgtggcaagccggtatctgccgcagcggcggtagaggtcttcgaggagcacaaaggtgagggcggaggaggcgtaggaaccgagggtaccaaagtcgattcaacagaatgagacagtggtttgcaaggatctgtgcacgaggttggtgttgcggtggagggagcaaacaacacaggtgtagctgcttgtggggtggggacaatgaggcagcaagactcaaggtccaggatgatgaacaacaacagcggcgtcgacgcaggaggccctggttcaggcatgggtctgggagtgccggatgtgccattggggtcaatagtaattcacgataatgcagggtgctgtcagcaagaacatggagagccttgccgtcttggccttccaatattttatgaatttggtgattggataaaggaacaatcttttccttttgcagattaagacaaaaggggtcacaatgacagcgctgttggctaaggcgacagcaacggctctgcttcagcatcctatggtgaacttgcagctgcagggatggaaagagcttcacatacaaaaatagtatcaacattgctatagcagtggccatagatggtgggttgattacatcggttcttcaagatgctggtaaggtcaaacactttaccgtgcacaatgaatgttgattttttatgatttatttaaatgagtggttacttgttggtttatgcgtcttgacatttattcattgtcaaggaaacagaaggagttagttgataaggcgctagcaaagcagttgcagccccatgagtacaactctgatatttttttgcctcatacacaaatatgaatatgtagcacattgttgtatatcttttctaatgctctgaataagatgtggtggtacagtgcagaataatatgttctgttttttattcaactattcaaatcttatttttattcggctattcaaatcatattttttttattagctgattgccggagagattgaaatcaaaggggttgagctgcaggagagttgtagtttgtcgttcttttccatgggtgtgattgagactgaaacggtgggtaccagagtgaaggagtcggaggcagttttagtagagaaagaggtcgaactgatcgatgagcctcagattcaagagagccctccagttcctgcattgttggatgatgaggtggattttgcttaatcgtcacttgctattagagaatccgacattcccgtgaaaaaggtgctgataatcgtgacaatcacttctgttcggccacagcaaccatattacttgaatcagctagcccatgttttgaaagttgtattggtacctcttctatggttagtggtggaatggcctgaacagtcctatgaaacagcaaaaactctgttacagtccactcaggtggaagaggttgtttgtagatgttttttgttttcatatctgaactgtaatagtaaggttacaataatttttcacatagctgatggaacttctgtttgtgtgaagccaacagatggtccctcctgctaattagaaaccaatttttttagactttttcagcctcctctactgctcatgttgctggcttgtaataggtgggctaggggttatctagagatgacaaggccctcaagttggctttccagcactggatcgaagcgatgagtacaaacgggcagtggggattgagcacgtgggagagcgccgcagctgctgcggctgtggcggatgtggcggccatggcgtggcgacctgtggcaaatggcggcatgaagaagaagctgatttgaggagtcgtcgctggactgggagaagtacatgaaggacaataacaaaattctcggagaatttgagtgccttgacaaatcaccatttagatactttcttggggaactatatggtggcaattcactgggaagcacaattgcagtgggcaatgagaagaagcggcagcgggtgtacaacactatgtttcatgtcccatggagatgtgaacggggaaattcagagtcgtgttcgcctcaattcctgcacccatctttgcagctctatattgttcaacaaaagatttgggaactgggatagctgaagatgcctctactgaagatgatgatttcagtggcgacctaccaccagagtttgaaaatatcatgatattcaatggtgttgaaaccgagagtgacattgctcctccagtgctcgaggaaaacaaggatgctgttgtatctgcaacaaaaactgcaaagtccctggatgggtttgccttaaaaacagggcaggaggaggagggtccggaagaggttgatgctactgaaaaagcaatggaagtggttgataatgttgtgaagtccctggatgaagaggtagaatcaaaggagatgcagaagcagcaaccgcatgattataatagcatgagcctaggggtggtaacgggtcatttaatttagcctagcaaatttacggatcgaatcaagttagggccggatcataaaataatacaattttgaactaataaaattaagggctttgttggttcgtgaagcaagtattagggccatgatccattaccactcctacatgagcctcaggaatcttaaagccacacacaagaaatatctcattgctgcaaaggaagaggaggtcaccgaagggaagaggcttcctctcgaggaggtggaagagaacgcatgcatcagccactgaacagaacaagcaggcgatttttttgtgtggatggcgtctgccacaaaaggattgaatcgaggagtgtgctctggttgtgaagtgataactaggctaccacatgttcattttcaaaagttttcgtgtgtgatcgtgatcaggggtgaaactgtggtttcagccaacaaacttgcagttcctattgcttctccccacttttttcctttatatatattttgtatcggttacagaacatggtttatccagtggtatgctgatgaaagatgctaagtttcgcttaatataatgtatatgaaggtcctgggtacctcaaattttgtccacattgaaccagtacgaatgacatcttccttgaaagttatagaaatgcttcaaagtt

SEQ ID NO: 216319 - DNA, 1235 bp, Zea Mays
ctgttcactaatttgagtgccttgacaaatcaccatttagatactttcttggggaactatatggtggcaattcactgggaagcacaattgcagtgggcaatgagaagaagcggcagcgggtgtacaacactatgtttcatgtcccatggagatgtgaacggagtcgtgttcgcctcaattcctgcacccatctttgcagctctatattgttcaacaaaagatttgggaactgggatagctgaagatgcctctactgaagatgatgatttcagtggcgacctaccaccagagtttgaaaatatcatgatattcaatggtgttgaaaccgagagtgacattgctcctccagtgctcgaggaaaacaaggatgctgttgtatctgcaacaaaaactgcaaagtccctggatgggtttgccttaaaaacagggcaggaggaggagggtccggaagaggttgatgctactgaaaaagcaatggaagtggttgataatgttgtgaagtccctggatgaagaggtagaatcaaaggagatgcagaagcagcaaccgcatgattataatagcatgagcctaggggtggtaacgggtcatttaatttagcctagcaaatttacggatcgaatcaagttagggccggatcataaaataatacaattttgaactaataaaattaagggctttgttggttcgtgaagcaagtattagggccatgatccattaccactcctacatgagcctcaggaatcttaaagccacacacaagaaatatctcattgctgcaaaggaagaggaggtcaccgaagggaagaggcttcctctcgaggaggtggaagagaacgcatgcatcagccactgaacagaacaagcaggcgatttttttgtgtggatggcgtctgccacaaaaggattgaatcgaggagtgtgctctggttgtgaagtgataactaggctaccacatgttcattttcaaaagttttcgtgtgtgatcgtgatcaggggtgaaactgtggtttcagccaacaaacttgcagttcctattgcttctccccacttttttcctttatatatattttgtatcggttacagaacatggtttatccagtggtatgctgatgaaagatgctaagtttcgcttaatataatgtatatgaaggtcctgggtacctcaaattttgtccacattgaaccagtacgaatgacatcttccttgaaagttatagaaatgcttcaaagtt

SEQ ID NO: 216320 - DNA, 866 bp, Zea Mays
cacacacacctcctgctcccctcgccatggcatggatgaccgctgtatgtgcttctgtcgtgctcaagtcatcacagagtttgaaggagtttaaaacacaagcaaccacattggcatcgcttcagcatcccaatttatgtaaactgataggctattatgcaaaagaagattctaatgaaaggatgttggtctatgaacggctttatcatggaagcttagataagctactctttggaagatcagatggtcgtttcatggactggtctaaacgtttgaaggttgccctaggtgctgccagaggtctagctttcttgcatgatgaaggaccctttcaggccatgtacaacgagttctcaacttgaacatccaaatagataaaggtttcactgctaagctttcaggatatggttgtgttggcttcaataccgaggagatatctaatgcacctgtgtctgcagcaaacctttcggtggagaccttggagaagggtttactcactcagtttgtctattgctgcaacaagtcggggctggatcgttccaaagtaaatgtaaatggaggcgcgattgcccttggacaccctctgggtgcaacaggtgcccggttgcatggctactcttctgaatgaaatgaatcaccggggcagagactggagatttggtgttgtcaccatgtgtatcggatctcgaatgggggcaacagctgtgttcgagctgtgttcggcccgactggaggtatcgaccatcactcgtcactataacccgatggtgataggcgaccgggagcttccatgttattgcgttctgatacttgagacttttattatgactatgtatgagatattgtctcttattagtactggatga

SEQ ID NO: 216321 - DNA, 2594 bp, Zea Mays
gccactgccgttgtctgtactaagcacccgcgggtttcgacaagaagcgtaagctagctatggcaacggggaggaggggaagcccgctgctgcggaggtgcaagcgcgaggggtacacgcacgggctgcgcccgccgcagatggaggcgctccgggccatgtgcggcgcgctcatcccgtccctacccgtggagggcctccacgtccagcctcagcccggccgtggcaaggacgacctcgaccggttcttccgcgcgtccgccgccgacggcgccatccctgacgaggattggcacgctggcgctgtgcgggcggctgtgcttctccgccggcaagtcgtcgttcccgtacgcctgcaggttcgcggacatgccggtggagcggagagagcgggtgctgcagcggtggagcggcgcgcggtggctgttccccctcaagatcaccttcgtcatcgccaagctcctgtcccactacgcgttctacacaatggtaaacgagaactcggacaacccgtcctggaaagcaataggatacagcgtgcccgtgccggcggcggcggcggacgtggacaggctacggccacgggaattaggtccagcggaggcagaggcgccgtcaccgcggccactggacagcggcgtcgtggagaccagatccctgaacgacgccacgctgctcaagtcactgacggagagaggagtggcggtgaaagcgggcgtgtcgggcgcgcaccacaccgtgcaatgcgacgtcgtcatcgtcgggtcaggctgcggaggcggcgtggccgccgccgtgctggcggcggcggggcgcaaggtcgtcgtcgttgagaagggggactacttcacagccgagagctacacctccgtggagggcccgtccatggagcgcctctacgagaaggggggcatcttctgcacgtccaacgtgacgaccatcatgttcgcgggcacgacggtcggcggcggctctgccatcaactggtccgccagtgtccgcacgccggagtgggtcacgcaggagtgggcgcgcgagcatgggctccccatgttcgggaggccggagtacgcgcacgccatggacgcggtttgcgccaggctcgccgtcaccggcgggtgccgggaggaagggttccagaacaaggtgctccgccgcggctgcgaggcgcttgggctgcgtggcgacgccgtgccgcgcaactcgtcggagggccacttctgcggtagctgccacctgggctgccccaccggcgacaagcgcggcaccgacacgacgtggctcgtcgacgccgtcgcgcgcggcgcggtcgtactcacaggttgcaaggccgagcgttttgtgctggagagcaacccaggcggcagggacggccggagcaacaggtgcgtgggcctggtggcgacgtgcatgagcgacggcatcaccaagaagctgcgcatcgaggccaaggtttccgtctcggcgtgtggcgcgctcatgacgccgcctctgctccgcaacagcgggctccagaacagccacgtcggccgcaaccttcacctgcacccggtgtctatggcgtggggctactttccggacagcacgccggaggcagagctcagtggcaagtgctacgagggtggcatcatcacgaccatgcgtcgcgtcaccgcgcgcaccatcatccagacgccggcgctggggccaggatgctgggcttcgctggtcccctgggagtcgggccgcgacatgaaggagcgcatgctccgctacgcgcgcaccgcgcacgccttcgccctggtccgtgaccgcggcgcggggcacgtcgacggcgagggccgcgtgcgctacaccccgagccgggaggacgtggacgagctccgcaacgggctgcgccagacgctgcgcatcctggtggccgccggagcggccgaggtcggcacccaccgcagcgacgggctccggctgcggtgcgacggcctccgcgacgaggacctggaggcgttcctgaagcaggtgaccgtagagaaaggtcccatggtcccggggcatgacaagtgggcgctccattgctcggcgcaccagatgggcagctgccggatggggtccagcccgaaacacggcgccgtggacggccgcggcgagagctgggaggcggaggggctgtacgtgtgcgatggcagcctgctgcccacggcggtgggcgtcaaccccatgatcaccatacagtccaccgcgtactgcgtctccaagggcatcgcggagtctctggcgcgtgacaataaatagtagcctggtttgagaccgtcggatcgtgctcgcgcgcaaatggttgttgcccctgccagtggctgtgtgtgtgcatgttggatgtgtcttcatccttgtaatttgttgcataaaaagcccatcggctcgtattttcatacatcattttttaacgcttttcctatatacttagttgaggtcattgaacttaaaaataatttcagaggacaatattgtaccattaactagcccaagtatagtttattatttgttttttgttataatatatcaagttgttgtctctatctgaccataaaaacaattatatattgttaattattttt

SEQ ID NO: 216322 - DNA, 2877 bp, Zea Mays
ccaaacccccaacctattcgagcgacgaaactggaaaaaagcacgcgacgacgcgacggtgaaggggaagtgtgaagggaagcagaagcgagacaaatccccacccggctccaaaccctagccacctcccccgtcccccccttttcgtcccccagatctcgctggcgtctgctccgcctcgcttcgatgtgaccccaccctagggtttgagacggtgttgcggtgtgtgcgtgtgtcgcggcgattcgcgacgcgagtaggattcgaggtgtcggcggcggtgcgagcgcaaatgaaggacccggcgcaccgcacgaaggtggtgctccggcggctgccgccggcgatcgcgcagcaggccgtcgtggaccaggtcgatgcgcgcttcgctgggcggtacgactgggcctgcttccgtcccggcaatgccagccaaaagaatcataggtattctcgactttacctaaatttcaagcacccagaggatgttgttgagtttgctgaggtcttcaatggacacatatttgtgaatgaaaagggtgctcaatttaaagctttcgtggaatatgcaccatcacaacaggttcccaagtcaaatgtcaagaaggatggccgtgaagggactgttacgaaagatcctgagtacttggagtttcttgagtttatttcaaagcctactgagcatctacctagtgctgaaattcagcttgaaaggaaagaagccgaaagggcagctgctggaaaggaggcacctgttgtgacacctcttatgatgtatgtccgccagcaaagggcagctaagagtatggctcagagacctggaagtaggcttagcagaaaagttgcaggtgttgtaactagcagttccagtcctaaaaggtcttttgagaagcgcagatcctccacgtatgttgtacgagacagtattaaggagaaaccgacctatatcatggtgccaaagagagaggagcatacacaaagggaaaaaattgtttctggaaattcaggtgatgccacaagtgggggggcatctggatctggtcagtcttctgacaaaattgtcattttgaaaggaagaggaagggttgattcgaacacacctgatggagcagctcaacagtcatcaacccctgtgaagaatataccaccatcgagttctagactagacaagcgatctgaagctaatggaagaattattaaaactgttctttcaaacaaggaagttcgcagttcaaatccatctcaacatgagcaggaaggtcaaatgtttaatactgagaaggataagcgtccaccacgggctctcaaccctcggactattgtgaaagatcaggtagttgaaaatgctgagagaagccattttgatgagaagaataattatctccacagctctgctccaattggtgagaaggttgaaaggcatgccagaaacagagatagacctgatcgcagtgtatgggcacctcgccgctatgacaaatctccgcctgggggtgtttcacatgccttgtcgtcagatttttctcaaatgcagtcacattctggagataatgtctcacaactaacagatggtcatggagacagaaagacagacacaaggggtcatggaggtagccgtggtgttcctgttgaaaatggacataggcatgccaaccgtcgtggtaccccatgtgatccaaaggaaaccaaaatatctgctagcgtgcctgatggaaagaattcaaagaggggctctgctagctatggtgctcatgagagacaagtatgggttcagaagtcaagttcaggctcgtgagtttgtccattgatggtgcatacatggtgctccacattagctaggtgacctgattgagccaaagacaactttgtgggacttggtttaaccatttagaaccttagggaagaaagtgaatctgtagtggaacttcagggaagaattcaccattctttcaacattgttaatgaatgccatttttccgaaagtggtcttgaattatctggaatctccaccagtttcccgctaaattgttaactcttgcagatactcccataaaaaacaggtattgaagtcgtggagaagtcttggattctgcagcgcattcttctttgttagctgttgatcctgtgaagtatggtaacgaaatgtccaatggtcaaatgctaccatgaagtgcaatctcagatctgtcagtcgaagtctcagctgaaaagagggctcggctgatttgattcacagaaatagtgaagtaacataacccggcatgtaggtagctctccgacaactttgggcaagatttgatttatgcccaatgttgatctttctggagcattggatggagattaggttggcatcactacctcattacctcgtgatagtggtcacatatttccaagacccctggaggttacacgcaccctcggcaattcgtcagagatggatgtaaatatctctagagaaagaagaggtctggttccgattgctgtttacaggttagaggtgcaacgtatttacaaagagagataagagttatcacttatcagattacctggtttgttaaataaaggtgaatttagctactagattatgagaccccgtgttttgacttctgcaatcgtggttcacgacagcagaaaggttacctaggagtgtaaaagtgacatctcattttgatgctatggttctgactcaatgggatgtgactttgtgatgtggttttgtcgcctggtgtgtgttttgctgccatgttcctccaaatgacccgggtgttctgtcgtgttagggatgatatgcttggtgtacagcatcaaaggtgcttaatgttttaaatcttaaaagtgatgttgcctggctttaatggttgatgatgtccgttctcc

SEQ ID NO: 216323 - DNA, 2624 bp, Zea Mays
ccaaacccccaacctattcgagcgacgaaactggaaaaaagcacgcgacgacgcgacggtgaaggggaagtgtgaagggaagcagaagcgagacaaatccccacccggctccaaaccctagccacctcccccgtcccccccttttcgtcccccagatctcgctggcgtctgctccgcctcgcttcgatgtgaccccaccctagggtttgagacggtgttgcggtgtgtgcgtgtgtcgcggcgattcgcgacgcgagtaggattcgaggtgtcggcggcggtgcgagcgcaaatgaaggacccggcgcaccgcacgaaggtggtgctccggcggctgccgccggcgatcgcgcagcaggccgtcgtggaccaggtcgatgcgcgcttcgctgggcggtacgactgggcctgcttccgtcccggcaatgccagccaaaagaatcataggtattctcgactttacctaaatttcaagcacccagaggatgttgttgagtttgctgaggtcttcaatggacacatatttgtgaatgaaaagggtgctcaatttaaagctttcgtggaatatgcaccatcacaacaggttcccaagtcaaatgtcaagaaggatggccgtgaagggactgttacgaaagatcctgagtacttggagtttcttgagtttatttcaaagcctactgagcatctacctagtgctgaaattcagcttgaaaggaaagaagccgaaagggcagctgctggaaaggaggcacctgttgtgacacctcttatgatgtatgtccgccagcaaagggcagctaagagtatggctcagagacctggaagtaggcttagcagaaaagttgcaggtgttgtaactagcagttccagtcctaaaaggtcttttgagaagcgcagatcctccacgtatgttgtacgagacagtattaaggagaaaccgacctatatcatggtgccaaagagagaggagcatacacaaagggaaaaaattgtttctggaaattcagatgccacaagtgggggggcatctggatctggtcagtcttctgacaaaattgtcattttgaaaggaagaggaagggttgattcgaacacacctgatggagcagctcaacagtcatcaacccctgtgaagaatataccaccatcgagttctagactagacaagcgatctgaagctaatggaagaattattaaaactgttctttcaaacaaggaagttcgcagttcaaatccatctcaacatgagcaggaaggtcaaatgtttaatactgagaaggataagcgtccaccacgggctctcaaccctcggactattgtgaaagatcaggtagttgaaaatgctgagagaagccattttgatgagaagaataattatctccacagctctgctccaattggtgagaaggttgaaaggcatgccagaaacagagatagacctgatcgcagtgtatgggcacctcgccgctatgacaaatctccgcctgggggtgtttcacatgccttgtcgtcagatttttctcaaatgcagtcacattctggagataatgtctcacaactaacagatggtcatggagacagaaagacagacacaaggggtcatggaggtagccgtggtgttcctgttgaaaatggacataggcatgccaaccgtcgtggtaccccatgtgatccaaaggaaaccaaaatatctgctagcgtgcctgatggaaagaattcaaagaggggctctgctagctatggtgctcatgagagacaagtatgggttcagaagtcaagttcaggctcgtgagtttgtccattgatggtattgaagtcgtggagaagtcttggattctgcagcgcattcttctttgttagctgttgatcctgtgaagtatggtaacgaaatgtccaatggtcaaatgctaccatgaagtgcaatctcagatctgtcagtcgaagtctcagctgaaaagagggctcggctgatttgattcacagaaatagtgaagtaacataacccggcatgtaggtagctctccgacaactttgggcaagatttgatttatgcccaatgttgatctttctggagcattggatggagattaggttggcatcactacctcattacctcgtgatagtggtcacatatttccaagacccctggaggttacacgcaccctcggcaattcgtcagagatggatgtaaatatctctagagaaagaagaggtctggttccgattgctgtttacaggttagaggtgcaacgtatttacaaagagagataagagttatcacttatcagattacctggtttgttaaataaaggtgaatttagctactagattatgagaccccgtgttttgacttctgcaatcgtggttcacgacagcagaaaggttacctaggagtgtaaaagtgacatctcattttgatgctatggttctgactcaatgggatgtgactttgtgatgtggttttgtcgcctggtgtgtgttttgctgccatgttcctccaaatgacccgggtgttctgtcgtgttagggatgatatgcttggtgtacagcatcaaaggtgcttaatgttttaaatcttaaaagtgatgttgcctggctttaatggttgatgatgtccgttctcc

SEQ ID NO: 216324 - DNA, 2619 bp, Zea Mays
ccaaacccccaacctattcgagcgacgaaactggaaaaaagcacgcgacgacgcgacggtgaaggggaagtgtgaagggaagcagaagcgagacaaatccccacccggctccaaaccctagccacctcccccgtcccccccttttcgtcccccagatctcgctggcgtctgctccgcctcgcttcgatgtgaccccaccctagggtttgagacggtgttgcggtgtgtgcgtgtgtcgcggcgattcgcgacgcgagtaggattcgaggtgtcggcggcggtgcgagcgcaaatgaaggacccggcgcaccgcacgaaggtggtgctccggcggctgccgccggcgatcgcgcagcaggccgtcgtggaccaggtcgatgcgcgcttcgctgggcggtacgactgggcctgcttccgtcccggcaatgccagccaaaagaatcataggtattctcgactttacctaaatttcaagcacccagaggatgttgttgagtttgctgaggtcttcaatggacacatatttgtgaatgaaaagggtgctcaatttaaagctttcgtggaatatgcaccatcacaacaggttcccaagtcaaatgtcaagaaggatggccgtgaagggactgttacgaaagatcctgagtacttggagtttcttgagtttatttcaaagcctactgagcatctacctagtgctgaaattcagcttgaaaggaaagaagccgaaagggcagctgctggaaaggaggcacctgttgtgacacctcttatgatgtatgtccgccagcaaagggcagctaagagtatggctcagagacctggaagtaggcttagcagaaaagttgcaggtgttgtaactagcagttccagtcctaaaaggtcttttgagaagcgcagatcctccacgtatgttgtacgagacagtattaaggagaaaccgacctatatcatggtgccaaagagagaggagcatacacaaagggaaaaaattgtttctggaaattcaggtgatgccacaagtgggggggcatctggatctggtcagtcttctgacaaaattgtcattttgaaaggaagaggaagggttgattcgaacacacctgatggagcagctcaacagtcatcaacccctgtgaagaatataccaccatcgagttctagactagacaagcgatctgaagctaatggaagaattattaaaactgttctttcaaacaaggaagttcgcagttcaaatccatctcaacatgagcaggaaggtcaaatgtttaatactgagaaggataagcgtccaccacgggctctcaaccctcggactattgtgaaagatcaggtagttgaaaatgctgagagaagccattttgatgagaagaataattatctccacagctctgctccaattggtgagaaggttgaaaggcatgccagaaacagagatagacctgatcgcagtgtatgggcacctcgccgctatgacaaatctccgcctgggggtgtttcacatgccttgtcgtcagatttttctcaaatgcagtcacattctggagataatgtctcacaactaacagatggtcatggagacagaaagacagacacaaggggtcatggaggacataggcatgccaaccgtcgtggtaccccatgtgatccaaaggaaaccaaaatatctgctagcgtgcctgatggaaagaattcaaagaggggctctgctagctatggtgctcatgagagacaagtatgggttcagaagtcaagttcaggctcgtgagtttgtccattgatgatactcccataaaaaacaggtattgaagtcgtggagaagtcttggattctgcagcgcattcttctttgttagctgttgatcctgtgaagtatggtaacgaaatgtccaatggtcaaatgctaccatgaagtgcaatctcagatctgtcagtcgaagtctcagctgaaaagagggctcggctgatttgattcacagaaatagtgaagtaacataacccggcatgtaggtagctctccgacaactttgggcaagatttgatttatgcccaatgttgatctttctggagcattggatggagattaggttggcatcactacctcattacctcgtgatagtggtcacatatttccaagacccctggaggttacacgcaccctcggcaattcgtcagagatggatgtaaatatctctagagaaagaagaggtctggttccgattgctgtttacaggttagaggtgcaacgtatttacaaagagagataagagttatcacttatcagattacctggtttgttaaataaaggtgaatttagctactagattatgagaccccgtgttttgacttctgcaatcgtggttcacgacagcagaaaggttacctaggagtgtaaaagtgacatctcattttgatgctatggttctgactcaatgggatgtgactttgtgatgtggttttgtcgcctggtgtgtgttttgctgccatgttcctccaaatgacccgggtgttctgtcgtgttagggatgatatgcttggtgtacagcatcaaaggtgcttaatgttttaaatcttaaaagtgatgttgcctggctttaatggttgatgatgtccgttctcc

SEQ ID NO: 216325 - DNA, 7108 bp, Zea Mays
atggcttatactgctagttcattgatgactaggtcaagacaagatgaagtaaataagataattgagatatcaaatgttggaatttactgtcatcagctggaagaagagcaggatctatgccatgttggtgctcttgaaaatgaccactcaagggattatcttgtaaatccattttgtgtgactgtatctgtgcttgctaacaaagctgccaagcttgacggtacccctcagtataacatgactgcagagctaactgcattggccctatctgttgatgaaatccagctccaacaaatcttaaatctttgtgattacttcactatctgtgctttgcgaacaaaatatggtcgttaccgtccttctcaaagctctttatctaagagatgtaaaggttggtacagaatgtggtggcaatatgctcagaattctgtattagcagatgttcgcagaagactgaagaaaacttcatggcgttatttgaagcagcgactgaatcaccaactaagatatgtgaaattgtacagaatgaaattggagcttttacagaaaggacagattgttagtgaagacattctacaagagttggaaaatatggacagagaatgtgatatagatgacatacttaactacagaacgattgcagagcaacaactgcaggttgttgatggttctgttagaagaacgttgagggaatcattggtgaaatcttccatagatactcatagtccaggaagtcctcgaagcgatgaacagttggcaggggcaagccagggatggttaaactggctttctcttggaatgcttggtgttggtggaacagctgatagtagctcatttgctggtgttatttctgaagacattattaaggatatatatgagggaacagaatttcgtccagtttcttctgctgaaaattgtttgaagaaagaaaactactattctttgtttgttagactatctatttctcagatagtcacaactgtcacctccaggaggtttggcacgaagcttgtagatacaatgttttctgggcttggtatggaatgtaaaatatgggatgatgcagcaactattcttgcttggcttgattctcttcgggttatcaacccactgaataaaacgaaaatcttatgggctgaaaagtgtagcaccggtgatggtcttggggcacctgttgtcagtatccaagtcgactttcccaagtcaaatgaaagatcagaagcttcaacaagggtcgttgtccaggaattcaacgccatctatgaaccagaattctttgttaatgtcctgtacatctacaatgtgttttccgctttccaatttcagcatgatagggtactttcttctctaaatcggttcaataatttgggaacaagacttgtctccaaactgaagtacatgtctgctaatcgtaaaaaacttatttgggatttgaggatttatcatttcgtcattaggataccatcacagaattgtgaaaggaaagaacttgccatggttattgatgctggggatgtattcattcagtctaaagatacaattgacgatatttctcgaacacaagaaagcaattcctttcttgatcacatatcaaaaagtcttcctagttatttttctgatgatctgttactcggtatccagttggatgagctttataaccagtttgagcttggccttactgggtttcaggtgaaggtattgttgcctgacagacataatgtttcctctacactgattaagcttgatgcttccattgcacttcgattgtgtgtattcctagatgaaccagtgctaaaacaattggaggtcggttttattgtgtcatctattgatgcatacctctctcagacaatgtacagtaccattgttaatttgcctagaatgaaagaaactaaccttttcaagaacagcgtatttgataataccaagacacatgtacccaagaaattggccttgaatgtgtctgtgtctctgaagctcgccaagttaggtttacatgttgaccttgatggtaattttgaggaaagttctggtctcattgttggcattgaagacattgatatcaggtatgctatctgtgaattgtcagatctttctcttgccatgaagacggtcaatgttactttcagatattggaaggataaatcagattcacatgtgctatgcttatctgggaacttaacacgatgtcctgaaaattctgttgaaacttgtttggatctgcattatagaactcacaagcatgacgatcaaatacatcatgtataccggctgattttatgtgatgttgatctgcatgttaacccatctgttattggtcagataaggatgtttttaagaaaacttgattcaggaccttcaattggcagtgatgttgaatccacaatgattggtcagagttccatgaaatccggggcagctaatggcatacttcccatgttctttttgtcaaatttatgtggtgcagatggcactgtattcgcaggagtttctgttgaccacttcccatttttagttgcagatcacagttgtggatataattttgggtgcttaggaactcaaaatgttgaagcacaagaaagtttatactcaaagaatgagcactgtcatgacacttcaggtttgaatggttatcatgcatcagatctcaccagcaatacatacggtaaaacccagcgttcagattgttcatctggctcatcaaatgaccccaagaatgccagcagaactgttctggatctatcacttatttctgttagaatacattttcctgaatcatgtggtactttagtaacaataaccattcctgaatcgatatcaacactcacttattttgatgcaagctcatgggacttactattgtctgctaacaatttgactcttgcttcaccatggactccaccaaatgtcaacgagctggtctggggcacagcttcacatcgcaatgctagtgtactcaacgttcgagttaaaaaggacttacctgcactgtcaaccgaagtatgtgttggaattcaaaacgtttgttgtgtattaccatccaagttactggctatgtttgttggattctttttgttggatgattggaatcgtattgcagaacaggaattccttgtggcagataacaaccttgaaggcttgagagaatcacatgactgtgtaacatataaatttgatatcagtgattgtgttgtattttttcctgtggaagagcaaggtttatcgtgtctaaagctggaggttccacattttttctgtgagttcattgcgaacggaagctctgtagaatttgcaaagcgtatccccaaagaattcttcagttcagagtgcatagtttccagaagagttgatgtcatctgcatatatgcaagaaatgcatccatatcacttctaattgtaagcgaccaaacagattttatgctaaagcttgatgagaacgttcctaagagaatccattctcttattgaaaagcttgatgccgacgtatggattcaggttccttgcaaagatataccatactcgcagcagcctacttcacctacctccgttatgagcaaaatatcacgatgcaacttgattgctgaagatttatattttataaatgggatggagacagttattggtgttgttgaccagttgatttcgatcggcaatgaaagtaaaatgtacaaaggcaatgcctcacagtttttagatcatagaagtttctgtgagggcaaccctgatcctaatgagtgtaccaatctcactatttcgatcaaggatctgatgattctcttgggccagtctaaagctaaaggtctggcactggagaggattgccactgcaaacatggagtttgatgtttctgctgtactagttggtgaaaaaccagagcgcatagactttgacgttgtttctttaacactgcagtcacctggtggttacacactcatctccattgtttcggatgggccactatctcctgtttttttcaagtttacaaagcaccatactggacaagatgagatattactaagtgtacccctttttgagatctggttatatttacaggattggaatacaattatcaatcattcccattcatacataaagacagaagtaaacagtatgcctgtggagcatgcagctgctttgtctcagtttccagaaatggtatcgtcaccacttattgcatcagaatttggttcaccagatgacttcaacttagtggtaacatgtgaaactatttctggtgtactccatatacctatctgggggaaagaagaaaatcacacaagcaatcacatgggtgtgactcctgcttcttttccaatggaagtgggcactcatgagacagatgatattcaatattgtgaaccaaaaggttgcaagtttgtcaccttaacttttgatactaaacattttgtggtgatgtcaggtgatagctgcataaattttagatgtgatttagagagattgaaggtattgctggaaatgattcaagagaataagggtacctctgttccatttgtgcatatatctaaggttaaatcttctggttatgttcgtcaatcagaaaggaatttggaacatctttctgttgatctacaagctgaatacatggatgttagtttttcacaccagatatttaacttctggcataacatggaactcaaatttcctgctgcatcatctgcatcctctttttattctgtggcattcaaggcaggattgaggaaagggtctcttctgctaagcgatggaaggtggagcagtcatggacctgtaatagagacgttattgaagaatctaactgtgcagttcagtcaaatgaaggataggacagaagtgtctgcttttgttgaccttttagtaaattacaataacattgataaggttatgtgggaaccttttgtagaaccctcaagatttcagttaaatatgctaagaaaatgtggtgattgtggattggatatatcacccagtactgatgtgtgtttaagttcaagcaagcagcttaatctgaatatatcagaacccttaattgaggctcttctcagacttaaccagatgattacagattctcttgatccgagtaatggtagtggtatttgggaagatcctggaatcttgagattaaaccatgatgatgttcgtaccagaagatacgcaccatactttctctcgaatgacacatcattgccctttaggttcaaggtgtaccgaggtgctgttaattcagatgatattggcagtttctctgtaatagatgaaaactctgtgccggcggggtatgctgtcccaatttacgtcgaagaaactcctgatgaatttttcttccaacacagagaagcacgatcatcagaccatctcatcgagaaacgaatgagtgctctatcacactacatgatctccattgagtttgatggaacatcaggcccttcaaaaccaatgtcaatggaccttgtgggcatttacttctttgaagtaaatttctcttcaagtaaaaagccaattctcggcgaagaaagtttaggagcattttcgtctaatgcaaaaggcaacgatgggttaattgtgcctgtggtgctcgatgtttccttacagaactacagcaagcgtatacgagtttattcgacggtaatactatacaatgcaacatcaatgcccctcgagttgaggtttgatataccatttggtcttgcatcaaaggtgtcatgtcctcatcataatttccaccaaaagaaccagatatgggatttctcaagaaacttcactctgcaggtaattgggcccattcctccaaacaaagagattccactgccggttcatttgtctgaagctggccagattaggtggcaccctgtcggcagaacatacttgtggagtgaaacccgctccttgtcaagtttgctttcacgtgaaaacagggttgggttcatgaaatcatctgtttgttatccttctcaccctagtaatgacccatttcgttgttgtgtatctgttgaagaatacaatgtcccttcatctgttagtaccaagaaaaaacagttgtgcagtgaaagattgaacacacaagtttctggaagttctactccaaatacttttaagcaaaatttgacaaggacacattttatacggcatgtcaagcttaataccccgcttctcataaagaactatctgcctgtttacatttccttggcaatagataatggtgggtctgcgcgggtaatttcgctaaaggaggtagggtctgcctctattttgtttgttgatccctccaatgatcttggaattacaattgatattcaagattataggtccttgaacataaagtttccccgggctgaatcattctcaactacagccaagttaaatggcttcaaattctccataactgagtcaattactttctactcaaatttgtctaattttcctcttaatgttatgctggaaaaatcaatggatgctcgttctggcgcaagagagttgtatctttctgttccattcttgttgtacaattgcacagatctattgcttactgtcactgaaagcagctctgagaggagtgggcctactcttgtgattccccctagttttgaattggatggatatgcaagacatatgcttgaaaagggtggtctttctcttgtcaatccttctgtacaatgctttacaggcaaaatgccccagatatatttgatggatggacactgctcttcttcagatataagttgtacacgtaacagtgagtctgtaaagaaagatttggacaacagtgttaaagcttatatgtttgctcctgatgggcacactccagcaactgaactttcagttaagttgaatgcttctccgcctaataatggaactgaaacaactcggcgaaattggtcaaatcccttcctccttgtccctgccagtggttcaacaaatgttactattcctcagtcatctacttctggtgccttcttagttgcagtggcatctatacctgtttcaacagaactttttggcaggacaagggctattgctttcaggccaagatacgtcatatgtaatgcatgcagcaatgatttgttctttcgacaaaaaggaacacggttttctaagcacttaagttctgggc

SEQ ID NO: 216326 - DNA, 7965 bp, Zea Mays
gttgcctccgccgtccgcctccttctccaagcaaacggaactgaaaagaaaaggtcccgccccggcggcggcacccgactctccatccaccgctcgcctccccttgcccctcctctcgtctactcgtcaccctacgctcggctccatcctccccgcctccccacgtgtcctcccgctacatgggagcgcgggctccctagggtgcctcgaccaccgccgccgccatgttcgagggggtggtaagccaggtgctctatggcctcctccgccgctacgtcaagggcatccagaaggagcagcttaagatcggcatctggaaggaagaaatactgcttgaaaatgtagagctgattctggaagcctttgactacctgcagctgccattcgcgctgaaaaatggacgaattgggaagctaagcatccggattccttggaaaaagctaggatgggaccctatcattattgtcatagaagatgtctatgtttgcgcatgcccaagggaggactctgagtggagctcagattctctggacaagagggaactagctggaaagttggctaaacttaatgccattgagcttgctaaattttctagaagagttacagataatcaaacgggacaatcatttttgtcctacatatcagcaaagatactggatagtatccaagtttctatgcgaaatgttcatattgtatacatggatacccacaacggtcaagggaactttgtatttggtttggaattcacaagtctctcaatacaaacagatacccagaagcaaagttttacaatttcattgatgactaggtcaagacaagatgaagtaaataagataattgagatatcaaatgttggaatttactgtcatcagctggaagaagagcaggatctatgccatgttggtgctcttgaaaatgaccactcaagggattatcttgtaaatccattttgtgtgactgtatctgtgcttgctaacaaagctgccaagcttgacggtacccctcagtataacatgactgcagagctaactgcattggccctatctgttgatgaaatccagctccaacaaatcttaaatctttgtgattacttcactatctgtgctttgcgaacaaaatatggtcgttaccgtccttctcaaagctctttatctaagagatgtaaaggttggtacagaatgtggtggcaatatgctcagaattctgtattagcagatgttcgcagaagactgaagaaaacttcatggcgttatttgaagcagcgactgaatcaccaactaagatatgtgaaattgtacagaatgaaattggagcttttacagaaaggacagattgttagtgaagacattctacaagagttggaaaatatggacagagaatgtgatatagatgacatacttaactacagaacgattgcagagcaacaactgcaggttgttgatggttctgttagaagaacgttgagggaatcattggtgaaatcttccatagatactcatagtccaggaagtcctcgaagcgatgaacagttggcaggggcaagccagggatggttaaactggctttctcttggaatgcttggtgttggtggaacagctgatagtagctcatttgctggtgttatttctgaagacattattaaggatatatatgagggaacagaatttcgtccagtttcttctgctgaaaattgtttgaagaaagaaaactactattctttgtttgttagactatctatttctcagatagtcacaactgtcacctccaggaggtttggcacgaagcttgtagatacaatgttttctgggcttggtatggaatgtaaaatatgggatgatgcagcaactattcttgcttggcttgattctcttcgggttatcaacccactgaataaaacgaaaatcttatgggctgaaaagtgtagcaccggtgatggtcttggggcacctgttgtcagtatccaagtcgactttcccaagtcaaatgaaagatcagaagcttcaacaagggtcgttgtccaggaattcaacgccatctatgaaccagaattctttgttaatgtcctgtacatctacaatgtgttttccgctttccaatttcagcatgataggcgacagcctgtggggaggtggagctccggcggctgtggcatgagaggaggggatatgcgacaattgtggcttggcggagaggtactttcttctctaaatcggttcaataatttgggaacaagacttgtctccaaactgaagtacatgtctgctaatcgtaaaaaacttatttgggatttgaggatttatcatttcgtcattaggataccatcacagaattgtgaaaggaaagaacttgccatggttattgatgctggggatgtattcattcagtctaaagatacaattgacgatatttctcgaacacaagaaagcaattcctttcttgatcacatatcaaaaagtcttcctagttatttttctgatgatctgttactcggtatccagttggatgagctttataaccagtttgagcttggccttactgggtttcaggtgaaggtattgttgcctgacagacataatgtttcctctacactgattaagcttgatgcttccattgcacttcgattgtgtgtattcctagatgaaccagtgctaaaacaattggaggtcggttttattgtgtcatctattgatgcatacctctctcagacaatgtacagtaccattgttaatttgcctagaatgaaagaaactaaccttttcaagaacagcgtatttgataataccaagacacatgtacccaagaaattggccttgaatgtgtctgtgtctctgaagctcgccaagttaggtttacatgttgaccttgatggtaattttgaggaaagttctggtctcattgttggcattgaagacattgatatcaggtatgctatctgtgaattgtcagatctttctcttgccatgaagacggtcaatgttactttcagatattggaaggataaatcagattcacatgtgctatgcttatctgggaacttaacacgatgtcctgaaaattctgttgaaacttgtttggatctgcattatagaactcacaagcatgacgatcaaatacatcatgtataccggctgattttatgtgatgttgatctgcatgttaacccatctgttattggtcagataaggatgtttttaagaaaacttgattcaggaccttcaattggcagtgatgttgaatccacaatgattggtcagagttccatgaaatccggggcagctaatggcatacttcccatgttctttttgtcaaatttatgtggtgcagatggcactgtattcgcaggagtttctgttgaccacttcccatttttagttgcagatcacagttgtggatataattttgggtgcttaggaactcaaaatgttgaagcacaagaaagtttatactcaaagaatgagcactgtcatgacacttcaggtttgaatggttatcatgcatcagatctcaccagcaatacatacggtaaaacccagcgttcagattgttcatctggctcatcaaatgaccccaagaatgccagcagaactgttctggatctatcacttatttctgttagaatacattttcctgaatcatgtggtactttagtaacaataaccattcctgaatcgatatcaacactcacttattttgatgcaagctcatgggacttactattgtctgctaacaatttgactcttgcttcaccatggactccaccaaatgtcaacgagctggtctggggcacagcttcacatcgcaatgctagtgtactcaacgttcgagttaaaaaggacttacctgcactgtcaaccgaagtatgtgttggaattcaaaacgtttgttgtgtattaccatccaagttactggctatgtttgttggattctttttgttggatgattggaatcgtattgcagaacaggaattccttgtggcagataacaaccttgaaggcttgagagaatcacatgactgtgtaacatataaatttgatatcagtgattgtgttgtattttttcctgtggaagagcaaggtttatcgtgtctaaagctggaggttccacattttttctgtgagttcattgcgaacggaagctctgtagaatttgcaaagcgtatccccaaagaattcttcagttcagagtgcatagtttccagaagagttgatgtcatctgcatatatgcaagaaatgcatccatatcacttctaattgtaagcgaccaaacagattttatgctaaagcttgatgagaacgttcctaagagaatccattctcttattgaaaagcttgatgccgacgtatggattcaggttccttgcaaagatataccatactcgcagcagcctacttcacctacctccgttatgagcaaaatatcacgatgcaacttgattgctgaagatttatattttataaatgggatggagacagttattggtgttgttgaccagttgatttcgatcggcaatgaaagtaaaatgtacaaaggcaatgcctcacagtttttagatcatagaagtttctgtgagggcaaccctgatcctaatgagtgtaccaatctcactatttcgatcaaggatctgatgattctcttgggccagtctaaagctaaaggtctggcactggagaggattgccactgcaaacatggagtttgatgtttctgctgtactagttggtgaaaaaccagagcgcatagactttgacgttgtttctttaacactgcagtcacctggtggttacacactcatctccattgtttcggatgggccactatctcctgtttttttcaagtttacaaagcaccatactggacaagatgagatattactaagtgtacccctttttgagatctggttatatttacaggattggaatacaattatcaatcattcccattcatacataaagacagaagtaaacagtatgcctgtggagcatgcagctgctttgtctcagtttccagaaatggtatcgtcaccacttattgcatcagaatttggttcaccagatgacttcaacttagtggtaacatgtgaaactatttctggtgtactccatatacctatctgggggaaagaagaaaatcacacaagcaatcacatgggtgtgactcctgcttcttttccaatggaagtgggcactcatgagacagatgatattcaatattgtgaaccaaaaggttgcaagtttgtcaccttaacttttgatactaaacattttgtggtgatgtcaggtgatagctgcataaattttagatgtgatttagagagattgaaggtattgctggaaatgattcaagagaataagggtacctctgttccatttgtgcatatatctaaggttaaatcttctggttatgttcgtcaatcagaaaggaatttggaacatctttctgttgatctacaagctgaatacatggatgttagtttttcacaccagatatttaacttctggcataacatggaactcaaatttcctgctgcatcatctgcatcctctttttattctgtggcattcaaggcaggattgaggaaagggtctcttctgctaagcgatggaaggtggagcagtcatggacctgtaatagagacgttattgaagaatctaactgtgcagttcagtcaaatgaaggataggacagaagtgtctgcttttgttgaccttttagtaaattacaataacattgataaggttatgtgggaaccttttgtagaaccctcaagatttcagttaaatatgctaagaaaatgtggtgattgtggattggatatatcacccagtactgatgtgtgtttaagttcaagcaagcagcttaatctgaatatatcagaacccttaattgaggctcttctcagacttaaccagatgattacagattctcttgatccgagtaatggtagtggtatttgggaagatcctggaatcttgagattaaaccatgatgatgttcgtaccagaagatacgcaccatactttctctcgaatgacacatcattgccctttaggttcaaggtgtaccgaggtgctgttaattcagatgatattggcagtttctctgtaatagatgaaaactctgtgccggcggggtatgctgtcccaatttacgtcgaagaaactcctgatgaatttttcttccaacacagagaagcacgatcatcagaccatctcatcgagaaacgaatgagtgctctatcacactacatgatctccattgagtttgatggaacatcaggcccttcaaaaccaatgtcaatggaccttgtgggcatttacttctttgaagtaaatttctcttcaagtaaaaagccaattctcggcgaagaaagtttaggagcattttcgtctaatgcaaaaggcaacgatgggttaattgtgcctgtggtgctcgatgtttccttacagaactacagcaagcgtatacgagtttattcgacggtaatactatacaatgcaacatcaatgcccctcgagttgaggtttgatataccatttggtcttgcatcaaaggtgtcatgtcctcatcataatttccaccaaaagaaccagatatgggatttctcaagaaacttcactctgcaggtaattgggcccattcctccaaacaaagagattccactgccggttcatttgtctgaagctggccagattaggtggcaccctgtcggcagaacatacttgtggagtgaaacccgctccttgtcaagtttgctttcacgtgaaaacagggttgggttcatgaaatcatctgtttgttatccttctcaccctagtaatgacccatttcgttgttgtgtatctgttgaagaatacaatgtcccttcatctgttagtaccaagaaaaaacagttgtgcagtgaaagattgaacacacaagtttctggaagttctactccaaatacttttaagcaaaatttgacaaggacacattttatacggcatgtcaagcttaataccccgcttctcataaagaactatctgcctgtttacatttccttggcaatagataatggtgggtctgcgcgggtaatttcgctaaaggaggtagggtctgcctctattttgtttgttgatccctccaatgatcttggaattacaattgatattcaagattataggtccttgaacataaagtttccccgggctgaatcattctcaactacagccaagttaaatggcttcaaattctccataactgagtcaattactttctactcaaatttgtctaattttcctcttaatgttatgctggaaaaatcaatggatgctcgttctggcgcaagagagttgtatctttctgttccattcttgttgtacaattgcacagatctattgcttactgtcactgaaagcagctctgagaggagtgggcctactcttgtgattccccctagttttgaattggatggatatgcaagacatatgcttgaaaagggtggtctttctcttgtcaatccttctgtacaatgctttacaggcaaaatgccccagatatatttgatggatggacactgctcttcttcagatataagttgtacacgtaacagtgagtctgtaaagaaagatttggacaacagtgttaaagcttatatgtttgctcctgatgggcacactccagcaactgaactttcagttaagttgaatgcttctccgcctaataatggaactgaaacaactcggcgaaattggtcaaatcccttcctccttgtccctgccagtggttcaacaaatgttactattcctcagtcatctacttctggtgccttcttagttgcagtggcatctatacctgtttcaacagaactttttggcaggacaagggctattgctttcaggccaagatacgtcatatgtaatgcatgcagcaatgatttgttctttcgacaaaaaggaacacggttttctaagcacttaagttctgggc

SEQ ID NO: 216327 - DNA, 611 bp, Zea Mays
tggcctattaggtcaaactatcagctcctgattttcggagactttgaagagttggatgagcagttgcgtgcccggccaagaggtggtcggaagaggaaagcattgacggtggaaacactgacacgcaagagggtgaccatctccggcgaggcttcatccttggatgatggagtggagtatcttcgctggttgctatctggtggggatgattcaattgattgtcagtagccggcgtctttttgctatcaccgctgctttgtacatgggttagattatgtaatgtaagttgtttggtagactacgatggtgttcatgacgcgtttgatatattgtcagcagtatggtagtgcagggctctcatagtaaagcttgccatttttgttgtatctttaacccacgtgggtccagatgatgtgtttattcctatgtatttacttatctacatgtatccacatgtgcgactttggcgtttgtttgagattataatctgttaaaatatgttggattatataatttgggcagattataattccaaacaaacactgactaatgctctatttgtttaccctctagtttatataatctagcttaaataagttaaaagaaacaaa

SEQ ID NO: 216328 - DNA, 1641 bp, Zea Mays
gcctggcccagcccagttgttgggcgaacagagagtcgtcttgctctactctagtcgttcggtcttcactcgacaaaaggtgagggagtgcagtccggggacgggagggagaccaatcggagctgatggaggcagcggcggcgctgccgccggagagggatacgtcagcggactggggagatggcgtggtaccgctaggtttccgggtgaaggcatcctctcgcgagtcgccgtcacagaaggcggggaacgtgctggaggccgacctgcgctcccactgggccaccgccaccaacaccaaggaatggatcctccttgagctccaggaaccgtgcctcctctcccacatccgcatctacaacaaatccgtcctcgagtgggagctcactgccggactgcgatacaagcccgatgcattcgtcaagttgcgcccccgctgcgaggcccccaagcgcgacgtcgtctaccccgccaaccacaccccttgccgctaccttcgcatttcctgcctgcgcggcaaccccatcgccatcttcttcatccaactctttggcatccccgtgcctggcctcgaacctgagctccagccactgctcagctatttactcccgcaaatcacatcctccaaacaacccctttctcacaacatgcacctccagttgcttaaagatatctccaccaggctacctccatttcttccccaaattgaggctgaccttaatagtgtcgtggacaccccagaaagcagcgtgcggttcttggctctacttgctggtccattttatcctatccttcaccttataaatgaaagagatcctaccaaatctttgtttggttctgctgattcagatgccctcagaactagtccagcttctactccaacagtttcttcaaactttgaggcacaaccaaggagatcacggagtccatctgttcagcctgcttcatatttgctggcatttcgatctgaaacaactatgctcctcttaaggaaagcacataaagacaaaacccttggagttgtttgtgttcgagcatcgaaggtattgcaaaaactgttggagcctgagccatttttagacaaatcgatgtatactgatgtcatgctaccaaaccaagtctctgatgaaattcctaaaagcgatgctctcagcctagtacattctacagactactccagtatgtttggagaggaatttagcctgtcagagaatcagtttgatggttcattactgaatattttggatattgctgctgtggaagaaggcattcttcatgtactatatgcggctgcatcacagcctatgctatgtcgcaagcttgctgaaactacttcagacatttggtctgtcttaccacttgtccaagctctacttccagcacttcgtcctccaatcagttctggtcctattgaacatattgatgattcttttagccaatggaaccatccaaacattcagaatgctctctcccagattgttacaatgtcagtatcgtcatcagtttttcatcctcttctcagagcttgtgctggttatctttcatcctaccttccatcacatgtaaaaacggcttgtgttttgcttgacttgtgtcggggggcattgttatcatggataccaatgataacagcaaaggtct

SEQ ID NO: 216329 - DNA, 1037 bp, Zea Mays
cagagagtcgtcttgctctactctagtcgttcggtcttcactcgacaaaaggtgagggagtgcagtccggggacgggagggagaccaatcggagctgatggaggcagcggcggcgctgccgccggagagggatacgtcagcggactggggagatggcgtggtaccgctaggtttccgggtgaaggcatcctctcgcgagtcgccgtcacagaaggcggggaacgtgctggaggccgacctgcgctcccactgggccaccgccaccaacaccaaggaatggatcctccttgagctccaggcacaaccaaggagatcacggagtccatctgttcagcctgcttcatatttgctggcatttcgatctgaaacaactatgctcctcttaaggaaagcacataaagacaaaacccttggagttgtttgtgttcgagcatcgaaggtattgcaaaaactgttggagcctgagccatttttagacaaatcgatgtatactgatgtcatgctaccaaaccaagtctctgatgaaattcctaaaagcgatgctctcagcctagtacattctacagactactccagtatgtttggagaggaatttagcctgtcagagaatcagtttgatggttcattactgaatattttggatattgctgctgtggaagaaggcattcttcatgtactatatgcggctgcatcacagcctatgctatgtcgcaagcttgctgaaactacttcagacatttggtctgtcttaccacttgtccaagctctacttccagcacttcgtcctccaatcagttctggtcctattgaacatattgatgattcttttagccaatggaaccatccaaacattcagaatgctctctcccagattgttacaatgtcagtatcgtcatcagtttttcatcctcttctcagagcttgtgctggttatctttcatcctaccttccatcacatgtaaaaacggcttgtgttttgcttgacttgtgtcggggggcattgttatcatggataccaatgataacagcaaaggtct

SEQ ID NO: 216330 - DNA, 1064 bp, Zea Mays
gcggcttaatgtggacctgcttgatggctcggtctcctattcagagcctgcatcggattggacatcatggcgtgcatatggctggaccaaatcacctagctgacaaaaggtcgaacaagtactccatcattttcaataacagagagaaagaatctcttgtggtttttattgatagcgaggatgagatcaccttttcattacatctcaatgaaggttcagcgaataaatttgctcatgttgatgccataaatacgccccttgcacttcagccatgttgttttctgaaggagagacttctgatgcagcaagagatgtctgacacaacaaggcaacatcaaacagtgagggaaaacagaggttgtttttttaatgccactgatgagaaggagttgctgaatgcaattttcaagcctgctgttgagtatcctcacgcggacaatttagctggcaaggagacaaggcagcgattgagtaccaggatgagttacaagatcctggaagaaaacccgtggcagctctacactacaataagggtgataaagatgtctcgcccaatggaagacatgatcaaggttcacgatgttccccatcctctgctcaaaagtcttggcgtgaagaatctcccagctgtaattggccgaaccgtgaatggtgaggagctccttctgaaggatggcatttcggtgaaagatctcagatctggtgtcaaggaattgaagacactgctagatagtattgagaagaagaataagaagttattatcgaatctagctaataagaaaccttccggtcaatgggaagaaatcaagaagattcctctgctcacagcttccaattttgaggaaatcaagaagactccagtatgcatcattggtgttttcgggtcaaacaaagccaaggggcagcttgaagcagtcctgtctgagatatctaagaagactctgataagggggcagaactataattccagaaatgttgtctcctatgctttgctggataaggacaaacaatctgcattcctgtcatcgtttgacaagtctggatacagaaaaatcaatggataa

SEQ ID NO: 216331 - DNA, 2931 bp, Zea Mays
aaacaaaacaaaagtcgcgagccgccggcaacagcagctgtccgtccgagtcttcgcttcgcttcgcttccatttcgtcgccgttgcacctcccatagtaatagtcccccattcaatccgctcggtccaaatccacgtcttttgtcgtggggtggtgtctggcattgcattattggaggatcgaaaccatcgccaccgcaccaatgatccccttctccgtcctcgccggcgccctcgtcttgctcgtcggcgtcgccgatgccctgcccgataagctgcggcgcgacgtcggacaaggtcgcggggaacgtgacatgggtcgccgacggggcgttcatccacgccggcaaggtggcggagctggactccccgggcgtcatgccgatgctctcctcgctcaggtacttcccgccggacgcgtcgtccgccgccaagtactgctacgcggtcccggcggcgatgcacgccaggtacctggtccgcacgacgtactactacggcgggttcgacggcggcggggcgccgccggtgttcgaccagatcatcgacggcacgcggtggagcgcggtggacacggcggggggctacgcccgcgggctcgccacgtactacgaggccgtggtggaggccgcggggaaggagctcagcgtctgcctcgccaggagcgccgccaccgcgcccggccggagccccttcatctccgcgctcgaggtggtgccgctcgaggagtccgtgtacagcgccgtcaacttcaccgcctacgcgctgagcaccgtcgcgcgccacagcttcggccacaacggctccatcatcggctatccagacgatcggttcaaccgatactgggagccgtacagcgacgggggcatcccggtggtggagagccaggcgagcgtggcgacggaggcgttctggaacaagcctccggaggccgtgttccggcgaggcctgacggcgagcagagacaagagcctggagctccagtggccgccggcgccgctgccggccgcgagctactacctggcgctctacttccaggacaaccgggggccgagcgcgctcagctggagggtgttcgacgtcgcggtcaacggccagcccttcttcgccggcctcaacgtctccacggcggggtgcatggtgtacggcgtcgactggccgctatccgggcagacaaggatcacgctgacgccggcgctggagtcccccgtcgggccgctgatcaacgcggcggagctcatgatggtcgtcccgctcggtgggaggacgcatcccagagacgtaatcggcatgcaggagctggccagaggattcacgaacccgccgtcggactggagaggtgatccatgcttgccccaggggaactcgtggactggtgtcacctgcaaccaagatccactggcaagagtaactgggctcaacctcacaaatttcagagttggaggatcgatatctaacaacattgccaatctgactgcaatttccagcatttggcttgtcgggaacaatttgaccggcccgattccagatctgaaccacctcctgcatgtagtctctttgcacctggaggacaacggactgacaggcccgctccctgaatcgctcggaaaccttacaagacttgaggaactgtccgtgcagaacaacagcctacaaggaacaattccaagcagcatcaggaacagagcggcggtggacccaaggtttaggttccagccatgcaatccagcccggaattactccgcagcccatgatccgtcagcagcatccccagcctgttgtcccaataggcccgtactgacccaagatatgaagatatctacctcgtgtcttgtccacctcctcaattatctcatcgttcctcgcgctcatcgcccactttgccgtcgatgcatttcccactcccgcctcttcgccggcgatgaccgccgcctcccacgtcctaacctcctcggcttctctatgacgactcctccgaacccctccccgctcctgtcctcccgcccgaacccctcccttcctctccaccgccgcccccggttcccccactccccggccgccgccaacaccaccggcgccgcatcggcgccggactggttccgccctcgccgtactccggactcggacccgtccatctccggcggccgcgtcaccgcgcgtgatcctggcgttcgcgtcaaggccaaggagggcgccgaggaggaaaaagataagaaggctaagaggaggagatggtgggagcgctggtcgggggacaaggagagctacctggtggacgatgtggagccgctccccatcccattgaccgtgccagagacggagcccatgtcgcgggaggagctggaccgccggctcagctgcgacgtcgagatcgatgaatgcaagacggtctcatacgagtggacaggcaagtgccggagctgccaggggacgggactggtcagctacttcaggaagaagggcaaggagaccatttgcaagtgtgtgccatgcgccgggattggttatgtgaggaaaattacacttcgtgaggacattcaaaagatagacgagctagacaatgagaaactaccatagtttgaaaggtctcaagtcattcggcctctgcaattttgtaaatgctgccgaagagcttgtgctcgcaacctacacattgactaatggttctttccactgcacatttactgttcaggcacgatactagcttggaggggttattctttaagcactgtaaacttttgtgttcaaaaaaaaacattgcaaacttagcaatggtgtctagtaattgtaccccttttatcttggttatttgctgatagatatgataacgatcgatacagaaaagaaaataataattgtatcccttttgtaaattcttttagcacgttggtatggtccatctgtttctctcctttgtggttgagattgcct

SEQ ID NO: 216332 - DNA, 1125 bp, Zea Mays
tctacacaaaaaggaagccaaaaaaaacccaaaaataggagaaaaaccatcccactccaatcttcgaagggtcgaactaggcccgtcagagaatcagagctctgaggctgctcacatcaggccaccaccaacccctcacgtcggcggtggcgtcgtcggcgaaggcagagatggcgtccgtggccgcggcggaggtcgcggcggcggcgctccggtcggtgctgtcgcgcgcgcagcaggcggcggcgcgggcggggcgcgcgccggggtccgtgcgcgtggtggcggtgagcaagaccaagccggtgcctgtcatccggggcgtctacgacgcgggccaccgctgcttcggcgagaactacgtccaggagctcatcgacaaggcgcctcagctggcgtgccaaaccttgatatggttgagagtgtcgatgatgagaagattgctaaccgtcttgatcgagtggtagctgacttggggagaaaacctcttaaggttttggtccaagtcaacactagtggagaagaatcgaaatttggagtagatccctcaggatgcatggaactagcaaagcatgtcaaactgaactgcccgaaccttgtgttctctggtctgatgacaattgggatgcttgattactcctcaacccctgagaatttcaaggcgctggctaactgccgggaagaggtgtgcaaggagcttggaatacccgaagagcagtgcgaattgtctatgggcatgtcggctgattttgaacaagcgattgaaatgggaagcacaaatgtaagagttgggtcaaccatatttggtgcaagagaatacccaaagaagaactagggtgtttaactatatttggtgcccaaagaactagggtgcttatgcattcctgtcatgatggtagtggcacagaatctgcaacagatccaaatctgatgatgcatcatatatgtgcagttgtgtgcccattctactcagcttaaaacattttgacacccttttttggcccaaagtatcaataaggaaagttaataaaaagcattagaccacatgagtatcgattgtattttgatgtcgacagattttgtttacagttcaaacatccctgttacattatcttttacgcctat

SEQ ID NO: 216333 - DNA, 3916 bp, Zea Mays
ccagcctcaagtgaaaggaaattttgctctggctcaaagttgaaagagatgggtgggagtgggatttttgctgagaagagtgaaaatggtgatgcagaggcttcaaatcctgctaacaagacttccttgaggatgtaccagcaaactgtgactggaataagccagatttcatttagcgctgatggaagtgtttcaccaaagaagccatcgtcgatacctgaggtggctaagcagcgagagcttagtggcaccctggaagatgctgatgctaaaatcaataagcagctttctgaagccaagaccaaggagcttagtgggagtgacatctttggtccgcctcctgagattccagcgaggccattggctgctcgtaacatggagctacaaggaaatgtcgatttttcacttccacagcgaagcgtccacacatcagttaaagtatctaatcctgccggaggtccaagcaacatctctttcagcgaagagcctgtagtgaagacagcaaagaaaatccacaaccagaagttccaggagctgacaggtaacaacatcttcaaggaggacgtccctgcctcggccgagaagtctctgagctctgcgaagcttaaggagatgagcggcagtgacatcttcgccgatggaacgccagctccccgagaataccttggcggcatccggaagccccctggcggtgagagcagcatcgcgctgatctgattgttctgggctgctctaattcgcactggctagcagcgccccctcgccagtcgtcactgaagcagcacacagagtgcatttcttgacctcttggttctcgaatcgtgttggggatcataatttatgttgggtgtcgttagtctaatataatttggagtcagcagaatctgatccggttacctccgtatcatctgatacgcgggtgtgtgatctcatctgtgatccatgctacattattatgttatgccatccgaactgagaacttatgcaacaattatttttggactcgtttctgggactatggcatcatataggatgttttgcttgtgctgtcgatgattccaaaggtacatagttttgaaaagaagacatgctacattattatgctatgtattagtacaaccgaactgagaacttatgcagtaattattttggactcgtttctgggattatggcatcatagatatgatattttgttttgtgctgttggtgatgcaaaggctccaatactttggaaacgaagactgtatattcagagtttgcaaaagtgtggaccagattttgtgtaccatctggtaacaaaacctctggaaatgaagaacatccagattgttttctgtagctgtgttggcagtagatgtcaacgtcaagaataaaatagacccgcgccttgaccattgggccacggagtcgttgttgttaccgctattgttaaaacttaaatataacatcgatatcactgcgaacgttcggttaacatttaacaactttgcatgacgtattcctgtattagaaaaaccacggacagggcacacgcattggctttcagccttcgtccacagacaactcttcctcagacgacgaccacactgcaaccattgacacacacaacgtccggaagcgtgtcacgtccacaacagaaggccgcatcagtcactcatcactcatcaggggtcctccgcaacagaaggctgcacgaaccgtctccagtaccagtggcgctcccagatggcgcccatggcctcgagcggtacccccttggtctccggcaggaacgccacgacgaaggcggtcatgacggctacccaggccgcgtagtagatgaaggtggcgtacttgagcgtgcacagcatggagaggaacgtctgcgtgagcaggaacgtggcgcccaggttgacggccacgctgacgccctgccccgccgaccggatctccacggggaatatctcgccagggatcacccaggtcagcgggccccacgaccagccgaacgccgccgagaagacgcacgtcagcgccagcaccgcgagggagtagggcctggccatcgcggacccgccgtcggccccgatctgggaccccatgatccacgcgaccgcgacctggcagatgatcatgacgaagccgccggtgaggaacagcggccgccggccgtaccggtcgaccgtgacgatggacaggagcgtggaggcgaggttgacggcgccgaggatgacggcgcccatgagcgcggcgttgctgccgaacccggccgtctggaacagcacgggcgagaagaaggcgatgacgatgacccccgtgagctgctggaacagcgggaccgccacggccacggccaggtggtgccggtgctcccgccggaggatcctgcggaacgcgccctgctcgtgcgcgcgcgcggcctccacggcgcgggccacgtcctccagctccgcgtccacgtccgccttggcgcccctgacgcgccgcagcgcggcgcgggcctcctccgcgcgcccgcgcacgaggaggctgctgggcgtgtccgggatgagcagcgcccccgcgaggatgacggcggcgggcgccgcggccaggcccagcgagaggcgccacccccacgccgggatgcgcgaggtgccgtagttcaccaggttcgccgccaggttgccgatgctgaggaagagctggaaccccgtcgtgaaggcgccccgccacttggccggcgccgtctccgccaggtacaccggcgccgcctgccatgcattcgtcactcatgcgtgtgaagtaaaacacttgggatcctggatgttagaaaggacagccaactaccccaagaaagccggcaggatgacgccatcttaggcatcgctatcccgtcaggtcggcgcttgagagcgatgtgctggctcaaaaccaaccactagtcctagctacctcgagagacagtgagcaaacgaagcaggagtgtcgtaggacggtgccgtcgcaacaacctttcccatctcctctgcttcttttgggcatggcaattggccagctactctcctgtctcctttggtggaggtgcaaagcacctatcgcctcatctcttgtgcaggaattcattttaccagagagtaatcagagtatcctattcctagtatcctagcaaacaattggctatatgcttgttttgtgaaacataatatattcggcgtccactgagaagaaacgccaatatgccgaaagccaaaaccacaatgagatattttttttaccatttttctgcagcagcattgcttagttttctaattgaattcctgtcaagaagaacgctaactacttgtacgcgctgataatgttatagacagctgggtaggtttgtagtgtagcttcatctatccatctacctaactataagctgacaacaacaacacatcaagataataaaaagtacacttttattagggcatgtgtaggggtattagtttcatggtttgtccatgcacactaattgaagggcacacacacagtgtgggtcacctatcatctaaagcttgcttaagtgttagtagtatatatttacactacattatattactatgggattctgtccaatatagccccaatgggtacccagccagattacggtagtcgttcatcagcctcagatagtgaccgcacaagctgaactatcgttccattactagaatattttgagttattactataatttaaacttataaccataaggcaatccatcaaaagttagtgagggattagaaacactaaagtacatacaggattagtaatgagagaatctaaatcattagacattttttctcataaaaggaatcataataaggacttgaaattggtggaaatgatcaagcagtactttttttagattccggtctaaagtatgttcccattcacttgttaaggaaatggctatcaa

SEQ ID NO: 216334 - DNA, 3540 bp, Zea Mays
atggacttgtttgcaatttcaccgcggttctattacacgcaaagacctcctggccgaccaatcgtggatgaacgacccagattgaataaccgaaccaattcaaatgctttgctaaatgtttacctctccaatgacgacattgccaagctcctagtcccactgctgaaacttcggcaggcatgttgccacccacaagtggggagttctggtctctgctccctgcagcataaccctttgtcaatggatgaaattttacaggttcttattggtaaagcaaaaattgaaggagaggaagagctcaggaaaattgtagttgccctgaatggtcttgctggattagctgttattgaacaaaggaaccaagaagccatttctttatacaaagaagcactagcattggctcatgaaaatattaatgatttccgtgttgaccctctgttgaatcttcatatcaactacaatcttgcagaactgcttagaattagttctgagtatttacaagaatgcccattaaaaaatccggcttttgaagttgcaatcagccgaaaaagaaaggaaatagatactgttgagacaaatgtacttagtgtaaaacgaaataaaatatgtgaaaacagtgttttgagtttgacagctaatgggctagaaatatctgaagataaaaacactattggacaaacatgcatgactagagatgtggatgtggagaatgtcactgggtgccactcatcatttgaatgttttgctgatgactgcttgaggaagacttgcaatacaatcacagaaaaatacctgtcaacttttacttcaaggctggtagtagcgcagaaggattttaatgcatcattcacagaggtcttgaatatcactaaagagctacagagtgagtatatgaattggtggctgtatgctttggactgcattgaagagaacaacatttctgctgacgatctgatcaagaagattgataattcttctagtaagagcaccactggtttgggttcatggggaatatcttccagggttaaaagtattgctggcttaaaatatgcaattcaagctgatattgattctctacaaagttcgaggcaacatcttatggatagacttctggaagttgacaaaacaatggctaacccaagggatgaggacattgagggccagcgatattgtccaaactgctatgatggcactggttctctatgtatccagtgtgagctagatgaactctttcagaggtatgaatcacgcctgtttcttgttaagaaatcgaacaatggttctgtcattgattcagtagaagaagcacatgatctactgaggcgaaaatatgagctcaatcacttcttccgtaatagaaaatccaaggagggacctgaacctgactatgacaataacaaccctaggtcagctcgagaaaacatacaggtgtgttacatacttccattcctgcatgtaatataagtcaatagtcgtcacttgtttttcctcacctttttcaaggataacattacaccttctacttgtcttttaccatgtgtcttctatgatctgcattgatcagtccatctgcctttgtgttctgtgaaaggtgttacaaggaccatcatcacttaaagtttcttcacctggcattcaaagggatattgatccatttatgcgttgtctatttgttatatatatatttttaatactgccgatgtttacaggtctataggcatccttctagaaccgagactgcattaagggttatctggaatcactcaaagacagtattgggaaagcaatattccacaatggctaaaaaacatttacttctttttgaggctatgcgcaaggaatttcctcaagcaaggtttctgtcaattgctcaaacacaattattgcgtgctcatgatgagatcaagatgtccatctcaagacttcagctcaaagagaaagaggatgatcctagcgctgccaatattgtaactagagaggaactcataccatataatgttcagtttacaagtgaaaaattcatgtcactctcatctttagcccgtgtaagaggtcaactccggtacttaaaggttgtctttacatgacagaacaaactgcagcacaattcggaaagcgtaaacaatggattatgtgccccacatgccgccagcgaacagatattgagaacattgcttttgtagttgagaaaccttgggacaaacatgaaaagagcattgaagatttggctgaaagcactatttctgtccaaggttcatatggaacaaagtttgaagctgtcacaagaagaatcttgagaatcacttcaactgatggaacagctaaagttcttgttttctcaagttggaatgatgtactggacgtactagagcactcccttgctgctaacaacatttcatatgttcggatgaaaggaggaagaaaatcacaggcagcactctcccaattcaagggtcaggagagcaatataaatgtagataaagtgaacagggcagcctgcaaaatgcagcctgttcaagtacttctgatgcttatacagcatggagcaaacggtcttaatctactagaggcacagcatgttattctagtggagccattactaaatcctgctgctgaggcacaagctatcagcaggatccatagagttggacaagacaaaagcacatttgttcaccgttttatagtgaagaaaacaatagaagagagcatctacaaattgaacaggagcagagctgtctgctctactataaaccgtaaatccaaaaacttcaaagatgagcctgttttgacgctgaaggatgtggagtcgctattcccgatggcaggacctgatgaacccctagaacaggcagatcaaaattacggcgatagcttgaggagtttgcctccatctgttgccgctgggttagctgctgaaagaaggcgactaatggagcaataagttaatggagtttgcctccatctgttgccgctgggttagctgctgaaagaaggcgactaatcaagggacctccatccatcgttgtggcagttgtgctaattttacttgatcagaatttctcttcgcagcacagtaacgacagtaggagaatgatgctccttagttatgaagcacccccatcatgagaatcaggctatttacgttgtaactttaggattttttttttatgtacctgtaggccttttagactcttgtacataagcttctagttttagttcgtttatacggcccatcctgtagttttgatgtagcagctctcagctctgccactgctacaccaacttatggcatgtataagtgtactaatacatggtcatcagcatgatacattctttagatgcttggtcaattttttagatgcttggtggtggcagagccagtagtcattatggaagaaaattgtcggttgtcctatgctgtctgcagatgtgccggatggtcagtcaggaagatgcagcaaggctttctgatagcttctgcatccgggcccctgctgtgccaggctcgacggcgggcgtcggcgcacgacatccgagtgc

SEQ ID NO: 216335 - DNA, 3527 bp, Zea Mays
taaggacatgagtttaattactttaaacgtgaaagggatggtgggtttattatcactttctccatggacttgtttgcaatttcaccgcggttctattacacgcaaagacctcctggccgaccaatcgtggatgaacgacccagattgaataaccgaaccaattcaaatgctttgctaaatgtttacctctccaatgacgacattgccaagctcctagtcccactgctgaaacttcggcaggcatgttgccacccacaagtggggagttctggtctctgctccctgcagcataaccctttgtcaatggatgaaattttacaggttcttattggtaaagcaaaaattgaaggagaggaagagctcaggaaaattgtagttgccctgaatggtcttgctggattagctgttattgaacaaaggaaccaagaagccatttctttatacaaagaagcactagcattggctcatgaaaatattaatgatttccgtgttgaccctctgttgaatcttcatatcaactacaatcttgcagaactgcttagaattagttctgagtatttacaagaatgcccattaaaaaatccggcttttgaagttgcaatcagccgaaaaagaaaggaaatagatactgttgagacaaatgtacttagtgtaaaacgaaataaaatatgtgaaaacagtgttttgagtttgacagctaatgggctagaaatatctgaagataaaaacactattggacaaacatgcatgactagagatgtggatgtggagaatgtcactgggtgccactcatcatttgaatgttttgctgatgactgcttgaggaagacttgcaatacaatcacagaaaaatacctgtcaacttttacttcaaggctggtagtagcgcagaaggattttaatgcatcattcacagaggtcttgaatatcactaaagagctacagagtgagtatatgaattggtggctgtatgctttggactgcattgaagagaacaacatttctgctgacgatctgatcaagaagattgataattcttctagtaagagcaccactggtttgggttcatggggaatatcttccagggttaaaagtattgctggcttaaaatatgcaattcaagctgatattgattctctacaaagttcgaggcaacatcttatggatagacttctggaagttgacaaaacaatggctaacccaagggatgaggacattgagggccagcgatattgtccaaactgctatgatggcactggttctctatgtatccagtgtgagctagatgaactctttcagaggtatgaatcacgcctgtttcttgttaagaaatcgaacaatggttctgtcattgattcagtagaagaagcacatgatctactgaggcgaaaatatgagctcaatcacttcttccgtaatagaaaatccaaggagggacctgaacctgactatgacaataacaaccctaggtcagctcgagaaaacatacaggtctataggcatccttctagaaccgagactgcattaagggttatctggaatcactcaaagacagtattgggaaagcaatattccacaatggctaaaaaacatttacttctttttgaggctatgcgcaaggaatttcctcaagcaaggtttctgtcaattgctcaaacacaattattgcgtgctcatgatgagatcaagatgtccatctcaagacttcagctcaaagagaaagaggatgatcctagcgctgccaatattgtaactagagaggaactcataccatataatgttcagtttacaagtgaaaaattcatgtcactctcatctttagcccgtgtaagaggtcaactccggtacttaaagggattggcggtatgtaacaagaaaacacataaccagcatgatgaatcactggctaaagcaggcgatgctgttgatacagctacttcatgttcagccacagggcaaactgtttctgattttcgtaatgaaccatgcccgatatgccaggagaaggtttttgaccagaaaatggttttccagtgtggtcattttgtatgctgcaagtgttgtctttacatgacagaacaaactgcagcacaattcggaaagcgtaaacaatggattatgtgccccacatgccgccagcgaacagatattgagaacattgcttttgtagttgagaaaccttgggacaaacatgaaaagagcattgaagatttggctgaaagcactatttctgtccaaggttcatatggaacaaagtttgaagctgtcacaagaagaatcttgagaatcacttcaactgatggaacagctaaagttcttgttttctcaagttggaatgatgtactggacgtactagagcactcccttgctgctaacaacatttcatatgttcggatgaaaggaggaagaaaatcacaggcagcactctcccaattcaagggtcaggagagcaatataaatgtagataaagtgaacagggcagcctgcaaaatgcagcctgttcaagtacttctgatgcttatacagcatggagcaaacggtcttaatctactagaggcacagcatgttattctagtggagccattactaaatcctgctgctgaggcacaagctatcagcaggatccatagagttggacaagacaaaagcacatttgttcaccgttttatagtgaagaaaacaatagaagagagcatctacaaattgaacaggagcagagctgtctgctctactataaaccgtaaatccaaaaacttcaaagatgagcctgttttgacgctgaaggatgtggagtcgctattcccgatggcaggacctgatgaacccctagaacaggcagatcaaaattacggcgatagcttgaggagtttgcctccatctgttgccgctgggttagctgctgaaagaaggcgactaatggagcaataagttaatggagtttgcctccatctgttgccgctgggttagctgctgaaagaaggcgactaatcaagggacctccatccatcgttgtggcagttgtgctaattttacttgatcagaatttctcttcgcagcacagtaacgacagtaggagaatgatgctccttagttatgaagcacccccatcatgagaatcaggctatttacgttgtaactttaggattttttttttatgtacctgtaggccttttagactcttgtacataagcttctagttttagttcgtttatacggcccatcctgtagttttgatgtagcagctctcagctctgccactgctacaccaacttatggcatgtataagtgtactaatacatggtcatcagcatgatacattctttagatgcttggtcaattttttagatgcttggtggtggcagagccagtagtcattatggaagaaaattgtcggttgtcctatgctgtctgcagatgtgccggatggtcagtcaggaagatgcagcaaggctttctgatagcttctgcatccgggcccctgctgtgccaggctcgacggcgggcgtcggcgcacgacatccgagtgc

SEQ ID NO: 216336 - DNA, 5548 bp, Zea Mays
caccagtctccctcgcatcgcgtcgtcaccagcctatgctcgatgctcccatagtcccatctcgtgatccttccgctcctatcaaagttcgaggtttctcagaacttgcactcccgattccgcgccggcgtccaaagccccaccgaatggtccaccacaccgtctgaatcatcacatatggggaggaagaaatcgagaccggttcgagctgcgggcgccgcctttgcggcggctgaggccgacccctgtgcgccgagccctagcggcagcacgaagcgtaggaccaagggcgaggcgaggagagacgtctgcgtggaggtggataggagcacgtggggtcacgccgacatcgagcaccgcgacgtcgccgaggtggtcctccgcgacgtgagcgtctacggcgacggggatggggaaggtgcgttggaggaggcattcggggcgtcgacgttctcgttgcgtctgcgggtgcgcgacgcgccggaggaggggttcaggatgggccagtggcccgttgtagagtcggattgcgtgctcctggagtatgtcgtccacgggggccgtgaagggaagcacgcagaatatgtggtctcaggatgttttgatggtcctgatgaaggtgtatcgggtctcgtccatttggtgagcttgagattcatcacgctccgggtccaatcgttcagagcatttcagcatatgggtgaggtgagagttgagtcgtttagggttagagtggaggtgatggaacaggctttcagtgcgtgcggttcgctgctggaggtggctagacatccatggaggaagagtttgatgaatgtgattgcttggctgcgtcctgaggtcacgacatcagctgcgatatatgggttggataaccttggtgtgccaatggatgatggtggtaatgctgatttggtacctaagagtgattcacagtttgatcttgctgctttttatgaggccattaagccttcggctaatgcaggacagttggaaagggaccttcctgatttaattcctcagctcagaccatatcaacttcgcgcagcgcattggatggttcaacgtgaaaacggaaatacgctccatcaagaatacgctaattctgcaccatattgtgttccttttgattttgttcacaagaattccaggatgttctacaatccgttcaacggaaatatttcatcgcaaccagagccttctccaccttacatctctgggggcattttggctgatgaaatgggcttggggaaaactgtcgagcttttagcgtgcatttttgctcatcgtagaccaatttcattagacttttctgtcttccagaacaaaaccgaaatggatcaaattaagaggcagaaagtagaaagggttgagtgcatctgtggtgctgcgagtgaaagttctgcatacacgggtctatgggtccaatgtgacatttgtgatgcttggcaacatgctgattgtgttggttactcacccaagaggaatatactttttgctgataccactgaagatgtagtatcaacaaacaaaaaaagcaccatgaagtctggatttagaaggaaaaagaaacccaggtgttctattgttgagacagaagacaaatacatttgtgcactgtgcttggagcttattgaagcaactcaaactaatatactcagccatgctacattgatagtatgtcccgcaccaatattggcacaatggcactctgaaattacccgacacacaaggccaggatctctgaaagtttgcatttatgaaggtgcaaggaacttggatccttctaccatccaaaaaaatgatatgactgaaataattactgctgatgttgtcttgacaacatatgatgtcttgaaagaagatctatcacatgattttgatcgtcatgatggcgatcgccgtttcttgagatttcaaaagagatatcccgtcattccaactgtcctgacaaggatccactggtggcgactttgtttggatgaagctcagatggtagagtcaggcaggacttctgtgactgagatggcattgaggctaaatgctcaacaccgttggtgtatcacaggaaccccgatacaacgcaagcttgatgatctctttgggcttctacgttttcttaggacaaacccatttgacacatatagatggtgggtggacattattagagatccatatgagattcaaatgctttgctaaatgtttacctctccaatgacgacattgccaagctcctagtcccactgctgaaacttcggcaggcatgttgccacccacaagtggggagttctggtctctgctccctgcagcataaccctttgtcaatggatgaaattttacaggttcttattggtaaagcaaaaattgaaggagaggaagagctcaggaaaattgtagttgccctgaatggtcttgctggattagctgttattgaacaaaggaaccaagaagccatttctttatacaaagaagcactagcattggctcatgaaaatattaatgatttccgtgttgaccctctgttgaatcttcatatcaactacaatcttgcagaactgcttagaattagttctgagtatttacaagaatgcccattaaaaaatccggcttttgaagttgcaatcagccgaaaaagaaaggaaatagatactgttgagacaaatgtacttagtgtaaaacgaaataaaatatgtgaaaacagtgttttgagtttgacagctaatgggctagaaatatctgaagataaaaacactattggacaaacatgcatgactagagatgtggatgtggagaatgtcactgggtgccactcatcatttgaatgttttgctgatgactgcttgaggaagacttgcaatacaatcacagaaaaatacctgtcaacttttacttcaaggctggtagtagcgcagaaggattttaatgcatcattcacagaggtcttgaatatcactaaagagctacagagtgagtatatgaattggtggctgtatgctttggactgcattgaagagaacaacatttctgctgacgatctgatcaagaagattgataattcttctagtaagagcaccactggtttgggttcatggggaatatcttccagggttaaaagtattgctggcttaaaatatgcaattcaagctgatattgattctctacaaagttcgaggcaacatcttatggatagacttctggaagttgacaaaacaatggctaacccaagggatgaggacattgagggccagcgatattgtccaaactgctatgatggcactggttctctatgtatccagtgtgagctagatgaactctttcagaggtatgaatcacgcctgtttcttgttaagaaatcgaacaatggttctgtcattgattcagtagaagaagcacatgatctactgaggcgaaaatatgagctcaatcacttcttccgtaatagaaaatccaaggagggacctgaacctgactatgacaataacaaccctaggtcagctcgagaaaacatacaggtctataggcatccttctagaaccgagactgcattaagggttatctggaatcactcaaagacagtattgggaaagcaatattccacaatggctaaaaaacatttacttctttttgaggctatgcgcaaggaatttcctcaagcaaggtttctgtcaattgctcaaacacaattattgcgtgctcatgatgagatcaagatgtccatctcaagacttcagctcaaagagaaagaggatgatcctagcgctgccaatattgtaactagagaggaactcataccatataatgttcagtttacaagtgaaaaattcatgtcactctcatctttagcccgtgtaagaggtcaactccggtacttaaagggattggcggtatgtaacaagaaaacacataaccagcatgatgaatcactggctaaagcaggcgatgctgttgatacagctacttcatgttcagccacagggcaaactgtttctgattttcgtaatgaaccatgcccgatatgccaggagaaggtttttgaccagaaaatggttttccagtgtggtcattttgtatgctgcaagtgttgtctttacatgacagaacaaactgcagcacaattcggaaagcgtaaacaatggattatgtgccccacatgccgccagcgaacagatattgagaacattgcttttgtagttgagaaaccttgggacaaacatgaaaagagcattgaagatttggctgaaagcactatttctgtccaaggttcatatggaacaaagtttgaagctgtcacaagaagaatcttgagaatcacttcaactgatggaacagctaaagttcttgttttctcaagttggaatgatgtactggacgtactagagcactcccttgctgctaacaacatttcatatgttcggatgaaaggaggaagaaaatcacaggcagcactctcccaattcaagggtcaggagagcaatataaatgtagataaagtgaacagggcagcctgcaaaatgcagcctgttcaagtacttctgatgcttatacagcatggagcaaacggtcttaatctactagaggcacagcatgttattctagtggagccattactaaatcctgctgctgaggcacaagctatcagcaggatccatagagttggacaagacaaaagcacatttgttcaccgttttatagtgaagaaaacaatagaagagagcatctacaaattgaacaggagcagagctgtctgctctactataaaccgtaaatccaaaaacttcaaagatgagcctgttttgacgctgaaggatgtggagtcgctattcccgatggcaggacctgatgaacccctagaacaggcagatcaaaattacggcgatagcttgaggagtttgcctccatctgttgccgctgggttagctgctgaaagaaggcgactaatggagcaataagttaatggagtttgcctccatctgttgccgctgggttagctgctgaaagaaggcgactaatcaagggacctccatccatcgttgtggcagttgtgctaattttacttgatcagaatttctcttcgcagcacagtaacgacagtaggagaatgatgctccttagttatgaagcacccccatcatgagaatcaggctatttacgttgtaactttaggattttttttttatgtacctgtaggccttttagactcttgtacataagcttctagttttagttcgtttatacggcccatcctgtagttttgatgtagcagctctcagctctgccactgctacaccaacttatggcatgtataagtgtactaatacatggtcatcagcatgatacattctttagatgcttggtcaattttttagatgcttggtggtggcagagccagtagtcattatggaagaaaattgtcggttgtcctatgctgtctgcagatgtgccggatggtcagtcaggaagatgcagcaaggctttctgatagcttctgcatccgggcccctgctgtgccaggctcgacggcgggcgtcggcgcacgacatccgagtgc

SEQ ID NO: 216337 - DNA, 5796 bp, Zea Mays
aagccaccagtctccctcgcatcgcgtcgtcaccagcctatgctcgatgctcccatagtcccatctcgtgatccttccgctcctatcaaagttcgaggtttctcagaacttgcactcccgattccgcgccggcgtccaaagccccaccgaatggtccaccacaccgtctgaatcatcacatatggggaggaagaaatcgagaccggttcgagctgcgggcgccgcctttgcggcggctgaggccgacccctgtgcgccgagccctagcggcagcacgaagcgtaggaccaagggcgaggcgaggagagacgtctgcgtggaggtggataggagcacgtggggtcacgccgacatcgagcaccgcgacgtcgccgaggtggtcctccgcgacgtgagcgtctacggcgacggggatggggaaggtgcgttggaggaggcattcggggcgtcgacgttctcgttgcgtctgcgggtgcgcgacgcgccggaggaggggttcaggatgggccagtggcccgttgtagagtcggattgcgtgctcctggagtatgtcgtccacgggggccgtgaagggaagcacgcagaatatgtggtctcaggatgttttgatggtcctgatgaaggtgtatcgggtctcgtccatttggtgagcttgagattcatcacgctccgggtccaatcgttcagagcatttcagcatatgggtgaggtgagagttgagtcgtttagggttagagtggaggtgatggaacaggctttcagtgcgtgcggttcgctgctggaggtggctagacatccatggaggaagagtttgatgaatgtgattgcttggctgcgtcctgaggtcacgacatcagctgcgatatatgggttggataaccttggtgtgccaatggatgatggtggtaatgctgatttggtacctaagagtgattcacagtttgatcttgctgctttttatgaggccattaagccttcggctaatgcaggacagttggaaagggaccttcctgatttaattcctcagctcagaccatatcaacttcgcgcagcgcattggatggttcaacgtgaaaacggaaatacgctccatcaagaatacgctaattctgcaccatattgtgttccttttgattttgttcacaagaattccaggatgttctacaatccgttcaacggaaatatttcatcgcaaccagagccttctccaccttacatctctgggggcattttggctgatgaaatgggcttggggaaaactgtcgagcttttagcgtgcatttttgctcatcgtagaccaatttcattagacttttctgtcttccagaacaaaaccgaaatggatcaaattaagaggcagaaagtagaaagggttgagtgcatctgtggtgctgcgagtgaaagttctgcatacacgggtctatgggtccaatgtgacatttgtgatgcttggcaacatgctgattgtgttggttactcacccaagaggaatatactttttgctgataccactgaagatgtagtatcaacaaacaaaaaaagcaccatgaagtctggatttagaaggaaaaagaaacccaggtgttctattgttgagacagaagacaaatacatttgtgcactgtgcttggagcttattgaagcaactcaaactaatatactcagccatgctacattgatagtatgtcccgcaccaatattggcacaatggcactctgaaattacccgacacacaaggccaggatctctgaaagtttgcatttatgaaggtgcaaggaacttggatccttctaccatccaaaaaaatgatatgactgaaataattactgctgatgttgtcttgacaacatatgatgtcttgaaagaagatctatcacatgattttgatcgtcatgatggcgatcgccgtttcttgagatttcaaaagagatatcccgtcattccaactgtcctgacaaggatccactggtggcgactttgtttggatgaagctcagatggtagagtcaggcaggacttctgtgactgagatggcattgaggctaaatgctcaacaccgttggtgtatcacaggaaccccgatacaacgcaagcttgatgatctctttgggcttctacgttttcttaggacaaacccatttgacacatatagatggtgggtggacattattagagatccatatgagagggggaacaaagtagcaatgaattatgcacacaatttctttagggaaatcatgtggcgttcctccaaaattcatgtctcggctgaactgcagctgcctccacaagaagagtgtttttcatggctcatcttttcttccattgaagagtatttctataagaagcaacatgccacctgcatggaccatgcacatcaaattattagaagtttgagaaatgacaccaatagaagagaatcaatttctgattcaaatgctttgctaaatgtttacctctccaatgacgacattgccaagctcctagtcccactgctgaaacttcggcaggcatgttgccacccacaagtggggagttctggtctctgctccctgcagcataaccctttgtcaatggatgaaattttacaggttcttattggtaaagcaaaaattgaaggagaggaagagctcaggaaaattgtagttgccctgaatggtcttgctggattagctgttattgaacaaaggaaccaagaagccatttctttatacaaagaagcactagcattggctcatgaaaatattaatgatttccgtgttgaccctctgttgaatcttcatatcaactacaatcttgcagaactgcttagaattagttctgagtatttacaagaatgcccattaaaaaatccggcttttgaagttgcaatcagccgaaaaagaaaggaaatagatactgttgagacaaatgtacttagtgtaaaacgaaataaaatatgtgaaaacagtgttttgagtttgacagctaatgggctagaaatatctgaagataaaaacactattggacaaacatgcatgactagagatgtggatgtggagaatgtcactgggtgccactcatcatttgaatgttttgctgatgactgcttgaggaagacttgcaatacaatcacagaaaaatacctgtcaacttttacttcaaggctggtagtagcgcagaaggattttaatgcatcattcacagaggtcttgaatatcactaaagagctacagagtgagtatatgaattggtggctgtatgctttggactgcattgaagagaacaacatttctgctgacgatctgatcaagaagattgataattcttctagtaagagcaccactggtttgggttcatggggaatatcttccagggttaaaagtattgctggcttaaaatatgcaattcaagctgatattgattctctacaaagttcgaggcaacatcttatggatagacttctggaagttgacaaaacaatggctaacccaagggatgaggacattgagggccagcgatattgtccaaactgctatgatggcactggttctctatgtatccagtgtgagctagatgaactctttcagaggtatgaatcacgcctgtttcttgttaagaaatcgaacaatggttctgtcattgattcagtagaagaagcacatgatctactgaggcgaaaatatgagctcaatcacttcttccgtaatagaaaatccaaggagggacctgaacctgactatgacaataacaaccctaggtcagctcgagaaaacatacaggtctataggcatccttctagaaccgagactgcattaagggttatctggaatcactcaaagacagtattgggaaagcaatattccacaatggctaaaaaacatttacttctttttgaggctatgcgcaaggaatttcctcaagcaaggtttctgtcaattgctcaaacacaattattgcgtgctcatgatgagatcaagatgtccatctcaagacttcagctcaaagagaaagaggatgatcctagcgctgccaatattgtaactagagaggaactcataccatataatgttcagtttacaagtgaaaaattcatgtcactctcatctttagcccgtgtaagaggtcaactccggtacttaaagggattggcggtatgtaacaagaaaacacataaccagcatgatgaatcactggctaaagcaggcgatgctgttgatacagctacttcatgttcagccacagggcaaactgtttctgattttcgtaatgaaccatgcccgatatgccaggagaaggtttttgaccagaaaatggttttccagtgtggtcattttgtatgctgcaagtgttgtctttacatgacagaacaaactgcagcacaattcggaaagcgtaaacaatggattatgtgccccacatgccgccagcgaacagatattgagaacattgcttttgtagttgagaaaccttgggacaaacatgaaaagagcattgaagatttggctgaaagcactatttctgtccaaggttcatatggaacaaagtttgaagctgtcacaagaagaatcttgagaatcacttcaactgatggaacagctaaagttcttgttttctcaagttggaatgatgtactggacgtactagagcactcccttgctgctaacaacatttcatatgttcggatgaaaggaggaagaaaatcacaggcagcactctcccaattcaagggtcaggagagcaatataaatgtagataaagtgaacagggcagcctgcaaaatgcagcctgttcaagtacttctgatgcttatacagcatggagcaaacggtcttaatctactagaggcacagcatgttattctagtggagccattactaaatcctgctgctgaggcacaagctatcagcaggatccatagagttggacaagacaaaagcacatttgttcaccgttttatagtgaagaaaacaatagaagagagcatctacaaattgaacaggagcagagctgtctgctctactataaaccgtaaatccaaaaacttcaaagatgagcctgttttgacgctgaaggatgtggagtcgctattcccgatggcaggacctgatgaacccctagaacaggcagatcaaaattacggcgatagcttgaggagtttgcctccatctgttgccgctgggttagctgctgaaagaaggcgactaatggagcaataagttaatggagtttgcctccatctgttgccgctgggttagctgctgaaagaaggcgactaatcaagggacctccatccatcgttgtggcagttgtgctaattttacttgatcagaatttctcttcgcagcacagtaacgacagtaggagaatgatgctccttagttatgaagcacccccatcatgagaatcaggctatttacgttgtaactttaggattttttttttatgtacctgtaggccttttagactcttgtacataagcttctagttttagttcgtttatacggcccatcctgtagttttgatgtagcagctctcagctctgccactgctacaccaacttatggcatgtataagtgtactaatacatggtcatcagcatgatacattctttagatgcttggtcaattttttagatgcttggtggtggcagagccagtagtcattatggaagaaaattgtcggttgtcctatgctgtctgcagatgtgccggatggtcagtcaggaagatgcagcaaggctttctgatagcttctgcatccgggcccctgctgtgccaggctcgacggcgggcgtcggcgcacgacatccgagtgc

SEQ ID NO: 216338 - DNA, 5624 bp, Zea Mays
aagccaccagtctccctcgcatcgcgtcgtcaccagcctatgctcgatgctcccatagtcccatctcgtgatccttccgctcctatcaaagttcgaggtttctcagaacttgcactcccgattccgcgccggcgtccaaagccccaccgaatggtccaccacaccgtctgaatcatcacatatggggaggaagaaatcgagaccggttcgagctgcgggcgccgcctttgcggcggctgaggccgacccctgtgcgccgagccctagcggcagcacgaagcgtaggaccaagggcgaggcgaggagagacgtctgcgtggaggtggataggagcacgtggggtcacgccgacatcgagcaccgcgacgtcgccgaggtggtcctccgcgacgtgagcgtctacggcgacggggatggggaaggtgcgttggaggaggcattcggggcgtcgacgttctcgttgcgtctgcgggtgcgcgacgcgccggaggaggggttcaggatgggccagtggcccgttgtagagtcggattgcgtgctcctggagtatgtcgtccacgggggccgtgaagggaagcacgcagaatatgtggtctcaggatgttttgatggtcctgatgaaggtgtatcgggtctcgtccatttggtgagcttgagattcatcacgctccgggtccaatcgttcagagcatttcagcatatgggtgaggtgagagttgagtcgtttagggttagagtggaggtgatggaacaggctttcagtgcgtgcggttcgctgctggaggtggctagacatccatggaggaagagtttgatgaatgtgattgcttggctgcgtcctgaggtcacgacatcagctgcgatatatgggttggataaccttggtgtgccaatggatgatggtggtaatgctgatttggtacctaagagtgattcacagtttgatcttgctgctttttatgaggccattaagccttcggctaatgcaggacagttggaaagggaccttcctgatttaattcctcagctcagaccatatcaacttcgcgcagcgcattggatggttcaacgtgaaaacggaaatacgctccatcaagaatacgctaattctgcaccatattgtgttccttttgattttgttcacaagaattccaggatgttctacaatccgttcaacggaaatatttcatcgcaaccagagccttctccaccttacatctctgggggcattttggctgatgaaatgggcttggggaaaactgtcgagcttttagcgtgcatttttgctcatcgtagaccaatttcattagacttttctgtcttccagaacaaaaccgaaatggatcaaattaagaggcagaaagtagaaagggttgagtgcatctgtggtgctgcgagtgaaagttctgcatacacgggtctatgggtccaatgtgacatttgtgatgcttggcaacatgctgattgtgttggttactcacccaagaggaatatactttttgctgataccactgaagatgtagtatcaacaaacaaaaaaagcaccatgaagtctggatttagaaggaaaaagaaacccaggtgttctattgttgagacagaagacaaatacatttgtgcactgtgcttggagcttattgaagcaactcaaactaatatactcagccatgctacattgatagtatgtcccgcaccaatattggcacaatggcactctgaaattacccgacacacaaggccaggatctctgaaagtttgcatttatgaaggtgcaaggaacttggatccttctaccatccaaaaaaatgatatgactgaaataattactgctgatgttgtcttgacaacatatgatgtcttgaaagaagatctatcacatgattttgatcgtcatgatggcgatcgccgtttcttgagatttcaaaagagatatcccgtcattccaactgtcctgacaaggatccactggtggcgactttgtttggatgaagctcagatggtagagtcaggcaggacttctgtgactgagatggcattgaggctaaatgctcaacaccgttggtgtatcacaggaaccccgatacaacgcaagcttgatgatctctttgggcttctacgttttcttaggacaaacccatttgacacatatagatggtgggtggacattattagagatccatatgagagggggaacaaagtagcaatgaattatgcacacaatttctttagggaaatcatgtggcgttcctccaaaattcatgtctcggctgaactgcagctgcctccacaagaagagtgtttttcatggctcatcttttcttccattgaagagtatttctataagaagcaacatgccacctgcatggaccatgcacatcaaattattagaagtttgagaaatgacaccaatagaagagaatcaatttctgattcaaatgctttgctaaatgtttacctctccaatgacgacattgccaagctcctagtcccactgctgaaacttcggcaggcatgttgccacccacaagtggggagttctggtctctgctccctgcagcataaccctttgtcaatggatgaaattttacaggttcttattggtaaagcaaaaattgaaggagaggaagagctcaggaaaattgtagttgccctgaatggtcttgctggattagctgttattgaacaaaggaaccaagaagccatttctttatacaaagaagcactagcattggctcatgaaaatattaatgatttccgtgttgaccctctgttgaatcttcatatcaactacaatcttgcagaactgcttagaattagttctgagtatttacaagaatgcccattaaaaaatccggcttttgaagttgcaatcagccgaaaaagaaaggaaatagatactgttgagacaaatgtacttagtgtaaaacgaaataaaatatgtgaaaacagtgttttgagtttgacagctaatgggctagaaatatctgaagataaaaacactattggacaaacatgcatgactagagatgtggatgtggagaatgtcactgggtgccactcatcatttgaatgttttgctgatgactgcttgaggaagacttgcaatacaatcacagaaaaatacctgtcaacttttacttcaaggctggtagtagcgcagaaggattttaatgcatcattcacagaggtcttgaatatcactaaagagctacagagtgagtatatgaattggtggctgtatgctttggactgcattgaagagaacaacatttctgctgacgatctgatcaagaagattgataattcttctagtaagagcaccactggtttgggttcatggggaatatcttccaggtctgcagcaaacttgttttaatattctccatgggttaaaagtattgctggcttaaaatatgcaattcaagctgatattgattctctacaaagttcgaggcaacatcttatggatagacttctggaagttgacaaaacaatggctaacccaagggatgaggacattgagggccagcgatattgtccaaactgctatgatggcactggttctctatgtatccagtgtgagctagatgaactctttcagaggtatgaatcacgcctgtttcttgttaagaaatcgaacaatggttctgtcattgattcagtagaagaagcacatgatctactgaggcgaaaatatgagctcaatcacttcttccgtaatagaaaatccaaggagggacctgaacctgactatgacaataacaaccctaggtcagctcgagaaaacatacaggtctataggcatccttctagaaccgagactgcattaagggttatctggaatcactcaaagacagtattgggaaagcaatattccacaatggctaaaaaacatttacttctttttgaggctatgcgcaaggaatttcctcaagcaaggtttctgtcaattgctcaaacacaattattgcgtgctcatgatgagatcaagatgtccatctcaagacttcagctcaaagagaaagaggatgatcctagcgctgccaatattgtaactagagaggaactcataccatataatgttcagtttacaagtgaaaaattcatgtcactctcatctttagcccgtgtaagaggtcaactccggtacttaaaggttgtctttacatgacagaacaaactgcagcacaattcggaaagcgtaaacaatggattatgtgccccacatgccgccagcgaacagatattgagaacattgcttttgtagttgagaaaccttgggacaaacatgaaaagagcattgaagatttggctgaaagcactatttctgtccaaggttcatatggaacaaagtttgaagctgtcacaagaagaatcttgagaatcacttcaactgatggaacagctaaagttcttgttttctcaagttggaatgatgtactggacgtactagagcactcccttgctgctaacaacatttcatatgttcggatgaaaggaggaagaaaatcacaggcagcactctcccaattcaagggtcaggagagcaatataaatgtagataaagtgaacagggcagcctgcaaaatgcagcctgttcaagtacttctgatgcttatacagcatggagcaaacggtcttaatctactagaggcacagcatgttattctagtggagccattactaaatcctgctgctgaggcacaagctatcagcaggatccatagagttggacaagacaaaagcacatttgttcaccgttttatagtgaagaaaacaatagaagagagcatctacaaattgaacaggagcagagctgtctgctctactataaaccgtaaatccaaaaacttcaaagatgagcctgttttgacgctgaaggatgtggagtcgctattcccgatggcaggacctgatgaacccctagaacaggcagatcaaaattacggcgatagcttgaggagtttgcctccatctgttgccgctgggttagctgctgaaagaaggcgactaatggagcaataagttaatggagtttgcctccatctgttgccgctgggttagctgctgaaagaaggcgactaatcaagggacctccatccatcgttgtggcagttgtgctaattttacttgatcagaatttctcttcgcagcacagtaacgacagtaggagaatgatgctccttagttatgaagcacccccatcatgagaatcaggctatttacgttgtaactttaggattttttttttatgtacctgtaggccttttagactcttgtacataagcttctagttttagttcgtttatacggcccatcctgtagttttgatgtagcagctctcagctctgccactgctacaccaacttatggcatgtataagtgtactaatacatggtcatcagcatgatacattctttagatgcttggtcaattttttagatgcttggtggtggcagagccagtagtcattatggaagaaaattgtcggttgtcctatgctgtctgcagatgtgccggatggtcagtcaggaagatgcagcaaggctttctgatagcttctgcatccgggcccctgctgtgccaggctcgacggcgggcgtcggcgcacgacatccgagtgc

SEQ ID NO: 216339 - DNA, 1293 bp, Zea Mays
cgctcctatcaaagttcgaggtttctcagaacttgcactcccgattccgcgccggcgtccaaagccccaccgaatggtccaccacaccgtctgaatcatcacatatggggaggaagaaatcgagaccggttcgagctgcgggcgccgcctttgcggcggctgaggccgacccctgtgcgccgagccctagcggcagcacgaagcgtaggaccaagggcgaggcgaggagagacgtctgcgtggaggtggataggagcacgtggggtcacgccgacatcgagcaccgcgacgtcgccgagtaatgcaggacagttggaaagggaccttcctgatttaattcctcagctcagaccatatcaacttcgcgcagcgcattggatggttcaacgtgaaaacggaaatacgctccatcaagaatacgctaattctgcaccatattgtgttccttttgattttgttcacaagaattccaggatgttctacaatccgttcaacggaaatatttcatcgcaaccagagccttctccaccttacatctctgggggcattttggctgatgaaatgggcttggggaaaactgtcgagcttttagcgtgcatttttgctcatcgtagaccaatttcattagacttttctgtcttccagaacaaaaccgaaatggatcaaattaagaggcagaaagtagaaagggttgagtgcatctgtggtgctgcgagtgaaagttctgcatacacgggtctatgggtccaatgtgacatttgtgatgcttggcaacatgctgattgtgttggttactcacccaagaggaatatactttttgctgataccactgaagatgtagtatcaacaaacaaaaaaagcaccatgaagtctggatttagaaggaaaaagaaacccaggtgttctattgttgagacagaagacaaatacatttgtgcactgtgcttggagcttattgaagcaactcaaactaatatactcagccatgctacattgatagtatgtcccgcaccaatattggcacaatggcactctgaaattacccgacacacaaggccaggatctctgaaagtttgcatttatgaaggtgcaaggaacttggatccttctaccatccaaaaaaatgatatgactgaaataattactgctgatgttgtcttgacaacatatgatgtcttgaaagaagatctatcacatgattttgatcgtcatgatggcgatcgccgtttcttgagatttcaaaagaggcaagtcatgtttagttttcacttttcacaacgaaggttaacatga

SEQ ID NO: 216340 - DNA, 2787 bp, Zea Mays
atgaagatggtaatctcagtcaaagcgcgggatgcatttcgcatctccttcggtccttccccagcccatccggtacggagccaaatctctggccgaacgaaaaagcgcggagatttccagggagaagcagtgttgcagacgcccggattcggggcgcgtcgttcctacatagaccgcgagtcgcctcctgcacctgcgggattcgccgcctgtcccagatccaagaaacgcataacgggcgtggagccagttgggccagggaagatttaaccagtcgggcccggaaggagcctaagggttggatctgatgctaccaggtcgctgagcatcgctactgaagggggcagcttctgattccggcagatggctcctgaaatgatggaggaggggcaatcagcttcctataccgtggatgacgctctcttgtcatcaggttttgggaggttccagatattgattctttcatatgctgggattggcttaattgccgaagcgatggaaatgatgctgctatcatttgttggtccatcagtacagctagaatggaagcttacttctcatcaggaaagcatgattacaagtgttgtttttgttgggatgctgattggagcttactcgtggggtgtggtttcagacaactatggaaggaggcaggtccaatcttttacttatgtcatgtaccattttgcacaaaattatgcaagtcaatttcctttttgctgatgattaacatgaagttaccaagcttgttactgatgtcatttctattgcacagttgcttcttcctacttcctagttatagctgattagtatcaatgtcatgtttgggatcagaatacgccatgtgtaaaaaactcggccggtagggaaaaggccgcccccaaggtattatattaagaagaagctcaatcggagccctgaccgaaaggtcatgaaaactggtccccgtgcaacatgagggttcgccccatataggctagatctttactccctcccaacccctacacgaggatccgacctctataggtcagccccatctcgtgtacatacaaccaggggaacaagctagtgacctttttttaaccttagcctgaaattcgttcccattgggattcgaactcaggacttaaggagtgctactcaaaccagctaacctattggctagaagatgtctctatgattgttcacatgaatgatcatgaattaatcaggaacaaagttcaatacatgttactttcgagaacgagcttcaaatcattctcaaagtttatagtcatgaatcaattgcttgtgtacatcatacaagtcctaacactctgttttatttggattctataggagaggctttctctttacagccattatgacaagtggagctggattttttagcgcttttgctccgaactatctatcattaatttccctgagattcttagttggtattggtttgggaggaggacctgttctgggatcttggttcttggaatttgttcctgctccaactagaggaacttggatggtggtattttctgcattttggactgttggaacaatcttggaggcatctcttgcatggacaattatgcccaagtttggttggaggtggttgttagcattatcagctgttccatcttttctcctgctgctattttatgccattacaccagagtcaccaaggtttctttgcatgaaaggccggactactgaggctgtggatatattggagaaaatggcaagactaaacaatgtacaactaccttctggtaggcttgtttctgacaaaaatattgagctagatgaagtttcaggatcttcagagtccacgacacttctggctggtgccgaagaaagtgacaacctaaatgaggatcagggttctgatttcggaggtattaagtccgtcggcaagctactcgcaccaaaactgatcagagcaaccctgcttctgtggatggccttctttggaaatgcgtttgcctattatggcattgttcttctgacatcagagctcagtaatggaaacaggatatgtgccaaagaggatgttgaatcagttcattcaaccaatgcaagcctatataagaatgttttcatatctagttttgcagagatcccagggtcatttctgtcggccatgatcgtggatagatttggtcggaagcgttccatggcgtcgatgctcttcactagctgcgttttcttactcccactagtgttctcccggacagatatactaaccagaatctccctgtttggtgcccggctctgtatatctgccagcttcaccatcgtatacatatatgctccagagatttacccgaccgcggtgaggacgacgggcatcggcatcgcgagctcagtgggcaggatcgggggcatcctctgcccactcgtcgctgtcgccctggtgcacagctgccagcagacgacggcgatcctcctcttcgagcttgtaatcttcctctccggcctggccgtctcgttcttccccttcgagacgaaggggtgtaggctcaacgacaccgacgtggacatgaactgatccggtggctgggtgtagtgtgactctcagagcaattttcctgtggcggttaccggaattgcatatggattggatatttttagcaacacgtatacgtgttagactacccgtctagggtttatgttattccccttgtaatgaccgttataccccctgtgtaatgggcctggcccagttactcactctattaatatcactcccaacccctgtttagggtatgggttcctattccaacatggtatcag

SEQ ID NO: 216341 - DNA, 2458 bp, Zea Mays
gtcccgttgcccgttacggacgcgtggcagcccgcctccgctttgagcctttgaccaatgaagatggtaatctcagtcaaagcgcgggatgcatttcgcatctccttcggtccttccccagcccatccggtacggagccaaatctctggccgaacgaaaaagcgcggagatttccagggagaagcagtgttgcagacgcccggattcggggcgcgtcgttcctacatagaccgcgagtcgcctcctgcacctgcgggattcgccgcctgtcccagatccaagaaacgcataacgggcgtggagccagttgggccagggaagatttaaccagtcgggcccggaaggagcctaagggttggatctgatgctaccaggtcgctgagcatcgctactgaagggggcagcttctgattccggcagatggctcctgaaatgatggaggaggggcaatcagcttcctataccgtggatgacgctctcttgtcatcaggttttgggaggttccagatattgattctttcatatgctgggattggcttaattgccgaagcgatggaaatgatgctgctatcatttgttggtccatcagtacagctagaatggaagcttacttctcatcaggaaagcatgattacaagtgttgtttttgttgggatgctgattggagcttactcgtggggtgtggtttcagacaactatggaaggaggcaggagaggctttctctttacagccattatgacaagtggagctggattttttagcgcttttgctccgaactatctatcattaatttccctgagattcttagttggtattggtttgggaggaggacctgttctgggatcttggttcttggaatttgttcctgctccaactagaggaacttggatggtggtattttctgcattttggactgttggaacaatcttggaggcatctcttgcatgggtataatatttgcccctgaatattttgaaactgatagcgctattcatattttataatagtgcccagcatgaaaatcagcagtaaacattgcacatgaacataacctgatgcaactgattctcaatttctcattgtatactccagtttattcagaaatttatggaccactcacgaacagttaaatctgctaatagggttgctgattaccatacaaaagattaacctgtagtattaatttggtctgttacttgatcattttttttccatgcctaattttttttcaccatactaatggcagacaattatgcccaagtttggttggaggtggttgttagcattatcagctgttccatcttttctcctgctgctattttatgccattacaccagagtcaccaaggtttctttgcatgaaaggccggactactgaggctgtggatatattggagaaaatggcaagactaaacaatgtacaactaccttctggtaggcttgtttctgacaaaaatattgagctagatgaagtttcaggatcttcagagtccacgacacttctggctggtgccgaagaaagtgacaacctaaatgaggatcagggttctgatttcggaggtattaagtccgtcggcaagctactcgcaccaaaactgatcagagcaaccctgcttctgtggatggccttctttggaaatgcgtttgcctattatggcattgttcttctgacatcagagctcagtaatggaaacaggatatgtgccaaagaggatgttgaatcagttcattcaaccaatgcaagcctatataagaatgttttcatatctagttttgcagagatcccagggtcatttctgtcggccatgatcgtggatagatttggtcggaagcgttccatggcgtcgatgctcttcactagctgcgttttcttactcccactagtgttctcccggacagatatactaaccagaatctccctgtttggtgcccggctctgtatatctgccagcttcaccatcgtatacatatatgctccagagatttacccgaccgcggtgaggacgacgggcatcggcatcgcgagctcagtgggcaggatcgggggcatcctctgcccactcgtcgctgtcgccctggtgcacagctgccagcagacgacggcgatcctcctcttcgagcttgtaatcttcctctccggcctggccgtctcgttcttccccttcgagacgaaggggtgtaggctcaacgacaccgacgtggacatgaactgatccggtggctgggtgtagtgtgactctcagagcaattttcctgtggcggttaccggaattgcatatggattggatatttttagcaacacgtatacgtgttagactacccgtctagggtttatgttattccccttgtaatgaccgttataccccctgtgtaatgggcctggcccagttactcactctattaatatcactcccaacccctgtttagggtatgggttcctattccaacatggtatcag

SEQ ID NO: 216342 - DNA, 2095 bp, Zea Mays
ctcactcacctccgcgtcggtgggcggccagcccgtcccgttgcccgttacggacgcgtggcagcccgcctccgctttgagcctttgaccaatgaagatggtaatctcagtcaaagcgcgggatgcatttcgcatctccttcggtccttccccagcccatccggtacggagccaaatctctggccgaacgaaaaagcgcggagatttccagggagaagcagtgttgcagacgcccggattcggggcgcgtcgttcctacatagaccgcgagtcgcctcctgcacctgcgggattcgccgcctgtcccagatccaagaaacgcataacgggcgtggagccagttgggccagggaagatttaaccagtcgggcccggaaggagcctaagggttggatctgatgctaccaggtcgctgagcatcgctactgaagggggcagcttctgattccggcagatggctcctgaaatgatggaggaggggcaatcagcttcctataccgtggatgacgctctcttgtcatcagtacagctagaatggaagcttacttctcatcaggaaagcatgattacaagtgttgtttttgttgggatgctgattggagcttactcgtggggtgtggtttcagacaactatggaaggaggcaggagaggctttctctttacagccattatgacaagtggagctggattttttagcgcttttgctccgaactatctatcattaatttccctgagattcttagttggtattggtttgggaggaggacctgttctgggatcttggttcttggaatttgttcctgctccaactagaggaacttggatggtggtattttctgcattttggactgttggaacaatcttggaggcatctcttgcatggacaattatgcccaagtttggttggaggtggttgttagcattatcagctgttccatcttttctcctgctgctattttatgccattacaccagagtcaccaaggtttctttgcatgaaaggccggactactgaggctgtggatatattggagaaaatggcaagactaaacaatgtacaactaccttctggtaggcttgtttctgacaaaaatattgagctagatgaagtttcaggatcttcagagtccacgacacttctggctggtgccgaagaaagtgacaacctaaatgaggatcagggttctgatttcggaggtattaagtccgtcggcaagctactcgcaccaaaactgatcagagcaaccctgcttctgtggatggccttctttggaaatgcgtttgcctattatggcattgttcttctgacatcagagctcagtaatggaaacaggatatgtgccaaagaggatgttgaatcagttcattcaaccaatgcaagcctatataagaatgttttcatatctagttttgcagagatcccagggtcatttctgtcggccatgatcgtggatagatttggtcggaagcgttccatggcgtcgatgctcttcactagctgcgttttcttactcccactagtgttctcccggacagatatactaaccagaatctccctgtttggtgcccggctctgtatatctgccagcttcaccatcgtatacatatatgctccagagatttacccgaccgcggtgaggacgacgggcatcggcatcgcgagctcagtgggcaggatcgggggcatcctctgcccactcgtcgctgtcgccctggtgcacagctgccagcagacgacggcgatcctcctcttcgagcttgtaatcttcctctccggcctggccgtctcgttcttccccttcgagacgaaggggtgtaggctcaacgacaccgacgtggacatgaactgatccggtggctgggtgtagtgtgactctcagagcaattttcctgtggcggttaccggaattgcatatggattggatatttttagcaacacgtatacgtgttagactacccgtctagggtttatgttattccccttgtaatgaccgttataccccctgtgtaatgggcctggcccagttactcactctattaatatcactcccaacccctgtttagggtatgggttcctattccaacatggtatcag

SEQ ID NO: 216343 - DNA, 2804 bp, Zea Mays
taggtcgtgccgtaccagcccgaagtataaaaacaatagcccagtccggcctaaaccatatcgtgcctttgttgggtcgtgccgacccaagcccgacacatatatttaaccacgtaaaatcaaaatattaaaaccatataaagttcatagcttactaaataaaagatattaaacaattttagcatcatttaaccacacaaactctaaatataataacaatataaagtcgacatcttactagattaaataaattaaacaggttgaggttaattgggccgtgccggcctaagcccggcctatctatgcgggccgtgcgaggggcccgacgagctgaaatttgaggcccggcctaagctcagcttcggaccgtgctagctcgactcatattatttcgtgccgggctgtgttttgggcccctgttttcggcccgtgctcgtgctagcccaaaaagctcgacccatattctgagtaatagtcctcacccggcttccttttcacgattaactgtacgtggatcccaaaaaaaaaatctcggcttctcgctacagagacgaccatgggaaagaattaatctagaggacgagtcgtgaggatatggcgttgccgtcggccaccgtacgtgtgccgtggacggccagcaccttccggcttgcaccgaacatgctggtggcgttgttcttcctggcggcgctactggcggccccggcgcgttcgtcgtcgccgtcgtccaacaacggcgccggtcttcagcagcccaccctgaccgtctgctccgggcactccactgtcgccacgagcggcgagttcgccagcttcctcgcagccgtgtgcgccggagcctacggcggcggcgtcgccccccacatgtcccacagcatgtcctcgtacgtcgccgccgagaaccggaccaccatgtacggggtcgcgcagtgcagccccgacgtgtcggcctccgagtgcactgcctgcctcgccgttgttggaaccggaccgcccacacacggcgtgtccgtcggggccgcccgcacacactgtgcaagatcatgcattgcattattagttacttgttttagtaatgcatatttgtgttccacaaatagatagctgcatgagtggtgttcagcctgaatcgtgctgcgttcacggtgaggcgagtgtggtcaccgccacgtcgcgcatgaagagcgttcccgcgcgtcaggcgggcgcgtcgcagcgcgagcgcgtgtggcgggtgatcgtgggtcttaggcctgtaaacactaagaataaatagcaaagagtacaacgaaaatggtgcaacgttttggcaccacaactctcctgcgttcagttcagatccgctattttcgcgtgagagaaatcgtgggcgacggcgtgcgtccctgagtacgtcgtctgcgttgtcgatcgccaccgagctgcaccaccggcagccgacggcaacaattggtatcggagccagatcaaacggcctccggatcatcagagaacaaaaggaaggaaacttcgaatagaaccaaatggctgatcgcttctattgcaactgggttggtggctgccttcaccagcctcgcactcaccatgtccatatggtaccggcggcgaaaacagcaactgtatcagagaggacatgtcatagatgccgtgcccgaggatactatgcgtgacctagagaagaatcatttggactccgaagaagaagaagacgaggacggaggaagaacgagctaccagctctacaactacctggttcttgaggctgctacatgtcgcttctcaagtagaaacaagctagggagcggtggatttggaacggtatacaagggcacgcttgagaatgggaaggaagtagcagtgaaaaggctcagggactccaagaggacgatacaagaactagagagggagatctccattgtggctagcttgcgccataagaacatcgtgaggtttttaggctactgcttccaagaggaagggaggttcttcatctacgagtacgtgcctaataacagccttgataagttttggtacaaaggtaagttcatttctccccactatattgattacatttaaggggacaacacacccaaaaagttggcttgcaattgcagcatcttctcaatggcaccagaggctagagtgggctacatggttcaacgtcatcttaggggttgctcgcggccttaagtttctccatgacaaggggattattcaccgggacctcaagccacacaatgtacttctcgaccataacttcaacccaaagatcgccgattttgatctcttgaggatgtatgatcaacagaaaactcatgagagcaccgagaaggccgctggaacattcgggtatatggcaccagagtgcacatccggacgaaaattgctgctttcaatcaagtccgacgtgtacagctacggggtgttggtgctggagatcatcaccggccacaagatctacactttcgaaggccaaaactctgaaggcctcgtcgaatacgtgtggcagcactggacggagaagagagcgagcgacgtcgtggattgcgacttgggcatggaagggcaggagcacgggccatggcaggcgctgcggtgcgtgcacgtcgcgcttctctgtgtgcagtcggatcggtcgaggcggccaactatggggcaggtcatcgccatgcttagcagtggcgatgacgggacggaggagctaccggagccatcccggcctgcctgggtacgtcgtccatccaacgacggtgtcaagttttcagctgtgcttcgggtgcaggtgtccagagcgtagatccacc

SEQ ID NO: 216344 - DNA, 2700 bp, Zea Mays
ctatacgtgcgggcgcgtgtgtcgcggcccgacggcctggatggacgcgccgtgtgtgccggccccgacggacacgccgtgtgtcgggcggtccggttccaacagccgcagcctcgtccaagctcatcgccgggaccgcgtgcgcgacgtcggcggtctggcacgacgcctgcttcctccggtactcggtccgcgacaccggccggttccgcgaggacgaacacacggagaccgtgttcaacgcgagccgcgcgctgtcgtcgttgccgccgcatgtcggcgccaacaaagcggcggtgaggcgcctactcgccgccgtcgtcgcggacagcacgaggagcggccacatgtgcagcgacatcggtgtaggcactggtgggacgactgcggcaggcggcggccggatctacgggctcacgcggtgcctcggcggtgcctcggccggatctacggatctacgggctcacgcggtgcctcgccgccgggatctcgtgcgccgactgccgccgctgcctcggcggcgctctcgcggtggtagagcgggagtacaacggcagcgcggggatgcaggtcctgcggctcagctgcatggccaggtacgagagctaccccttctacaacaccaagtccttggcccggcgatcgctggcgtcggcgatgatcgattacttccccttaaatgtatcatcatcctttcctgcgagtgtggggggtgtacaacccacaccagcgcctcctggcggtcgtaacccatcgccttcaccgcctgcacaagcacgagcatcacctgcaccagcagcaccgttgaacatctccgggcctgcaactgcgactccgagagctgcacaacccaccccagcgccccctggcggtcgtactcgtaccccacagcatgcagctgccgcaacgaatgatcaaacggcctccggatcatcagagaacaaaaggaaggaaacttcgaatagaaccaaatggctgatcgcttctattgcaactgggttggtggctgccttcaccagcctcgcactcaccatgtccatatggtaccggcggcgaaaacagcaactgtatcagagaggacatgtcataggtttattattttgaatcgtcaaccagatgccgtgcccgaggatactatgcgtgacctagagaagaatcatttggactccgaagaagaagaagacgaggacggaggaagaacgagctaccagctctacaactacctggttcttgaggctgctacatgtcgcttctcaagtagaaacaagctagggagcggtggatttggaacggtatacaagggcacgcttgagaatgggaaggaagtagcagtgaaaaggctcagggactccaagaggacgatacaagaactagagagggagatctccattgtggctagcttgcgccataagaacatcgtgaggtttttaggctactgcttccaagaggaagggaggttcttcatctacgagtacgtgcctaataacagccttgataagttttggtacaaagcatcttctcaatggcaccagaggctagagtgggctacatggttcaacgtcatcttaggggttgctcgcggccttaagtttctccatgacaaggggattattcaccgggacctcaagccacacaatgtacttctcgaccataacttcaacccaaagatcgccgattttgatctcttgaggatgtatgatcaacagaaaactcatgagagcaccgagaaggccgctggaacattagtgcacatccggacgaaaattgctgctttcaatcaagtccgacgtgtacagctacggggtgttggtgctggagatcatcaccggccacaagatctacactttcgaaggccaaaactctgaaggcctcgtcgaatacgtgtggcagcactggacggagaagagagcgagcgacgtcgtggattgcgacttgggcatggaagggcaggagcacgggccatggcaggcgctgcggtgcgtgcacgtcgcgcttctctgtgtgcagtcggatcggtcgaggcggccaactatggggcaggtcatcgccatgcttagcagtggcgatgacgggacggaggagctaccggagccatcccggcctgcctgggtacgtcgtccatccaacgacggtgtcaagttttcagctgtgcttcgggtgcaggtagcaccgcttgatgacgtccctccatcaacaaaatggatgggattcttgcatggcttagatttgatcgattatgaactaaacatatttatatttatgatattaatttaaaattatcagattagctatgaaacatatttttataatagaatgatttagagttatactagtacaatactcacgcattgggacgacacataaattattcgataaaacacaatagttacctaaaaacgaacaacacatatattaccatcgatcttaatatctcacaatttttttttgccaacaaccaatacattgttattgttactctctaattttacatcaactatttagactccatctactaagctaggggcacattgcatttggcacaagcaagtctcaaatggcacatagatccatgtcaagaaaaatcttgtatttatgataactttacatctctatggtatgtttttatagtacttgatgtatacatgatcaaacaatgtttaaactaataatgaggtcaatataatatcttttgtatacaca

SEQ ID NO: 216345 - DNA, 2583 bp, Zea Mays
ctatacgtgcgggcgcgtgtgtcgcggcccgacggcctggatggacgcgccgtgtgtgccggccccgacggacacgccgtgtgtcgggcggtccggttccaacagccgcagcctcgtccaagctcatcgccgggaccgcgtgcgcgacgtcggcggtctggcacgacgcctgcttcctccggtactcggtccgcgacaccggccggttccgcgaggacgaacacacggagaccgtgttcaacgcgagccgcgcgctgtcgtcgttgccgccgcatgtcggcgccaacaaagcggcggtgaggcgcctactcgccgccgtcgtcgcggacagcacgaggagcggccacatgtgcagcgacatcggtgtaggcactggtgggacgactgcggcaggcggcggccggatctacgggctcacgcggtgcctcggcggtgcctcggccggatctacggatctacgggctcacgcggtgcctcgccgccgggatctcgtgcgccgactgccgccgctgcctcggcggcgctctcgcggtggtagagcgggagtacaacggcagcgcggggatgcaggtcctgcggctcagctgcatggccagcgcctcctggcggtcgtaacccatcgccttcaccgcctgcacaagcacgagcatcacctgcaccagcagcaccgttgaacatctccgggcctgcaactgcgactccgagagctgcacaacccaccccagcgccccctggcggtcgtactcgtaccccacagcatgcagctgccgcaacgaatgatcaaacggcctccggatcatcagagaacaaaaggaaggaaacttcgaatagaaccaaatggctgatcgcttctattgcaactgggttggtggctgccttcaccagcctcgcactcaccatgtccatatggtaccggcggcgaaaacagcaactgtatcagagaggacatgtcataggtttattattttgaatcgtcaaccagatgccgtgcccgaggatactatgcgtgacctagagaagaatcatttggactccgaagaagaagaagacgaggacggaggaagaacgagctaccagctctacaactacctggttcttgaggctgctacatgtcgcttctcaagtagaaacaagctagggagcggtggatttggaacggtatacaagggcacgcttgagaatgggaaggaagtagcagtgaaaaggctcagggactccaagaggacgatacaagaactagagagggagatctccattgtggctagcttgcgccataagaacatcgtgaggtttttaggctactgcttccaagaggaagggaggttcttcatctacgagtacgtgcctaataacagccttgataagttttggtacaaagcatcttctcaatggcaccagaggctagagtgggctacatggttcaacgtcatcttaggggttgctcgcggccttaagtttctccatgacaaggggattattcaccgggacctcaagccacacaatgtacttctcgaccataacttcaacccaaagatcgccgattttgatctcttgaggatgtatgatcaacagaaaactcatgagagcaccgagaaggccgctggaacattcgggtatatggcaccagagtgcacatccggacgaaaattgctgctttcaatcaagtccgacgtgtacagctacggggtgttggtgctggagatcatcaccggccacaagatctacactttcgaaggccaaaactctgaaggcctcgtcgaatacgtgtggcagcactggacggagaagagagcgagcgacgtcgtggattgcgacttgggcatggaagggcaggagcacgggccatggcaggcgctgcggtgcgtgcacgtcgcgcttctctgtgtgcagtcggatcggtcgaggcggccaactatggggcaggtcatcgccatgcttagcagtggcgatgacgggacggaggagctaccggagccatcccggcctgcctgggtacgtcgtccatccaacgacggtgtcaagttttcagctgtgcttcgggtgcaggtagcaccgcttgatgacgtccctccatcaacaaaatggatgggattcttgcatggcttagatttgatcgattatgaactaaacatatttatatttatgatattaatttaaaattatcagattagctatgaaacatatttttataatagaatgatttagagttatactagtacaatactcacgcattgggacgacacataaattattcgataaaacacaatagttacctaaaaacgaacaacacatatattaccatcgatcttaatatctcacaatttttttttgccaacaaccaatacattgttattgttactctctaattttacatcaactatttagactccatctactaagctaggggcacattgcatttggcacaagcaagtctcaaatggcacatagatccatgtcaagaaaaatcttgtatttatgataactttacatctctatggtatgtttttatagtacttgatgtatacatgatcaaacaatgtttaaactaataatgaggtcaatataatatcttttgtatacaca

SEQ ID NO: 216346 - DNA, 2650 bp, Zea Mays
tggacgcgccgtgtgtgccggccccgacggacacgccgtgtgtcgggcggtccggttccaacagccgcagcctcgtccaagctcatcgccgggaccgcgtgcgcgacgtcggcggtctggcacgacgcctgcttcctccggtactcggtccgcgacaccggccggttccgcgaggacgaacacacggagaccgtgttcaacgcgagccgcgcgctgtcgtcgttgccgccgcatgtcggcgccaacaaagcggcggtgaggcgcctactcgccgccgtcgtcgcggacagcacgaggagcggccacatgtgcagcgacatcggtgtaggcactggtgggacgactgcggcaggcggcggccggatctacgggctcacgcggtgcctcggcggtgcctcggccggatctacggatctacgggctcacgcggtgcctcgccgccgggatctcgtgcgccgactgccgccgctgcctcggcggcgctctcgcggtggtagagcgggagtacaacggcagcgcggggatgcaggtcctgcggctcagctgcatggccaggtacgagagctaccccttctacaacaccaagtccttggcccggcgatcgctggcgtcggcgatgatcgattacttccccttaaatgtatcatcatcctttcctgcgagtgtggggggtgtacaacccacaccagcgcctcctggcggtcgtaacccatcgccttcaccgcctgcacaagcacgagcatcacctgcaccagcagcaccgttgaacatctccgggcctgcaactgcgactccgagagctgcacaacccaccccagcgccccctggcggtcgtactcgtaccccacagcatgcagctgccgcaacgaatgatcaaacggcctccggatcatcagagaacaaaaggaaggaaacttcgaatagaaccaaatggctgatcgcttctattgcaactgggttggtggctgccttcaccagcctcgcactcaccatgtccatatggtaccggcggcgaaaacagcaactgtatcagagaggacatgtcatagatgccgtgcccgaggatactatgcgtgacctagagaagaatcatttggactccgaagaagaagaagacgaggacggaggaagaacgagctaccagctctacaactacctggttcttgaggctgctacatgtcgcttctcaagtagaaacaagctagggagcggtggatttggaacggtatacaagggcacgcttgagaatgggaaggaagtagcagtgaaaaggctcagggactccaagaggacgatacaagaactagagagggagatctccattgtggctagcttgcgccataagaacatcgtgaggtttttaggctactgcttccaagaggaagggaggttcttcatctacgagtacgtgcctaataacagccttgataagttttggtacaaagcatcttctcaatggcaccagaggctagagtgggctacatggttcaacgtcatcttaggggttgctcgcggccttaagtttctccatgacaaggggattattcaccgggacctcaagccacacaatgtacttctcgaccataacttcaacccaaagatcgccgattttgatctcttgaggatgtatgatcaacagaaaactcatgagagcaccgagaaggccgctggaacattcgggtatatggcaccagagtgcacatccggacgaaaattgctgctttcaatcaagtccgacgtgtacagctacggggtgttggtgctggagatcatcaccggccacaagatctacactttcgaaggccaaaactctgaaggcctcgtcgaatacgtgtggcagcactggacggagaagagagcgagcgacgtcgtggattgcgacttgggcatggaagggcaggagcacgggccatggcaggcgctgcggtgcgtgcacgtcgcgcttctctgtgtgcagtcggatcggtcgaggcggccaactatggggcaggtcatcgccatgcttagcagtggcgatgacgggacggaggagctaccggagccatcccggcctgcctgggtacgtcgtccatccaacgacggtgtcaagttttcagctgtgcttcgggtgcaggtagcaccgcttgatgacgtccctccatcaacaaaatggatgggattcttgcatggcttagatttgatcgattatgaactaaacatatttatatttatgatattaatttaaaattatcagattagctatgaaacatatttttataatagaatgatttagagttatactagtacaatactcacgcattgggacgacacataaattattcgataaaacacaatagttacctaaaaacgaacaacacatatattaccatcgatcttaatatctcacaatttttttttgccaacaaccaatacattgttattgttactctctaattttacatcaactatttagactccatctactaagctaggggcacattgcatttggcacaagcaagtctcaaatggcacatagatccatgtcaagaaaaatcttgtatttatgataactttacatctctatggtatgtttttatagtacttgatgtatacatgatcaaacaatgtttaaactaataatgaggtcaatataatatcttttgtatacaca

SEQ ID NO: 216347 - DNA, 2871 bp, Zea Mays
cccgacggacacgccgtgtgtcgggcggtccggttccaacagccgcagcctcgtccaagctcatcgccgggaccgcgtgcgcgacgtcggcggtctggcacgacgcctgcttcctccggtactcggtccgcgacaccggccggttccgcgaggacgaacacacggagaccgtgttcaacgcgagccgcgcgctgtcgtcgttgccgccgcatgtcggcgccaacaaagcggcggtgaggcgcctactcgccgccgtcgtcgcggacagcacgaggagcggccacatgtgcagcgacatcggtgtaggcactggtgggacgactgcggcaggcggcggccggatctacgggctcacgcggtgcctcggcggtgcctcggccggatctacggatctacgggctcacgcggtgcctcgccgccgggatctcgtgcgccgactgccgccgctgcctcggcggcgctctcgcggtggtagagcgggagtacaacggcagcgcggggatgcaggtcctgcggctcagctgcatggccaggtacgagagctaccccttctacaacaccaagtccttggcccggcgatcgctggcgtcggcgatgatcgattacttccccttaaatgtatcatcatcctttcctgcgagtgtggggggtgtacaacccacaccagcgcctcctggcggtcgtaacccatcgccttcaccgcctgcacaagcacgagcatcacctgcaccagcagcaccgttgaacatctccgggcctgcaactgcgactccgagagctgcacaacccaccccagcgccccctggcggtcgtactcgtaccccacagcatgcagctgccgcaacgaatgatcaaacggcctccggatcatcagagaacaaaaggaaggaaacttcgaatagaaccaaatggctgatcgcttctattgcaactgggttggtggctgccttcaccagcctcgcactcaccatgtccatatggtaccggcggcgaaaacagcaactgtatcagagaggacatgtcataggtgattgaagccgccgtcactgtttttttttcttgtttgatttcttcttctctctttacattctgctttagggtgtgttcgtttgttccggaatcgtgacatagaactaatccaaccaggaatgcttatctaatttgtataggctttgatcacctggaaccattcctggcctcaatcctgaacaaacgaacgcagccttaacgtatcactattctctgtttattattttgaatcgtcaaccagatgccgtgcccgaggatactatgcgtgacctagagaagaatcatttggactccgaagaagaagaagacgaggacggaggaagaacgagctaccagctctacaactacctggttcttgaggctgctacatgtcgcttctcaagtagaaacaagctagggagcggtggatttggaacggtatacaagggcacgcttgagaatgggaaggaagtagcagtgaaaaggctcagggactccaagaggacgatacaagaactagagagggagatctccattgtggctagcttgcgccataagaacatcgtgaggtttttaggctactgcttccaagaggaagggaggttcttcatctacgagtacgtgcctaataacagccttgataagttttggtacaaagcatcttctcaatggcaccagaggctagagtgggctacatggttcaacgtcatcttaggggttgctcgcggccttaagtttctccatgacaaggggattattcaccgggacctcaagccacacaatgtacttctcgaccataacttcaacccaaagatcgccgattttgatctcttgaggatgtatgatcaacagaaaactcatgagagcaccgagaaggccgctggaacattcgggtatatggcaccagagtgcacatccggacgaaaattgctgctttcaatcaagtccgacgtgtacagctacggggtgttggtgctggagatcatcaccggccacaagatctacactttcgaaggccaaaactctgaaggcctcgtcgaatacgtgtggcagcactggacggagaagagagcgagcgacgtcgtggattgcgacttgggcatggaagggcaggagcacgggccatggcaggcgctgcggtgcgtgcacgtcgcgcttctctgtgtgcagtcggatcggtcgaggcggccaactatggggcaggtcatcgccatgcttagcagtggcgatgacgggacggaggagctaccggagccatcccggcctgcctgggtacgtcgtccatccaacgacggtgtcaagttttcagctgtgcttcgggtgcaggtagcaccgcttgatgacgtccctccatcaacaaaatggatgggattcttgcatggcttagatttgatcgattatgaactaaacatatttatatttatgatattaatttaaaattatcagattagctatgaaacatatttttataatagaatgatttagagttatactagtacaatactcacgcattgggacgacacataaattattcgataaaacacaatagttacctaaaaacgaacaacacatatattaccatcgatcttaatatctcacaatttttttttgccaacaaccaatacattgttattgttactctctaattttacatcaactatttagactccatctactaagctaggggcacattgcatttggcacaagcaagtctcaaatggcacatagatccatgtcaagaaaaatcttgtatttatgataactttacatctctatggtatgtttttatagtacttgatgtatacatgatcaaacaatgtttaaactaataatgaggtcaatataatatcttttgtatacaca

SEQ ID NO: 216348 - DNA, 4141 bp, Zea Mays
agggcctgtatctactgtttctgctgtcattctggggtcagctgatcctagcaattggacccgacagaccattttattctgtgatctcatcataattgaagcccccactgatgaaaagctgttaccttggttgctttcttgagtactggtcaccagatagtagcatgttctcttctgtgtgattaggcttgattgtggactgacactcctggtcacttatctcttgtgatcatccagagtatatcatctgtcagctgatcttttctctatggaatcgcttccctttatgaaagtatccttgttttagggcaaatctcctttggcaaacattgttcagggtgcatcactttgctggttatcctgagcatattctcctcgtcgaatgaactatcagcagcgaagagacttccaaatgatatccatcaggaaattctcatttagtttgatggaagtttcataaggtttcgtaccatctgatttgctgggcaaatctcctttggcagtacttattaatagctcttttgggggcaaatctcctttggcattagctttaagatttctcactgggcaaatctcctttggcactagttctacctttagtttcacatcgctcttcgggcaaatctcctttggcactaaataccaattatatttactatttttagtaaatctccttccgctgtgcgcactagcatctatatctgggtaattctcctttggcattatcagtcaagtgtgctgcctgcctgcacataacttatacgagaatatcaagaagtgattctggaagaaatacttggccagctggtatattgaccttctggacatcaatttgcatattgttccttgttcttgagattaccacgttacccaagcagccacaccttactaagaagggtttgaaatcatggatttgtttacaattgactcggatagtgagtcatatactgggaccagtgacagtgaagaccaagaatgtgaatttacatatagtgaccatgcccaaaacatcttgtccagtctggatgagagcattggcaagattgataattttttgacttttgaaagggggtttctgcatggggatatagtctgccctgtttctgatccctcaggtcagctgggacgtgttgttggtgttgcaatgtttgttgacttggagacaagctcaggtgacataattaaagatgtaaacagcaagaagctatcaagagtgagatcttttgtttccggtgactgcgttgttatggggccatggattggacgagtgataagagcatttgatcttgtcacacttttattcagtgatggagcaaagtgtgaaatcctgttaagggattcggatgtactgaagcccattcctcctgttctttttgaagatgcaccttacttttattatcctggccaacgtgtgaggatagtcgatccgtcagtttccaagtcagcaacatggttatgtggatcatggaggcccagtagagatgatggtattgtctctcatgtcgatgtagggctggtgcatgtgaactggatcacatctgtaaccaatgtttggggagataaatcatcaagtcctccaaacattcaggacccaaagaagctcaccttgctgtcatgtttcccttacgctaattggcaactaggtgattggtgtgctcttatgactgacaacaatggatgcctctggatggattctggcaagtcttgtattcttagtgaagaccagaagtgtgactctcatgcacacatgtattttgaaagttatggttcagattgttctcaaacatttgttgttgccaagacaaagagcactgttgatgttctgtggcagaatggaactgtatctcttggtctagaaccccaggcattactccctgtgagtacccttggtgaccatgatttttggccaggtcaatttgtcctagaaaaactgactgtagaagatgctgcaagatgtccgcgaacggcaatagtgagtgatgtggatgcactggagcgaacagtaaatgtaaaatggattggtccagcacatagtgacattgtcagctatggaagtgaccctgcagtggagactgtaagtgtttatgagctagtagagcacccagatttctccttctgcactggcgaggtcgttatcaggtcagctatgaacatagacaagtctgaagcagatcccacaaatgggtcattggcaagcaaagaatcattggttacctcctctggcttcttatcatgcaccggaaatgtacttgggtacaaggacaatggaattgaagtgcaatgggctaatggtgttatatccaaggtgcaacattttgagataattggattggacaagcttcttgataatagttctgtagaatcaatgaatgaggaacatacaattggtgattcattagacgaggctgagcaggaggaattgaaccatgagattgctctggagtctactgaagactgcactggctccttgtgcaaagccactgcttttctatttcccaagacagcttttgacttcctgacaaatgtggctgctagtttgtttggtattcatggttctccatctccaagctcagttttggtagatcctcgatatgaaattgtgaagatggcagaaatgcagccatgtgcagaagaaacaccaaaagaagaacagatagtgaagtttgtggcgcagattgacaagccaattctctcttcagaagatgccatctcaaaaagattcgatgtagtcactgactgtttggatcatcattttgtgaaggaaaatggccatgaaagtgttacaagaggttggttgaagaaggtgcgactggaatggaacatcctgcaaaatgacctaccagatggtattcatgtgagagtttatgaggaaaggatggatcttctgagggcttgcatcgttggggcacctggaacaccttaccatgacaatctttttttcttcgatattttctttcctcctgattacccccatgaaccaccttctgttcactatcactctggtggtctccgcctgaatccaaatctgtatgagtcgggaaaagtgtgcctcagcctcctgaagacatggacaggcactggtaacgaagtgtggaatgctgagagctcaactgttcttcagctgctgttatcgcttcaggcccttgttctcaacgaaaaaccttacttcaacgaggcgggatacgacaaatttgtgggcaaggctgatggagagaagaactccatcacgtacaatgagaatgccttccttctgtcatgcaaatccatgatgtatgttttacgcaagcctccaaagcattttgagacgttggtcaaggagcatttcacctgccgtgccccgcacatcctggatgcctgcgaggcttatcttgggggcgatctcgtcggacacgcgcacgacaaagcatacgtagcagaggacggcaacaagaactgctcaaccggtttcaagataatgcttggtaagcttctgccgaagctcgttactgccttctgtgaggccggtatcaccagcgaccggtaaaaccagcgcaagcctgctctctgctgcatcagcaatggaattgggaccctttattatattgcgcgtgtatattcgatgcttgtgtattccaaataaaatggcgcctggtttgtgtgttacttgtgcctgtcttgtaaatgtgaaacagtatatacagatgattgctgaactgatatgcttggtcttgtaaatgcggaacggtatgtacgcatgattgctggtgtttatgttgctaagctgaaggcagctaaacactcaagtgtttgggtttgggctgtcttctgcggtcagtgtgaaataaaatgtaaatgtgtgttgttcaatcgttttggactattggcatagcagctgtgtattcatatatttgctcatattgcaatctgaaatacgaaggcaaggggatccattgttgccgtgctgtttatcttgtatatggatgtgctggattgatttttatttttattttttaatacaatttattgcgcaaattacataaatatctcgaaaattcacactaccgaaaaccataggttgtcatggggctaaataacattttggggaaaaacaccataaataagtgaaataggtaatgtttaatttttaacatctatttcaaaa

SEQ ID NO: 216349 - DNA, 2459 bp, Zea Mays
ctttcgtcttcagttcccaacacctgtattggtctattggagagagaaaaagggagagtggaggaagaacacgcgagctcgtaaaagtggcagggtgggggatgggatcccattagcgcagcgcaattaggcgcgccctcggctaaataaaagaagccaaaagaattgcgcgcggcaccggaaaggcgaggcctttgcgctcgcgcaccgtagaaatcgttaccggcaccgccaccacgcccactcgagcaagccgccgagcacccagcgagaacctcccactcctcccagtggctctctgtcctctcgcgccccctcgcgtcctcactgccacttgaaataccggtgggcacacgaccgctccagtgttcaactgctccgggctgtgatttggtgcgacttggtgttgttggtggtggtgctacacgtcttggcctctgcttcctcggagggattggagccgtttgaactcaggagcttgctgctggccatggtccaagggttaggggatggattgaggcgtggggggagaggagcgcagtagcttcctcttcttcttcttcttcggtgcgcgggtctgggctctcgggagcgagcatggcggcgggttgggattgcgacaggtgcaacattttgagataattggattggacaagcttcttgataatagttctgtagaatcaatgaatgaggaacatacaattggtgattcattagacgaggctgagcaggaggaattgaaccatgagattgctctggagtctactgaagactgcactggctccttgtgcaaagccactgcttttctatttcccaagacagcttttgacttcctgacaaatgtggctgctagtttgtttggtattcatggttctccatctccaagctcagttttggtagatcctcgatatgaaattgtgaagatggcagaaatgcagccatgtgcagaagaaacaccaaaagaagaacagatagtgaagtttgtggcgcagattgacaagccaattctctcttcagaagatgccatctcaaaaagattcgatgtagtcactgactgtttggatcatcattttgtgaaggaaaatggccatgaaagtgttacaagaggttggttgaagaaggtgcgactggaatggaacatcctgcaaaatgacctaccagatggtattcatgtgagagtttatgaggaaaggatggatcttctgagggcttgcatcgttggggcacctggaacaccttaccatgacaatctttttttcttcgatattttctttcctcctgattacccccatgaaccaccttctgttcactatcactctggtggtctccgcctgaatccaaatctgtatgagtcgggaaaagtgtgcctcagcctcctgaagacatggacaggcactggtaacgaagtgtggaatgctgagagctcaactgttcttcagctgctgttatcgcttcaggcccttgttctcaacgaaaaaccttacttcaacgaggcgggatacgacaaatttgtgggcaaggctgatggagagaagaactccatcacgtacaatgagaatgccttccttctgtcatgcaaatccatgatgtatgttttacgcaagcctccaaagcattttgagacgttggtcaaggagcatttcacctgccgtgccccgcacatcctggatgcctgcgaggcttatcttgggggcgatctcgtcggacacgcgcacgacaaagcatacgtagcagaggacggcaacaagaactgctcaaccggtttcaagataatgcttggtaagcttctgccgaagctcgttactgccttctgtgaggccggtatcaccagcgaccggtaaaaccagcgcaagcctgctctctgctgcatcagcaatggaattgggaccctttattatattgcgcgtgtatattcgatgcttgtgtattccaaataaaatggcgcctggtttgtgtgttacttgtgcctgtcttgtaaatgtgaaacagtatatacagatgattgctgaactgatatgcttggtcttgtaaatgcggaacggtatgtacgcatgattgctggtgtttatgttgctaagctgaaggcagctaaacactcaagtgtttgggtttgggctgtcttctgcggtcagtgtgaaataaaatgtaaatgtgtgttgttcaatcgttttggactattggcatagcagctgtgtattcatatatttgctcatattgcaatctgaaatacgaaggcaaggggatccattgttgccgtgctgtttatcttgtatatggatgtgctggattgatttttatttttattttttaatacaatttattgcgcaaattacataaatatctcgaaaattcacactaccgaaaaccataggttgtcatggggctaaataacattttggggaaaaacaccataaataagtgaaataggtaatgtttaatttttaacatctatttcaaaa

SEQ ID NO: 216350 - DNA, 1114 bp, Zea Mays
aaaagctctgctccagccacctcttcttcttcttcgccttcgagttcgaatacgagcacgcgacgacgcgagagaaagctcgtgcggagaggtggcgcgcggaggcgaaaatgggcgctgctgctcctcttcccagtacaacgacggctcggcggcgcgcggcgtggtgggcaccgactccgcgaccatcgcgctgtccgggagcgagagccgggacggcggcggcaggcgcgcgaagctgcagggcgtcgtgctgggctgcaccgcgtcgtacgacggccagagcttccagtcctcggacggcgtgctcagcctgggcaacagcaacatctccttcgcgtcccgcgccgccgcgcgcttcgggggccgcttctcctactgcctcgtcgaccacctggccccgcgcaacgccaccagctacctcaccttcggcccgccggggcccgagggcggcgccgcggcgtccagcagctcctcctccgccgcagcgcggacgccgctgctgctcgaccgccggatgagcccgttctacgccgtggcggtcgacgccgtgcacgtggccggggaggcgctcgacatccccgcggacgtgtgggacgtcgcccggggcggcggcgcgatcctcgactccgggaccagcctcaccgtcctcgccaccccggcgtacagggccgtggtcgccgccctcagcgagcgcctcgccggcctgcccagggtctccatggacccgttcgagtactgctacaactggaccgccgccgcgctggagatccccgggctggaggtgcgcttcgccgggtccgcgcgcctgcagccgccggccaagagctacgtcgtcgacgcggcgcccggggtgaagtgcatcggcgtgcaggagggcgcgtggcccggagtgtcggtcatcggcaacatcctgcagcaggaccacctctgggagttcgacctcagggaccggtggctccggttcaagcacacgcgctgcgccctatgatgattgctcacggacgccgcgcatcattcctctatgccttgataaaatttgtgacgagtttggagggagttgggtttttttttcctgaatgaatgaatgaaaatataatttttagcgcaaagg

SEQ ID NO: 216351 - DNA, 2485 bp, Zea Mays
ttttggcgtggcacgaaccttgacgcgctccctctcgtactgggaagcggtccctaccaactggcggcggcggttcataccctcgcgaagaccactagggccgccgccggcgaatctcaagttctcaacacctggcagaagcaaatcggcgtggcactcgccgggcaccgctcccttctccctcctcccacttcccagttctcgatcgtctcaactctgcgggctgcggttccgcctccgcctcctgacgacctcgcccacacgaccgctgcccgcttcgctcgtcgcccacaccgccgttctctcccccgggtgcccataaacccccttctccgcgccatcgttggcccggcgtaaccatctccgctgcggggacgaggaggagcaagcaaacaggaagcagccgagtatcttgccagggcatatgaagtccaatggatgtcacatagtcaagctgtcagcggctgagttatcagcaaaacatggagttggtggttgcttcaggagcctgttgggacagctattatccgatgttccagatgttgctgatgtatctgcgctagcatcatggtattgtgaagctgagaactttgatcagcctatcattgtcataattgatgatttggagcaatgttctggcgatgtgcttggagagtttgtgatgatgctgagtgagtgggtgtttaaaattccagtcttctttgtaatggggatagcaactacccttgatgctccaaagaagcttctctcgtcagaggctcttcaacgattagagccctgcaaacttaccttggggtctccctcagatagattgaatgcacttgttgaggctgtccttgttaaaccatgcgctggattttgcatcagtcatgaagtcgcactgttcgtcagaaattacttttttaggcatgatgggacaataacttcttttattactgctctcaagcttgcatgcagtaagcacttctccatggaacctctaagctttttgtgcttaggaatggtggaggaagattctgaggaattttggcatgataagcttgaatcgctccctcaaacaatatggaaacatgctttcgatctaccctcaaacaaaaatgcaaggaattcttgcaacatggtagaaggattgtctaggctgctgaaatcgcaaaaggattggagttctgttctcttgtgcctgtatgaagctggaaggcatgacaaagtgcagcttttggatatcttctgtgaggcagccagcccagattggcaaactgaaaatgcaccagatagttacctatttgcttctaaagtggctttattaggagtaaagtcagggtctgctagaagatttatagcccaagtaatgaatacaataaggtacttgcctacggaaattttgttacacgtccttgaggtttggagcatccatttaaaaggaatgagtgagatcaacgacagagtgaaggagcttcggtcaaaaggttgtggtgcagatagtgttagggccaaaaggaaatcaaccgccaatactggaaatggagtggttctaataaacgaggaagcggctgcgctgttacaggatgttatcaggaaatatttggtacctgctgaatgcttacctttccatgaaatagtctgcttcaagaatgttgacatcctccgatctgcgctgattggaaacccaagaagaatgattcaactcgatcttctgaggtcacagagccatctgaaatgctcttgttgcagtaggagtggtgctgccgtgtcaggatcgttgcacgacacatcaatcctgtgcagtctagcccaagagtatggtgacatgattaacctccatgactggtacacggcctttgaagggattataaagagcacaaactcaaaagccaaagggaaatcttgcagctctccctcgaagaagaagaagaaatcaaaccccacgcctctggagggtgatggcatgatccaagcaaggttctgcagcgccgttactgagatgcaggtcactggccttgttcggatgccgagcaagagaaggcccgatcttgtgcagagaatcgcgttcggtccttaacagctcggtgattacatgcatgctatacagacgaaacgttttgtgcacgctgacgataatcccaccatgtggtaaattgggcagccgtggaaggaaggtttggttacttgtatcggtgcttcgaagagagctgtgagatggagcagcagccgccgcttcagatatgcagtgctgatgttgcgtctgatggctaagctatgtcgttatttttttcctcttaagagcagtattaaacatgttttagctattgattcggctctctgtagagctgacatgggctcatgtagcccaaggggtacatttgagaaatttttatccttgaaacaaagggcatttcgaattatttccccttttactgatctgttttcagttgcagcacagcatggaacaacgtatgaaaagcaaagcatagctgctgcctgcaaa

SEQ ID NO: 216352 - DNA, 2224 bp, Zea Mays
ccacaaaagtgcatactcatatcctagcaagtgtttagccctctctggtgtttctcgagtgagattgagtgatttgtgtgtaatctagtgatagagagaggtgtggttgctacagtgcttgtgcttggataatagagagctagtgtgctagatctggatcaggtgttcgtgtcacgttcatcattcgtcgaagagctaccaagttgtggttagcctcaagattgttgtaacacatcaaaggtgatatagtggaagtctccatttatcataggtggtgataaacgtgagcaaagggaggaaggagttaaaatagactccatgccgcattggctaactccaacgtggatgtaggcattgaccgaactacgggaaaggtatctcttggacaacgcactattccactacaaatgactctgcaagtgaaatttgaggaagttgccttcagctttaatggtgggaaggattcaactgtgctcctgcatttgattcgagctggttactacctttacaagaaggactctggtgatgtagcccaaacagatgctgttaaaaactgtccactgcgtactatctatttcgaaagcccttgtgctttccctgaaatcaattcattcacttatgagattgtctcaacttatgggttacctctggaaaccatccattcagatttcaagtctggtctagaaggccttctgaaggagaagcccaccaaagcaattttcattggcacaagaattggtgatccaaatgcggttggtcaagaacagttctctcctagttcacctggctggcctccttttatgagggtgaatccaatcttggattggtcatacagggatgtttggtcttttctaataacatgtaaggtcaaatactgcagcctttatgatcaagggtatacttccattgggagcatacacgatactgttccaaatgcactccttagtgattcatcatctgagaaaagttttagaccagcatacatgctaactgatggaaggcttgaaagagctggtagaacaaaaaagattaatcctaaagtagaaatgaattctgctgcaagcaatggcatcaacgatactgagggaggacggatgatctcacgggcggcatcaatcattgtagtcggtgatgaaattttgtttggtacaactgaggataacttaggagcagccttgtgcaagaagcttcatgcaattggctggcgggtttctcatgtagcagttgttcgcaatgagattgattctgttgctgaagaagttgaacgttgtaaatctactgatgacatggtgtttatttttggtggactcgggccgctacattcagacgtttctttggctggtgtcgcgaaagcatttggagttcgtctggctcctgatgaagaatttgaagattaccttagtcaactcatgggaaacaattacactggtgaccgaaatgagatggcacagttgccagaaggtattacagaattactgcatcacaaaacgctaccattgccattgatcaaatgtagaaatgtcattgctcttgctgcaaccaatatggatgaactagacaccgagtgggattgtcttctaggtacccaggagagtggtctaatgccatcaaaaccttttgtgtcaaagcatctcagcactacactttcagatgttcaaattgcttcagtccttgcaaaactgtgcttagagttttctgatgtttacatagggtgtcatcggatatcaagagctggtcctttggttgtgaatcttactggaaaggataaccagagggtagatgcggctgccgagaagctgacaagcagctttgaaggacaattttcccaacttaacagttgcaaataagctgtcagagacacccctctatttttgccaaattctttccgcctgaagctctgagattgtgcaggactgatgatggtgctcaactgctctaaaccgacgaccaaaataaaccacggagctggtactactttgaagctacaaattttatttagggaacataggaattttgtactaggaattggtaactgggttctagcataatgtagctttgcagctaatattttgacattattatacgttccaaattatttcatttatactataatttatagcataactttactgctcgatcatgatgtcttcagttgtttgacctttttgctacttgttcgagcatagctttgcagtgcttggtgatgcaaacattgatgctgaaa

SEQ ID NO: 216353 - DNA, 2169 bp, Zea Mays
gctaaataaaaagcatgtgaaggccttcctccccctcccagtcgcccttcaacttgccagccgatcccttcgcgtttgtctccgcggttccgacgctccgcactccgctcccctctcccaagcaaacacagccgagtccacgcacgcctcccatcattcctcaaccgcctcgccggagcaaggggagtagcggaggatggagattgaccaggcggtgcgcgggtgcagcgaccgccgcatgcgcaccaagtacagcaacgccgtctacgtcgtccagcgggccttcgcgctctacccatttgaggaagttgccttcagctttaatggtgggaaggattcaactgtgctcctgcatttgattcgagctggttactacctttacaagaaggactctggtgatgtagcccaaacagatgctgttaaaaactgtccactgctctatccgctatttaaggaagggcaggcctggtgcggtggcgagctgtctcactgaatcatcaggttatgggttcgaaacaacctccgtattttcggagggaaggcttgcttcggtttatcgctatcctagatcacactcatttatgggttacctctggaaaccatccattcagatttcaagtctggtctagaaggccttctgaaggagaagcccaccaaagcaattttcattggcacaagaattggtgatccaaatgcggttggtcaagaacagttctctcctagttcacctggctggcctccttttatgagggtgaatccaatcttggattggtcatacagggatgtttggtcttttctaataacatgtaaggtcaaatactgcagcctttatgatcaagggtatacttccattgggagcatacacgatactgttccaaatgcactccttagtgattcatcatctgagaaaagttttagaccagcatacatgctaactgatggaaggcttgaaagagctggtagaacaaaaaagattaatcctaaagtagaaatgaattctgctgcaagcaatggcatcaacgatactgagggaggacggatgatctcacgggcggcatcaatcattgtagtcggtgatgaaattttgtttggtacaactgaggataacttaggagcagccttgtgcaagaagcttcatgcaattggctggcgggtttctcatgtagcagttgttcgcaatgagattgattctgttgctgaagaagttgaacgttgtaaatctactgatgacatggtgtttatttttggtggactcgggccgctacattcagacgtttctttggctggtgtcgcgaaagcatttggagttcgtctggctcctgatgaagaatttgaagattaccttagtcaactcatgggaaacaattacactggtgaccgaaatgagatggcacagttgccagaaggtattacagaattactgcatcacaaaacgctaccattgccattgatcaaatgtagaaatgtcattgctcttgctgcaaccaatatggatgaactagacaccgagtgggattgtcttctaggtacccaggagagtggtctaatgccatcaaaaccttttgtgtcaaagcatctcagcactacactttcagatgttcaaattgcttcagtccttgcaaaactgtgcttagagttttctgatgtttacatagggtgtcatcggatatcaagagctggtcctttggttgtgaatcttactggaaaggataaccagagggtagatgcggctgccgagaagctgacaagcagctttgaaggacaattttcccaacttaacagttgcaaataagctgtcagagacacccctctatttttgccaaattctttccgcctgaagctctgagattgtgcaggactgatgatggtgctcaactgctctaaaccgacgaccaaaataaaccacggagctggtactactttgaagctacaaattttatttagggaacataggaattttgtactaggaattggtaactgggttctagcataatgtagctttgcagctaatattttgacattattatacgttccaaattatttcatttatactataatttatagcataactttactgctcgatcatgatgtcttcagttgtttgacctttttgctacttgttcgagcatagctttgcagtgcttggtgatgcaaacattgatgctgaaa

SEQ ID NO: 216354 - DNA, 3606 bp, Zea Mays
ggaaagatatatagagagcgattttttagctttccaaataatgatttagagtgatttaagaaagactcttggaggttctctaaggatgcatatctatctctacatgcaagctatccacatcagcagtccactagcatgcagttattatccatgtcatcatcgactaacatgcgtttagctggccacatcagcgaaataagccatctaattttcattccaaaccatccatgatccctgcagcaacgcctggggcatcatttttgtattataccccaccccccaacatggcggataggatggcctcctgtcattgttcaggggtgttttgtgttgtacttaacccatgccagcttggaacaagctagccagaaatcttagggaggtaccacacttggaagtgcttggttttgagctcgtgtagtcgtgtgggctgcctccatgataagagactgccaacctagtgttaatttcagttctccactgtaatagttacattttctctgcagagtgtatttgccatggagcttttagagtattttttgttgtctagtatgtttgaaacaccctattagggcctatttggttcctttagtccagggactaaagtttagttaggggactaaagtttattccctaccctgtttgtttatagggactaaaagtatccagagcatattaaatctctactacttattaaggctgcaagagtagcctgccattcctggttctgctattccctgttcagccattcacattctctgttctccccttttcattcccattccccgtcctctctcaggcgctggctgccgttcccattccctttctttcccattccccgtcctctctctcgcgcccactgccattcccattccctcccttttccattcccatggttcttctaccagccgataaaatggccaaaaaagggacgcttatagggatcgaactctggccaacacacagccaacaaaacctgccccttctaaccaatagcactattgttctttcttgttgtactaaggagctttcatctatttactaggtgaacgtccgtgcgttgctacggagtgaacatgttatgataagatatattgaaatttaaaaaattctaattttcattttatgtttttgttatcatattttaaagttaagaatttttacataagtcttacacattgaacaaatccaccatgtacattaaaatgcaatgtttatcgaccactcaagtaatctgcttttgtaacctaaagtaaccaaattgggcaatgatcagcaaccaccttgtgctaaggtagaaaaataacaagcagaaatttataatacatgatatcatgtattgcatctgagtacaagcacatgtaggtccaccaaataggtttgttacaaggaaacaaaacgaagaactttaaaagatgataacaaaaacataaaatggaaattatatttttttaatttcaatatatcttgtcataacatgatcactctatagcaacgcatgggcatccacctagtgaatcataagaagacaaaaataccccttagcattctcttgcaattagtgcaactgaaataaatgaggggcaaaaggtgaatttaatatggtttaatcccttttagtcacccttttagggactagagactaaagaaagtttagttcctgttttagtcccactgtaatcagaaaaggatttgtgtggagagggagaaaagaggtgaatggaggcagctgccttgtggcctgggattcagtcacaagacctttgaagtatggtgggcttgggatccctaatttacaacacatgtgttgggcccttcaagccaaatggctttggcttcaaaaaacagatcgggataggccttggcatggcttgtccatccccattcagcagcatgttaaagacctttttgcagcatctctgatttctcatgtgggaaatggctctaatacattgttctggacagataagtggcttaatggatgctccatcagagatcttgcatcagaagtggtgtccaaggtggctaagcgagctcttacctctatgacagtggatcaggctcttgaaaacaggcaatggattgcacatatcaacccccccccccttccttgattggaattcagcaatttcttttcttatgggatactttaggagatgtgcagcttacccaggaggaagaccaccatgtttggagacatgaggcatcagggttgttctcctctaaatcctgctacaaagtccttttattaggttctactgtctttgagccttggaagagattgtggaagacctgggcccctcctaaatgcaagtttttcctttggttggcaataagaaacaaatgttggacagctgacagattacagttgaggggattgccacacccagatgtttgcccaatgtgtgatcaagcccaagagacaattcagcacctccttactgcgtgcatttttgcccggcaattttggcatacaattcttgctgctattggcttggggcatctcactccgactgctgatgaggagaaagatatggcagtgcaaatgtctggaagatcttcactgatctttttgattattttccgttgacagcattggtggaatcagaaattttctgcctccatggtggtttatctccatccattgagaatcttgataacgttcgcagtttagaccgtgtccaagaggtccctcatgagggacctatgtgcgaccttctgtggtctgatccagacgatagatgtggctggggcatatctccacgtggtgctggatacacttttggccaagacatatcggagcagtttaatcacaccaacaatcttaaactcgtagctcgggctcaccagttggttatggagggatacaactgggcacatgaacaaaaggtggtgaccatattcagcgcacctaactactgttaccggtgcggcaacatggcgtccatcctcgaggtcgatgactgcaggaatcacacatttattcagtttgagccagctcctaggagaggtgaaccagacgtgacgcggaggacacctgattatttcctttgagttatctgccaggccatttttggattttgcccaatgttggaatagtgatgctggccagtaacaatttttgttggatctatatggtaacttaaccgaccagcaacagtaagaaaatgtggaacttaaccgaccagcaacagtaagaaaatgtggaagctgcatttgtcattgcaagaggtgctcgctaacttaaccccaagctgtcaaaagatccgcttgtctacccaacccacccagtggtgcctcccttgggctttgggacgtcgagtttacgctttcagcgtagagttgcctcagttctgtcttgtgtgtcagctagttttgtgtttgtgtcttgtgtggttgctcgttgtagcttctgtggtctcgagtgttgcaagaattggaattctgctagctcctcctctgtttggttgtccatgcccttggtacacgagtgttggccacccttctcatgtagcaccaaccacgttacagtcaagctgttcgcatcttatttttgtcatgttaatactcctgtcaattaaatgaacaatgtttgctccccatgta

SEQ ID NO: 216355 - DNA, 1717 bp, Zea Mays
gtttctcactgtcacttggtcccgttgataccgtgagccactgacttgcaggccccacattctcccgccctcttcctcttcactacaccctttcctccgtgccgccccacttttctcctcccgcgcccctccgcgagctccctacccctcgcgctcacgccggcgacaagtttccgccagagttaggtagatcaggtgctgcgccggcagccgtggaagggatggaggacctcgcgagttcgcgtggcggcgggggatgcggtggtcttgatgcgcagatcgaacagctcatggagtgccgcccgctcccagagacggaggttaaaacactgtgtgagaaggccaaggagatattaatggaggaaagcaatgttcagttaaaagccctgtgacgatttgtggtgatattcatggccaattccatgatcttttagaacttttccggattggtgggaagtgtccagatacaaattatttgtttatgggtgattatgtggatcgtggctattactctgttgagacagtaacgcttttagttgcacttaaggtgcggtacccgcaacgcattacaattcttcgtggaaaccatgaaagtaggcagatcacacaggtgtatggcttctatgatgaatgcctacgaaaatatggcagtgcaaatgtctggaagatcttcactgatctttttgattattttccgttgacagcattggtggaatcagaaattttctgcctccatggtggtttatctccatccattgagaatcttgataacgttcgcagtttagaccgtgtccaagaggtccctcatgagggacctatgtgcgaccttctgtggtctgatccagacgatagatgtggctggggcatatctccacgtggtgctggatacacttttggccaagacatatcggagcagtttaatcacaccaacaatcttaaactcgtagctcgggctcaccagttggttatggagggatacaactgggcacatgaacaaaaggtggtgaccatattcagcgcacctaactactgttaccggtgcggcaacatggcgtccatcctcgaggtcgatgactgcaggaatcacacatttattcagtttgagccagctcctaggagaggtgaaccagacgtgacgcggaggacacctgattatttcctttgagttatctgccaggccatttttggattttgcccaatgttggaatagtgatgctggccagtaacaatttttgttggatctatatggtaacttaaccgaccagcaacagtaagaaaatgtggaacttaaccgaccagcaacagtaagaaaatgtggaagctgcatttgtcattgcaagaggtgctcgctaacttaaccccaagctgtcaaaagatccgcttgtctacccaacccacccagtggtgcctcccttgggctttgggacgtcgagtttacgctttcagcgtagagttgcctcagttctgtcttgtgtgtcagctagttttgtgtttgtgtcttgtgtggttgctcgttgtagcttctgtggtctcgagtgttgcaagaattggaattctgctagctcctcctctgtttggttgtccatgcccttggtacacgagtgttggccacccttctcatgtagcaccaaccacgttacagtcaagctgttcgcatcttatttttgtcatgttaatactcctgtcaattaaatgaacaatgtttgctccccatgta

SEQ ID NO: 216356 - DNA, 2147 bp, Zea Mays
tcgtgctgctgctagcctagcctagcctgctactcgaacttctcgtctcgtctcctcctcgctcaggcaggggaacccaacggaactcctcctccccagcagacagccgagagtacataggagacgagaagatcccatccactaccgcccggtcgcggtcctccgccctccgccctccccgccgctcgttcggtgcaggtcgccctcgcgtggatcggaatgggcgcctgcgtgtccaaggccgcctgctgctgccgccagccgcacaacggggttaccaacgagaggactgatactgtgacggaggacgaggaggcatacgacctgcctgcgttccaggagttcaccttcgagcagttgcggctagctacatcggggtttgcggtggagaacatcgtgtccgagcaaggtgagaaggcgcccaatgtggtatacaaggggaagctcgatgcccagcgccgcattgctgtcaagcgctttaaccgctctgcctggcccgacccgcgccagttcctggaagaagctagatcagttggcctgctccgaagcaaaaggttggcaaatttgcttggttgttgctgtgaaggcgatgagagattgcttgttgcagaatacatgcccaatgatacgctagcgaagcaccttttccattgggagtcacaatcaatgaaatggaccatgagattaagggttgttctctgtctcgctgaggctttagaatattgcactaacaggggccgtgctctctaccatgatctcaatgcctatagagctctgtttgatgatgactgtaaccctagactttcctgtttcggtctcatgaagaacagccgggatggaaaaagttacagtaccaatttggcatttacgcctccagaatacatgaggactggacgtattactcctgaaagtgtcatatacagctttggaaccttgctgattgatgttcttagtgggaagcatattcctccgagccatgcccttgacctgattcgggaccgaaacttcaatatgctcttagactcatgtttagagggtcaattttcaaatgaggaaggaacagaaatggtccgattagcttcaagatgccttcactatgaaccccgtgagcgacctaatgtcagatcacttgtgcaagtattgactcctctacagagggatgtcgagactccatcttatgtgctcatgggcattccgcgtggtggggcatcttctaccgaaccactgaatctttcccctcttgccgaagcttgttccagaaaggatctgacagcaatacatgaaattctagaaaagacaggctacaaggatgatgagggaactgcaaatgagctctcttttcagatgtggacgaatcagatgcaagatacgttgaactcaaaaaagaagggtgacaatgcttttcgacagaaggattttactgctgccattgattgctattcccagtttattgaagttggtacaatggtttccccaaccatttatgctcgacgttgcctgtcatatctgatgaatggcatgccacaggaggcattgaatgatgcaatgaatgctttggtaatatctcccacatggtcaacagcattctatcttcaggcagcagcactattatcacaaggcatggagaatgaagcacaagaagcactcaaggatggttgtaacttagagcaaagtagcagcggtggacattgattgtgaacatatttgtagtccccaaaatgcacataatgtcaggtgcttgtttgaagagagagtaatattggctttggctatggaagcagcaggcgttggtaatttgtcaatttggctaggggtttgttaaccttattcagattttgtgcttgtggaacgtcgtccctcgtccatatcttcatgtaggaatgtacatatggaagaaagcgacaacagaggctctgaaagagaggacaaagacatccaagaggtgacctgtacagcaagcggttgtttttacgctgtcttaattcttcgtttcttatgcgttagctcccattggtatatttctggatatgatagtggaattcttttaaaaggccaaaaatgtcagcgttctggttgttcgagagttcaacgctttcaccccttgccccagtttttttattggagtacattcatatgctagttaactg

SEQ ID NO: 216357 - DNA, 1775 bp, Zea Mays
tcgtgctgctgctagcctagcctagcctgctactcgaacttctcgtctcgtctcctcctcgctcaggcaggggaacccaacggaactcctcctccccagcagacagccgagagtacataggagacgagaagatcccatccactaccgcccggtcgcggtcctccgccctccgccctccccgccgctcgttcggtgcaggtcgccctcgcgtggatcggaatgggcgcctgcgtgtccaaggccgcctgctgctgccgccagccgcacaacggggttaccaacgagaggactgatactgtgacggaggacgaggaggcatacgacctgcctgcgttccaggagttcaccttcgagcagttgcggctagctacatcggggtttgcggtggagaacatcgtgtccgagcaaggtgagaaggcgcccaatgtggtatacaaggggaagctcgatgcccagcgccgcattgctgtcaagcgctttaaccgctctgcctggcccgacccgcgccagttcctggaagaagctagatcagttggcctgctccgaagcaaaaggttggcaaatttgcttggttgttgctgtgaaggcgatgagagattgcttgttgcagaatacatgcccaatgatacgctagcgaagcaccttttccattgggagtcacaatcaatgaaatggaccatgagattaagggttgttctctgtctcgctgaggctttagaatattgcactaacaggggccgtgctctctaccatgatctcaatgcctatagagctctgtttgatgatgactgtaaccctagactttcctgtttcggtctcatgaagaacagccgggatggaaaaagttacagtaccaatttggcatttacgcctccagaatacatgaggactggacgtattactcctgaaagtgtcatatacagctttggaaccttgctgattgatgttcttagtgggaagcatattcctccgagccatgcccttgacctgattcgggaccgaaacttcaatatgctcttagactcatgtttagagggtcaattttcaaatgaggaaggaacagaaatggtccgattagcttcaagatgccttcactatgaaccccgtgagcgacctaatgtcagatcacttgtgcaagtattgactcctctacagagggatgtcgagactccatcttatgtgctcatgggcattccgcgtggtggggcatcttctaccgaaccactgaatctttcccctcttgccgaagcttgttccagaaaggatctgacagcaatacatgaaattctagaaaagacaggctacaaggatgatgagggaactgcaaatgagctctcttttcagatgtggacgaatcagatgcaagatacgttgaactcaaaaaagaagggtgacaatgcttttcgacagaaggattttactgctgccattgattgctattcccagtttattgaagttggtacaatggtttccccaaccatttatgctcgacgttgcctgtcatatctgatgaatggcatgccacaggaggcattgaatgatgcaatgaatgctttggtaatatctcccacatggtcaacagcattctatcttcaggcagcagcactattatcacaaggcatggagaatgaagcacaagaagcactcaaggatggttgtaacttagagcaaagtagcagcggtggacattgattgtgaacatatttgtagtccccaaaatgcacataatgtcagagaaagtatttaacaacatgggatcaaatggagagtctatg

SEQ ID NO: 216358 - DNA, 1795 bp, Zea Mays
tcgtgctgctgctagcctagcctagcctgctactcgaacttctcgtctcgtctcctcctcgctcaggcaggggaacccaacggaactcctcctccccagcagacagccgagagtacataggagacgagaagatcccatccactaccgcccggtcgcggtcctccgccctccgccctccccgccgctcgttcggtgcaggtcgccctcgcgtggatcggaatgggcgcctgcgtgtccaaggccgcctgctgctgccgccagccgcacaacggggttaccaacgagaggactgatactgtgacggaggacgaggaggcatacgacctgcctgcgttccaggagttcaccttcgagcagttgcggctagctacatcggggtttgcggtggagaacatcgtgtccgagcaaggtgagaaggcgcccaatgtggtatacaaggggaagctcgatgcccagcgccgcattgctgtcaagcgctttaaccgctctgcctggcccgacccgcgccagttcctggaagaagctagatcagttggcctgctccgaagcaaaaggttggcaaatttgcttggttgttgctgtgaaggcgatgagagattgcttgttgcagaatacatgcccaatgatacgctagcgaagcaccttttccattgggagtcacaatcaatgaaatggaccatgagattaagggttgttctctgtctcgctgaggctttagaatattgcactaacaggggccgtgctctctaccatgatctcaatgcctatagagctctgtttgatgatgactgtaaccctagactttcctgtttcggtctcatgaagaacagccgggatggaaaaagttacagtaccaatttggcatttacgcctccagaatacatgaggactggacgtattactcctgaaagtgtcatatacagctttggaaccttgctgattgatgttcttagtgggaagcatattcctccgagccatgcccttgacctgattcgggaccgaaacttcaatatgctcttagactcatgtttagagggtcaattttcaaatgaggaaggaacagaaatggtccgattagcttcaagatgccttcactatgaaccccgtgagcgacctaatgtcagatcacttgtgcaagtattgactcctctacagagggatgtcgagactccatcttatgtgctcatgggcattccgcgtggtggggcatcttctaccgaaccactgaatctttcccctcttgccgaagcttgttccagaaaggatctgacagcaatacatgaaattctagaaaagacaggctacaaggatgatgagggaactgcaaatgagctctcttttcagatgtggacgaatcagatgcaagatacgttgaactcaaaaaagaagggtgacaatgcttttcgacagaaggattttactgctgccattgattgctattcccagtttattgaagttggtacaatggtttccccaaccatttatgctcgacgttgcctgtcatatctgatgaatggcatgccacaggaggcattgaatgatgcaatgaatgctttggtaatatctcccacatggtcaacagcattctatcttcaggcagcagcactattatcacaaggcatggagaatgaagcacaagaagcactcaaggatggttgtaacttagagcaaagtagcagcggtggacattgattgtgaacatatttgtagtccccaaaatgcacataatgtcagcctgctaatctaggttttcatgatggcattgtggctagagtcccatttcttgttttgggtt

SEQ ID NO: 216359 - DNA, 3390 bp, Zea Mays
gttttcttctccacgctgttatctctcgcacgcaaacgaccagcacagcaaaaaccacccccacacttcgctcgcggcgcggcgacggcaatccaccgcggcgcgctgccttcgccggtgatctgacctctccgagcccgggcaatctcctcccgctgaatcggcccggagaggatggcgtcccggcggggaagcagcagttgcgcgctctgcgagggatccaacctgccttcctgttgtgccttgtgcgtcaacgcgcggttgctcgagtaccacacgaaacttcgcatgatgaggagcctccgcgactccctccacgcccgaatcgccgcacgcctcgaagccaagagcaaaacagatgagcagaggatctggagagcgagcaaagcacacgatattatggagttgagggatcggctcactgaattgaagagcaaaactgccgtagataagaccaaggtcgagcaggcatcgagtggtctcaaggcaaaaaccgcgtcattgaatttggctcttgtcacgctgaaaaagaggcaagctgatgcagtggccatgcacaccagtgccatggaaattgcgcagatgaatctcatgacaatcacctcagattgtatgaaaatgcaatcaaaatctgtaaagcaactttgcagattgtttccaatgcgacgagttattaaagagggagaaaagaaagacaactacagtggtccgtatgattcgatatgtggggctcgtcttcctcgtggtctcgatccacattctattccagcagaagaactgtcagcatctttggggtacatgctacacttcgtcaatattgcggtccgtatcctatctgcgcccgttcttcatgtatcaggctttaagggttcatgctcaaatatatggcagcggagttcctactggagtacacgacagtcccagagcaaggtttaccctctttttatacctaggaaaaatgcttgcacaggcggtgaagaaacctcattgtcagaaagtggttcgagtaacttcggagttgactctgtggattctgtcaagaaacagtcttttggttccacgagaagtaatagctttaacctctctggtgcatcttcccactccatggagaggcatcaatatttgcagagaggaatatcactattgaagacaagtgttacagcaattactacttactattataactcactgggcttggatgtgccatccaatctttctacttttgaggcgttttctaagttgctccatacgttatcgtcatcaaaggcctttcgaactgcttttgaattgaacattgcttcaaggtcagaaaagcaagcacagcagctaaacagatcgatttggaagtcaagttcagccgtatcgtcggacagcagttttatggacagcatgcacacaaccatcatgcactctagacaacctcctcctgaactcaaaccagagcttcttgtacaccgctaagttggtgaagcatggtggcgtgccagatagcatattcaacggttgggacctggtagagcgtgaggtcctaccgccaccgccctcgcggttcgaagatgtcgcgcagtgggaaagagccatgtatgctggcacaaaaaagaaatgacttctattgacaagtcttccttgaagtccaaactgttagaacactgcaagagcttcagtttagatatgcctctgatcatcagtttctggttcatgtacagtagcagtacaggactaacctaaccctgtggttgtgacctgtcagtcatctacctgcaagaatgcagagaagagaattgtagtgtagggtttattttctaccacatgtacgtgggtgcagtcctgtaaatttgtaaatgtaaatactgtagcgtttagaaaggaaattagattgtctggaataaatagacattccttcctatgagtacaactgaaaagaaattcttttacattcagcaagaaagcaacatgcacttaccgtaaaagaggaggacaccctgtgacggccagaaaaggaggccttatttgagaagcgaagcggtccacgtgtacaaccggaggcgttcctccgttccaccacaaaccagcggaccttcagcttctccaccgcggctccgcctcttctttcacggctccaccacgcactaaccctaaagcttccccgcgttgccggcgatgagcagccttcgagccatctcctccctcctccatatctactccacgtccgccgccgccagacgaggagccgggcggctgggcttcgcgccgtcgcccggcgggagattccgggtaccgtcgaattccggtccgcccgcgttcgtgttggacgaggtcgcgagggcggccggcggggttcggaggagggcgtccacgcgcgcggcgagttgggactcggagaaatcgccgtacgagacgcttgagctgggtagggatgcagacgaggagaccataaagactgcctacagaagattggccaagttctatcaccctgatgtttatgatggtaagggaacccttgaggaaggggaaaccgctgaagcgcgtttcattaagatccaagcagcgtatgagctgttgattgatggtgaaaggagaagagcatatgatagagagcatcatgtgaatccgatgaaggcttctcaagcatggatggagtgggtaatgaagaagcggaaagcttttgaccaacgtggtgacatggctgtggctgcttgggctgagcaacagcaacgcgaaatgacgctacgggcacggcgtctctcacgctcaaaggttgaccctgaggaagaaaggaagctatttgccaaggaaaagaaggcatctatggaattctacagcacaactctgaagagacatacccttgtgttacggaagagggatattatgcgcaagaaggcagaggaggagaaggataaggagatcagtagactcctagcggcggaagggcttgagttggatacagatgaagatgaaaacaagacttttctggggtaacgcttttgatacttaccctaatttattctcttcctccattccagcaatcgttcaagatgcagcgacaacgagtgcacaaggcgaaacagttgggctcgtcggaaacgctgtaatctggagatgtgcgccaacaaatattggatcgaaataataatctcccggggcgaagtttagcattttaccggagagcagaaaggaaaggcaaatgaaggatgtgtgatggctgtagtagggttgcaatatgattcaatcaaaaaattagtaaatttcgctgtagtagggttgtaatatgattcaacaaaaaatgagtagatttcggtggcgggcctcgattttatcctgagtctcattaagctatggcacttgaaaattgcacgtttaggtttttaatctcgagttcgtattcaggtt

SEQ ID NO: 216360 - DNA, 3608 bp, Zea Mays
gttttcttctccacgctgttatctctcgcacgcaaacgaccagcacagcaaaaaccacccccacacttcgctcgcggcgcggcgacggcaatccaccgcggcgcgctgccttcgccggtgatctgacctctccgagcccgggcaatctcctcccgctgaatcggcccggagaggatggcgtcccggcggggaagcagcagttgcgcgctctgcgagggatccaacctgccttcctgttgtgccttgtgcgtcaacgcgcggttgctcgagtaccacacgaaacttcgcatgatgaggagcctccgcgactccctccacgcccgaatcgccgcacgcctcgaagccaagagcaaaacagatgagcagaggatctggagagcgagcaaagcacacgatattatggagttgagggatcggctcactgaattgaagagcaaaactgccgtagataagaccaaggtcgagcaggcatcgagtggtctcaaggcaaaaaccgcgtcattgaatttggctcttgtcacgctgaaaaagaggcaagctgatgcagtggccatgcacaccagtgccatggaaattgcgcagatgaatctcatgacaatcacctcagattgtatgaaaatgcaatcaaaatctgtaaagcaactttgcagattgtttccaatgcgacgagttattaaagagggagaaaagaaagacaactacagtggtccgtatgattcgatatgtggggctcgtcttcctcgtggtctcgatccacattctattccagcagaagaactgtcagcatctttggggtacatgctacacttcgtcaatattgcggtccgtatcctatctgcgcccgttcttcatgtatcaggctttaagggttcatgctcaaatatatggcagcggagttcctactggagtacacgacagtcccagagcaaggtttaccctctttttatacctaggaaaaatgcttgcacaggcggtgaagaaacctcattgtcagaaagtggttcgagtaacttcggagttgactctgtggattctgtcaagaaacagtcttttggttccacgagaagtaatagctttaacctctctggtgcatcttcccactccatggagaggcatcaatatttgcagagaggaatatcactattgaagacaagtgttacagcaattactacttactattataactcactgggcttggatgtgccatccaatctttctacttttgaggcgttttctaagttgctccatacgttatcgtcatcaaaggcctttcgaactgcttttgaattgaacattgcttcaaggtcagaaaagcaagcacagcagctaaacagatcgatttggaagtcaagttcagccgtatcgtcggacagcagttttatggacagcatgcacacaaccatcatgcactctagacaacctcctcctgaactcaaaccagagcttcttgtacaccgctaagttggtgaagcatggtggcgtgccagatagcatattcaacggttgggacctggtagagcgtgaggtcctaccgccaccgccctcgcggttcgaagatgtcgcgcagtgggaaagagccatgtatgctggcacaaaaaagaaatgacttctattgacaagtcttccttgaagtccaaactgttagaacactgcaagagcttcagtttagatatgcctctgatcatcagtttctggttcatgtacagtagcagtacaggactaacctaaccctgtggttgtgacctgtcagtcatctacctgcaagaatgcagagaagagaattgtagtgtagggtttattttctaccacatgtacgtgggtgcagtcctgtaaatttgtaaatgtaaatactgtagcgtttagaaaggaaattagattgtctggaataaatagacattccttcctatgagtacaactgaaaagaaattcttttacattcagcaagaaagcaacatgcacttaccgtaaaagaggaggacaccctgtgacggccagaaaaggaggccttatttgagaagcgaagcggtccacgtgtacaaccggaggcgttcctccgttccaccacaaaccagcggaccttcagcttctccaccgcggctccgcctcttctttcacggctccaccacgcactaaccctaaagcttccccgcgttgccggcgatgagcagccttcgagccatctcctccctcctccatatctactccacgtccgccgccgccagacgaggagccgggcggctgggcttcgcgccgtcgcccggcgggagattccgggtaccgtcgaattccggtccgcccgcgttcgtgttggacgaggtcgcgagggcggccggcggggttcggaggagggcgtccacgcgcgcggcgagttgggactcggagaaatcgccgtacgagacgcttgagctgggtagggatgcagacgaggagaccataaagactgcctacagaagattggccaagttctatcaccctgatggttggtttattcacctttctgaattattaagcaattctccctaatgtgttcgaagcactatttgattttacatgtgttcccagacccagacatacaacttgcatgctcctttgaacatgatgaatagctcttagttgcttcgtgctgttcttaacactgagttttttgtttgccgcaagcccacaacacactttgaagacaatgcatcagtctcaatgtttatgatggtaagggaacccttgaggaaggggaaaccgctgaagcgcgtttcattaagatccaagcagcgtatgagctgttgattgatggtgaaaggagaagagcatatgatagagagcatcatgtgaatccgatgaaggcttctcaagcatggatggagtgggtaatgaagaagcggaaagcttttgaccaacgtggtgacatggctgtggctgcttgggctgagcaacagcaacgcgaaatgacgctacgggcacggcgtctctcacgctcaaaggttgaccctgaggaagaaaggaagctatttgccaaggaaaagaaggcatctatggaattctacagcacaactctgaagagacatacccttgtgttacggaagagggatattatgcgcaagaaggcagaggaggagaaggataaggagatcagtagactcctagcggcggaagggcttgagttggatacagatgaagatgaaaacaagacttttctggggtaacgcttttgatacttaccctaatttattctcttcctccattccagcaatcgttcaagatgcagcgacaacgagtgcacaaggcgaaacagttgggctcgtcggaaacgctgtaatctggagatgtgcgccaacaaatattggatcgaaataataatctcccggggcgaagtttagcattttaccggagagcagaaaggaaaggcaaatgaaggatgtgtgatggctgtagtagggttgcaatatgattcaatcaaaaaattagtaaatttcgctgtagtagggttgtaatatgattcaacaaaaaatgagtagatttcggtggcgggcctcgattttatcctgagtctcattaagctatggcacttgaaaattgcacgtttaggtttttaatctcgagttcgtattcaggtt

SEQ ID NO: 216361 - DNA, 4360 bp, Zea Mays
ccggccatggcgtgccgacgcaaggcaccttcgccgtcggtcaggggtaaatcaggcaatggagaaggagcacctgctggacatgttggtgatgccgagcaatctctgaaagctgaacctgttggtgacccacaagttggagtatattcgccatcaatcagtcgtctctttcagcagcttgttcatgttcgaactatcatctcatccttcaatgggaagctgccatctgatgcttggttcaatcatgtaaaaaatttgacctcagatgcagaagaatctctcgaatatctgcactacaagatgatgctggccaagcttggggttgggatagagttcaagaaagtaatgcccaatgtgtcagggacttgttccaaaacaacagctttaagcttcatgcacttactagcttcacaggaacttgtttttttaccagttaccgacaaattggagggccttcgacctggaagccctggtttgactggtgtagttcttggaaactacagtgagatattgtcacttagttcttcggtcatgcggtgcatccttttgtgtcgtggcattttaggcattattaacatagttaacatgaggcttaagaaggatagtctggaacttcctgcatttgcttttgatgatctgacatatgctggtcagaacaagggaactggaatgaatgcgcatcgtgtgccggcacacatgactgaccctatatatttgttgcctatgtttatcaggagtcttttgtgtttggatctctcaaactgcagtggccttacacagctgcctgcttccattggcaacctttctaatctggttgcattgaacctctctcactgttattcccttcacacactgccggcgtcagtaggaagactgaagaacttgcaaattcttgttctttcctgctgccatgaactaaggattttaccagtgtcactttgtgagctttccaagctaaggttgctggatttagcaggctgttccggccttcaaaacttacctgcttctttagtaaatctttgcaatctagagattctgaacctatcatattgcaaagaactgaaggagcttccacaaccatttggtaacctccaggaactgaagtacttgaatttatcaggcagccatcgggttgacttggatgttgagtgcctatatacacttgcaaatttgaagtccctaactttgtcgccgcttacaaatattcaaggctttcctggttccttcaaagatcttgcgaatcgcttggatagtttaagattgtggaagaaccagatccatccccagtgtggcccaaaggctgtttctttgcattcatataggtgttatgagcaaagtatcattgacatgttactttctgatgaggctgacaatagtagcaaccagatagtcacttctgcttgcatagttggtgaaagtggcatgggaaagactgagctagtccatcgaatttacaataaccgaatgattttggatacctttgatttgagaatatggctgcatatgtgtgataaaaagaggctattaggtaagatagtagagctcactacttttgcatcctgtggtgatgcctcaatcagtgttcttgaagaaattgtaatagaagaacttgctagcaagaggttgttacttgtactagacgattctgaaatcaaggaccagtatttctggggttatctatggaagctacttaatgtttgtgcaaaaggaagcgctgtcattgtaactaccaagagcatggtagatgctaaccagactggagcaatgcaaaccttttacttgagtcctctatccaaagaagaatgctttatgattttcaaggaacatgtgcttgaagatttagttgtgaataattactgtcagttagaaagcattggctggaagtttgcggagaaatgtggtggcaatccaatgtgcattaaagccctaagtgggttgttatgtcattctgaagttggattgtctgaaattgatatgattgttgatggtatcttaccagcattaagattatgctacgatcttttgccagcacaccttcagcagtgcttcaaattttgttccctattccccaaagattatatttttgtcaagcaccatatcatccgattatggatagctgaaggcttagtcttctgtgaagaaggtactaagccagaagatactgctctgcattattttgaccaactattctgcagatcatttttccagcgttctccatttcatagtgatcataaagatagctttgttatgcatgagctatttcatgatctggcacactctgtttccaagaatgagtgcttcagatgtgaggaaccattctgcagcttagctgaaaatgtttcccacctatcccttgttctttcagattttaagacaactgcactttctaatgaagtaaggaatttgcagtcttttctggttgtcagaagatgtttcccagtggtgagaatttttactttggatgatattttcgtgaaacatagattcttaagggcactaaatttgagctatacagacatactagagttgccaatttctattggaaacatgaagcacctgcggctcttggctctcaacaacaccaagatcaaaagccttcctattgagataggacaagtaaacagtcttcagacattggaactgaaggattgttgccacctcattgacttaccaggaagcataagtaatttggcaaagctgcgacaccttgatgtgcaaaaagaatcgggcaacattattgttggcatgcctcatggtataggatatctgacagatctccaaactctcacaatgttcaacattgggaatgatatgttgcattgttcgatttcagagttgaacaatctgaatggactaaggggacatgttcatgtaactaggcttgagaatattatgacagccaatgatgccagagaagcaaatatgatgggtaaacacttgctagaggctttgacactggagtggtcttaccaggatgaaggcatggacgatgacatgggcaaagaaattgctagtgagattcttcaaaatcttcaacctaacagcaacattatggagcttatcattcgaaattatgctggagatctgtttcctgtctggatgcaggacaattacctttgcaagctcacctcagttacacttgataactgccatggctgtagtgagctcccttaccttggtgatctaccatctcttaaatctctcttcatacagagaataaatgttgttgaaagatttggaatcgagaccagttctttggccactgaagtaaaatatcccactagatttccatcactggaggtgctgaatatatgcgagatgtatgatttgcagttctgggttagcacgagagaggaggattttccacgactctttcgactttctatcagtagatgcccgaaactaaccaaattgcctcgccttatttccctagtgcatgtgtcatttcattacggtgttgaactgccgaccttctcagaacttccatcactggagtcactaaagatcgaaggcttccagaagattagatctattagtttcccacatcaattgacaaccttgaataagttggaaattattgactgcaaagagctgttatcaataaatgcctattccttgtctgtttcaaattttaaagttgtcaggtgcctaaagcttgatttggttggaagttcaatggaagaccatatcagccacaaagtggttaatggaaggaatatcctgacaaggaagcatatggtgctaaaaactttgacccatacaaatctcttggatgatggcagcaagtgggaaaagtttggagaaaagaatatatttggctacatattcccaaggtgagaacataatgtgggaatgtagagagactactaaaattttagactgtttacatcagtttcatcttttgagttgccttttgaccgttctcgttcccattgcagtaggatatacttcctcaattctaaattataagttgctttgatttttttggtatatcagttctgctatgtatctagatataacatatgtctaggtaaataacaaagtctatgtattaaaaaaagtcaaagcgacttataatttggaatggagggagtaaatattataaaatattggattcctaaactttgttaatgtatcttactagttttaaattagacacttcttgttttttcttaaaccacgtaggagaaccgcacgtcatttctttgagaagaaatatagaaatcccctcgtgggtttaggcacactggcattaaatagaacaacaaacccacacatactgacagacccaaaaacgacccttggtggtttcagtttttaggaccagatcctggaaggctgaagccctagccaggtgcca

SEQ ID NO: 216362 - DNA, 1856 bp, Zea Mays
ggaagtgccgctcccgctccctctccggccggcgcacgtctcgcggatgtccatgcgcgcaacttgactcccaccactaccaccatccaccgactgacgactccggcccacttgttcgtcctcgtcctcgtccccgtccagtgcccctcccgtgcgccgaggccgccacacccacacgtatacccaggccggccaaaacgaatcgggtccgtcggaccggacggcttgagagcaaccatggccgtcgcgaggctggtgtccgccccgttccctctcgccccgctccgcgtccgggccccccgcccggccttgccccccggcgcgcacgcgggcccacggccgccggtcctggcgctcgcgcctcccgctgcctcggcggcgccccggcgcgccgtgcccgcgcgcgcggcgccggaggacggcggcagaggggacgcggcggcggctgcggcgcgcgcggcgcggaagcagtcggagcggcggacgtacctcgtggcggccgtcatgtccagcctcgggatcacgtccatggccgccgccgccgtctactaccgcttcgcatggcaaatggagggcggcggcgcgatcccggtgacggagatggtcggcacgttcgcgctctcggtgggcgccgcggtggggatggagttctgggcgcggtgggcgcaccgggcgctgtggcacgcgtcgctgtggcacatgcacgagtcgcaccaccgggcccgcgacgacgggcccttcgagctcaacgacgtgttcgccatcgtcaacgccgtcccggccatgtccctcctcgcctacggcttcttcaaccggggcctcgtcccgggcctctgcttcggcgcggggctggggatcacgctcttcgggatggcctacatgttcgtgcacgacggcctcgtccaccgccgtttccccgtcggccccatcgagaacgtgccctacttccggcgtgtcgccgcagcccatcagatacatcacatggacaagttccagggcgtgccatacggcctgttcctggggcccaaggagctgaaggaggtgggagggaccgaggagctggagaaggagatcaagaggaggatcaggaggagggaggcgctagacgccacccaataagacctgcttgctattgctatacacacagtgctttggctactgaatcccactgtgttctagcgttccctttttttttatgtagcctagatgtatagtatacgagtgctagcgtgtgcacgtaaaaaaccaggttgcgagggtctcaacaggcgacctgcaggaccagcgtcgtcgtggcgctgtttgtcgtcgccggaacagtgaccgtgcagctgccgccgccagtcgccggtggaacaagacacggcacagccgaagcgtgaagacacaagacaagcggctgggggaccttccgaatcagccgctgtcagagtctgcggcggattgtcggtccacctggcgtgctcggcgcaggcggcggcggcggcgaagagctgtgcggggaggcctcctcggaaggagttcagaaccacagccagcaaggggattgaaggcccgggacccaggtgatggtgatatggctcaatggctgtcgtcagcccatgtgcccaacctaagaaaatgtgataatgttagcaattagtaagaggttagaatcatcatgtttttcttatttcattaaattgcatgtaatatcatcatgtttttcttatgtgtcatgtcatttaatgaggataaaacttccataaaaactcacactgagagtgacctaagtaagtaggactcgtgcatcatttggagataacccaagtcttcagcataaacgatccatgatatgtgaggactgaagacggcta

SEQ ID NO: 216363 - DNA, 1456 bp, Zea Mays
gttcaggctatcattatcatttccaaggtcgtccaaaaggtgtcaccccaaagtacagcttgaagcctcttgttccacgcttgtctgagctccttggagttgaagtcgtgatggccaatgattgcattggtgaggaagtcgagaagttggctgccgctttgccagaagagctcatgcttcaaccgaaggagttaccaagtatttgaagcctgctgttgctggcttcctcatgcagaaggaacttgactaccttgttggagctgttgccaacccaaagaagccatttgccgccattgttggtggatccaaggtctcaactaagattggtgtcattgagtcgttgctggcgaaggtcgatatcctcatccttggtggtggtatgatctacacattttacaaggcacagggatattctgttggaaaatctctcgtggaagaggataaactcgagctcgcaacttctcttattgagaaggcgaaggcaaagggggtttctcttttgcttcccactgatattgtagtagcggacaagtttgcagccgatgctgagagcaagattgtccctgccactgctatccctgatgactggatgggtcttgatgttggccctgatgccaccaaaacattcgacgaagcattggacaccaccaagactgttatttggaacggccccatgggagtgtttgagttccagaagtttgcagctggcaccgaggcgattgccaagaagctagctgagcttacaaccacgaagggtgtcactaccatcatcggcggtggcgactctgtcgctgctgtcgagaaggctgggctggccgacaagatgagccacatttcgaccggcggcggtgcgagcttggaactcttggaaggcaagactctacctggtgtccttgccctcgatgacgcctagatccgctgctgctgctgctactcaggttctgccagctttgcgtgtcatcttgtttcggaccttggtgtagcactgcaaggctaaggtttactcctccacacatggactttcgaggataggcttgccaccgtgttttgctagatgagtcgtgaaataagcttttacttcctcgctgctgtgggtgaagtgactggaattcggaaatttggaactaacaaaaccccccgtggatttgtatgatacgttttgttcgacagtttgcgtcccatctttcactgtggtatctggtatggtatgttcttattttttgtctgacagagtgacagtttgcattcctgtgttgccgttgctattcgttcctgctacctgtggcgccagatgaattgggaacaaggttttctagtttagttggttaaattatcttctttcagtgttgttctggagtggtggtagctaatggcggcccttgcaaataaaaacttgctacccgagtttggcgctggcgcagcaatttattcattcattttatggcccgtttggatc

SEQ ID NO: 216364 - DNA, 1030 bp, Zea Mays
ccttttcctaaaaaaaaatcgaaccgcgctggcgcgccgccgtcacgcgagcgacgtgatcagtacagtcagtcaccggccgtcacagcgcacgcgtcgtccgtccgtccgtacttcctcgccgagttgacctgggtaagtgggcgagatggaggacgaggggagcggcgaccggcgccgcgccgcggaggcactcgtctcgccgccgccgagggcgaagacggtgacgatccccgtggcccgcgacttcatcatcccccacgccgctgaccagtgccgctgctccggcttcgaagtcgccgaggagggttcgccgacgggttcgtcggcgctcggaccagccagcgctggcggtggcgtcccgtgcgagggcgcgctgcaggacacgccggactacatccggaggagcgccgcgcggcacagggtcgcgccgctcgagctcttctcctccgcctcgccaccgcccgcgggacttggcgccgctgatgcggtggcttctagtgcgaaatgccatgccacggagggcgaggccgtgggcggtcggcagccgcaagagactcgagtggataaatccgattgctggggtatctccgaacaacagtatggtgtccttctgcgggaggaggaggaatgcaggaagctgttagatgacctcatggcagagaatgagctcaagaccagggagtgccgtgaagcccaggagtcgctccgtgatctgcggatggagctgatgaggaagtccatgcacgttggctcactagcctctgctgttgaagggcaagtgaaggagaagagtcgtttgtgtcaattactgaaggcattgggcgaaaaattgaaggtattaaagtcagagcaccagaacctaagacaagaatcgctagagtacagaaagtgtgtgttagatgcttcacaaatgtctgcaacaattcagcgatatgtgaatcaatatgtaagtttagagtgcgagtttaaagatctcaaagagaagttcaatgaggaggcaaaggagcgtaaagacttatacaacaag

SEQ ID NO: 216365 - DNA, 386 bp, Zea Mays
ccaccagaaaccatgccgcatgggcgaagcgggtgcagaagtgcgtggagacgctggacgtgctcaaggtgtccaacgcgcggctgcaggcggtggtggtgacgaccaaatgggagacgttcgacgcggcggccaccacgacgaagtgggagctcttcgactgagatctgtgcagtgcagcagggcactgcagccaagaggatacgtgtatacgtgcatggtgttttatttccttgtctctcccggttttatttggtgcacattattgaattcgcgcgttgtaatcaatcatgtacggtgagacgacgacgctaggttagaacatgctataagggccgatcgaaacgaccccactgttaaccgtttgtaatcacagcaccactccc

SEQ ID NO: 216366 - DNA, 544 bp, Zea Mays
caaggatgtgctccctcctgcagtgtgttgcagggtaactagcatcgagaaatcgatttccagagggaacaaggtgccggaggtgcagatcacgacgctgatcgagctgctgatgcggcacgcggtgaagctggagagcatacctgcggccggggactcctcttcgcagaagaacattcaggcgaagcgggtgcagaagtgcgtggagacgctggacgtgctcaaggtgtccaacgcgcggctgcaggcggtggtggtgacgaccaaatgggagacgttcgacgcggcggccaccacgacgaagtgggagctcttcgactgagatctgtgcagtgcagcagggcactgcagccaagaggatacgtgtatacgtgcatggtgttttatttccttgtctctcccggttttatttggtgcacattattgaattcgcgcgttgtaatcaatcatgtacggtgagacgacgacgctaggttagaacatgctataagggccgatcgaaacgaccccactgttaaccgtttgtaatcacagcaccactccc

SEQ ID NO: 216367 - DNA, 1288 bp, Zea Mays
agatagaacttgtgcaccagggatggtttctgcacccgatacgctgcaaacaaaacgagagcgaagcgaagaagcgcgtcttccacggttcgtctcgtccacttgcttgcctcctcctcccctctcccgcgggtctcctccatcctccgcctctcttccccacgccgccacagcttcccgcactccaaggcgcggcaccaaccaaccgcacccccgcgggagctggcgtgagcaggtctgcgtgcgtgtcgctatcttccccccatggcgtgggtgatgcaccggtcgagctcggacggcgggtcgagcagcgggtggtcggacgccgcggcggccgtggtggcggcggcggaggagcgggccgggtgggaggtgcggccgagcgggatggtcgtgcaggcgcgggacgacgcggcggggtccggcggcgccccgccgaggccgccgccgccgccggagatcaaggtgcgcgtcaagtacggcggcgcgcggcacgaggtgtccgtgtcccccattgccacgttcgctgaagaagctgctggcgccgaggacggggctgcagccggcggaccagcagctgagctaccggggcagggcgcggggcaacgccgagtacctggacgcatgcggcgtcaagaacaagtccaaggtggcgctcgccgaggaccccgccagcgtcgagcgccgctacatcgagcgccagaggaacgccacggccgagagcgccaaccgcgccatcggcgccgtcgcgctcgaggtggacaagctcgccgatcaggtaactagcatcgagaaatcgatttccagagggaacaaggtgccggaggtgcagatcacgacgctgatcgagctgctgatgcggcacgcggtgaagctggagagcatacctgcggccggggactcctcttcgcagaagaacattcaggcgaagcgggtgcagaagtgcgtggagacgctggacgtgctcaaggtgtccaacgcgcggctgcaggcggtggtggtgacgaccaaatgggagacgttcgacgcggcggccaccacgacgaagtgggagctcttcgactgagatctgtgcagtgcagcagggcactgcagccaagaggatacgtgtatacgtgcatggtgttttatttccttgtctctcccggttttatttggtgcacattattgaattcgcgcgttgtaatcaatcatgtacggtgagacgacgacgctaggttagaacatgctataagggccgatcgaaacgaccccactgttaaccgtttgtaatcacagcaccactccc

SEQ ID NO: 216368 - DNA, 2013 bp, Zea Mays
cggcattgagtagtgaccagcctaagtaaagccgagcctgcgtttgcatccagaagaaaagaacacatattataatagtattgacaaacttcatcgttctatcagtgaagttctcatttcaactggggatgtttatgagtcgccctaaatttagatgtgccttgtttccttcttatgccgcttcatgcacgcatttaatatccttatatgttgcaggtggaaattaacatacataggttcttttcgggatatacaacaggcagaactcatgctaggactcactggcctcagatgcttaagctaaaagactggcctccttctagttcctttgacaagcgattgccgcggcatggtgccgaatttattagcgcattgccatttcgtgagtatactgatccacgatatggcccgctaaatcttgcagccaagcttcctgctggtgtcttgaagccagatcttggacccaaaagttacattgcttatgggttctacaaagaattgggcaggggcgattctgtgaccaagcttcactgtgacatgtctgatgcagtaaatatcttaacacacacagctgaagtcacttgtcagactgatattggcttaattgaaaaaatccaaaaagacatgagagagcaagatctgcaggaactatatgggggtctaaattcccgctctgagctcaagttgtcaccagctccaactgaatgcagggatgaatctgttgatgaaggattgaagacctcatatagtagagaaggcaattgtgtaaatagagacaattataatggtttggacatcaatgcattaccacctgatgacgatggagatattgcaaaggataaagaatcatctcctggatcagagtggcaaagtgaactaggtcagagttcagatcacaacaatggggtcaacacaactgatgagatgtacaatggagctcattacatttcacacaatcaaaaaagcactggcaggaaagttggcattaaacctcaagaagagaaatctgaaaaggctgattgcagtggcacatgtgcttatctaaaaggaagttctgaagataatccggaaatgcctattgtggagagctcagaggagcagagcaccggtggtgctctatgggatatcttccgcagacaggattctgataaattgcaagattatcttaggaagcattgctctgaattccggcatatttactgcaatccagtcaaaaaggtattgaaccctggacgtttgaacagaagcttggtgaagctgttttcattcctgctggatgtcctcaccaagtgagaaatttgaagtcctgcatcaaagttgcgcttgattttgtttccccagaaaatgttggtgagtgtgttaagctgacggaggagtttagacgacttccatctttccacaaggctaaagaagacaaactagaggttagcaatgtgcacttgcagtgatctatctggtctatccgatgtgatggatatgttttttttccagatcaagaagatggctgttcatgccctgaacgaagctgtaaacttcctggatcctcgttcctcagaagagttgaaaattggggttggtgagaacatctgtgaggatgaatctgtagatgagaaggagctgccgcctagaagaggagttgaagtgtcaggcgttgatgagaagcctaaatagaaggcgagggaggcatcaagtccaaaagtgaagctgctgatgaggtcgcccattttaggttctcggaatcgtggttaattgatttgtcaaagcccctgttcatgtatggtgatcgctggctgacaccgatggatgaagagaagcaggacacgtgtgtgctgctgatatgtcgtgtcggcgagtgacatgaatatcatccctatccctatggtattattggtcgtttatgtttatgtttgatcatttgtcttattcagttttttttacaaataataaaacaagaggttaaaagtaaatgacgtcatttatttaattttaagacggggcagatgcaaaactgaa

SEQ ID NO: 216369 - DNA, 4344 bp, Zea Mays
gccagaaacctcgtccggcggcatcagcatttcctctcccacatttcgccccgccctacgcctacacgacggcgctgcggcaagcgccgaccaatccatggcagacgaggcggagtggaacgaggctgaggccgggatcgcggccccgggcgcgggcgtggctcctccagcgcccggaggcggcgaggaaaccaagaggaagagggggaggcccaaaggtagcctcgacacgtataagaggcggaggcggaggcggcgcaccggcgacctggtgtcggcggtgcccgcggctagcctcggggatatgggccactcatgtggctgcattcccgctcccccactccctcccccctgcactgtgtacactgtacgcgacggcggcgtggcaatcacccctcaatccatggaggacgaagcggagggggtcgaggctgagtccgggaatgcgggcgcggcctccgccgccagagacggcgaggaaaccaagcggaagaggggaagtcccgaaggtagcttgaatgagaggaacaaggacaggacgcctaagcccaaggccaaggggaggcggaggcggcgcaccgacgaccagaccttgtcggtgtccgcggtgagcctcggggatctagggctcggggtagcggcggggaccaggtcgatcagagagaggaggccggcgcccaatgcgttcttcgacgtgggcagcgacagcgatactgagcatgatgatgatgatgatgaggagcaaactacgattgatcaggccaatcacgagagtgctaaaacaggtgattctgtaaagaagggaggaagacccaggaaaatggaagcgggccaattgcatactaggacgcagatttccaatggtaaaagcaacggccatacaaatgggaatcctgctgggaagaagaggggaaggggaagacccaagaaactgacagtagaacaagcgattactaggtgccagttctccaatggtgaaacaaacaagagtggtgccgaggcagcaaggagcaaacagtcaaggaatcgtaggatttcacagaatgcaaagaagcggaaaagagatgaagggaaggagtctatgacaaaaaagttgaacaaacggagtaagatgttgactggggaaaatgccctcatgtgccacaagtgcccatattgtcgcaagaactgtaattgcaaggcatgcctaaggatgaggggagttgaagagcctccaaaaaaggagatctctaaagaaaatgaaattcgctatgcttttcatattgtaaccatgctgcttccctggatgagagaactgcgacaagaacagttggaggagaaggaagtagaggctaatatacaaggagtttcaatgaatgagataaaagtggaacaagctgagtttgacctagatgatcgtgtatattgcgataggtgtaaaacatctattgttgattttcatagaagctgcaagcgttgtttctacgatctttgccttaattgctgcaaggagcttcgcaaaggtgagatcccaggaggagaagaggtggaatatgtgccacctgaacctaaaggtaggagttattcttttggcaagattcatctactgaaggatgctgatagaagtaagaactcctcaaatggcgagtcttacaacggcatgcctgctgttgggaactccaataatggtctgttgctctggaaagcaaaaagtaatggtagcataccttgtccaccaaaggaagtaggaggctgtggtagtacacttctggacctcaagtgtttgtttccagagaagatgtttgccgagctagaatatagagctgacaaagttctcaggagtgggacattagctaaagcaatggttagtagaagtgatcggtgcccttgcttcaatcaatcaggcaagataagaactgaaagcaaatcagtaagggaggctgcaagcaggaagggctcaagcgataacttcctatactgtccagttgctattggtattcaagatgatgacatagtgcattttcagatgcattgggcaaagggtgagccagttgttgtttctgatgtccttcagttaacctctggtctgagttgggagccaatggtaatgtggcgggcattgcgggaaagatccaaaggcaaagcagaagatgagcaatttgctgtttgggcgatagactgccttgattggtgtgaggtgcggagctctatttctaatgtctaagtgggtgaattcatttttgtggatgataaccattgattgatatttcttgtttctaatatcaaggttgtttggcttgtataaaatcataaaaaagttctgacttttggcagaaattcttaggacggcattgagtagtgaccagcctaagtaaagccgagcctgcgtttgcatccagaagaaaagaacacatattataatagtattgacaaacttcatcgttctatcagtgaagttctcatttcaactggggatgtttatgagtcgccctaaatttagatgtgccttgtttccttcttatgccgcttcatgcacgcatttaatatccttatatgttgcaggtggaaattaacatacataggttcttttcgggatatacaacaggcagaactcatgctaggactcactggcctcagatgcttaagctaaaagactggcctccttctagttcctttgacaagcgattgccgcggcatggtgccgaatttattagcgcattgccatttcgtgagtatactgatccacgatatggcccgctaaatcttgcagccaagcttcctgctggtgtcttgaagccagatcttggacccaaaagttacattgcttatgggttctacaaagaattgggcaggggcgattctgtgaccaagcttcactgtgacatgtctgatgcagtaaatatcttaacacacacagctgaagtcacttgtcagactgatattggcttaattgaaaaaatccaaaaagacatgagagagcaagatctgcaggaactatatgggggtctaaattcccgctctgagctcaagttgtcaccagctccaactgaatgcagggatgaatctgttgatgaaggattgaagacctcatatagtagagaaggcaattgtgtaaatagagacaattataatggtttggacatcaatgcattaccacctgatgacgatggagatattgcaaaggataaagaatcatctcctggatcagagtggcaaagtgaactaggtcagagttcagatcacaacaatggggtcaacacaactgatgagatgtacaatggagctcattacatttcacacaatcaaaaaagcactggcaggaaagttggcattaaacctcaagaagagaaatctgaaaaggctgattgcagtggcacatgtgcttatctaaaaggaagttctgaagataatccggaaatgcctattgtggagagctcagaggagcagagcaccggtggtgctctatgggatatcttccgcagacaggattctgataaattgcaagattatcttaggaagcattgctctgaattccggcatatttactgcaatccagtcaaaaaggtattccacccaattcatgatcagtccttttacttaactgaggagcataagagaaagctcaaggaagaatatggtattgaaccctggacgtttgaacagaagcttggtgaagctgttttcattcctgctggatgtcctcaccaagtgagaaatttgaagtcctgcatcaaagttgcgcttgattttgtttccccagaaaatgttggtgagtgtgttaagctgacggaggagtttagacgacttccatctttccacaaggctaaagaagacaaactagagatcaagaagatggctgttcatgccctgaacgaagctgtaaacttcctggatcctcgttcctcagaagagttgaaaattggggttggtgagaacatctgtgaggatgaatctgtagatgagaaggagctgccgcctagaagaggagttgaagtgtcaggcgttgatgagaagcctaaatagaaggcgagggaggcatcaagtccaaaagtgaagctgctgatgaggtcgcccattttaggttctcggaatcgtggttaattgatttgtcaaagcccctgttcatgtatggtgatcgctggctgacaccgatggatgaagagaagcaggacacgtgtgtgctgctgatatgtcgtgtcggcgagtgacatgaatatcatccctatccctatggtattattggtcgtttatgtttatgtttgatcatttgtcttattcagttttttttacaaataataaaacaagaggttaaaagtaaatgacgtcatttatttaattttaagacggggcagatgcaaaactgaa

SEQ ID NO: 216370 - DNA, 770 bp, Zea Mays
ttgagattctgggctgatgcacatcagcagaggctgggctagccgctgaggtgggtgccactagtagattcccatgggtagctggctgctgcgtgggccagtttttagcagagctccaagagcaacttccagactgaatcactgaattcatgagaagctgtgccaaacagttttttttttactgtgaagtgattatttgctgatttattgaagtgattttctgaaatgaaccaggagactgggaaaacaattcttgtgattcactccgcacacagaattattagtaaatcatggagaatcaaataatcacttttcacaagagaatcaggttccacagaaaatctggagcgggaggggctctaccaaactggcccttaaatcactttcatcttctccatctccaactccaaagtgcataaggataagaacgttgtgacagtgttcagcgcgcctaactactgctaccgatgcggaaacatggctgccatcctcgaaattggcgagaacatggatcagaacttcctccaattcgacccagctccgaggcaaattgagccggacatgacgcgcaagacaccagactactttttgtagaaaaaacaggtgtggctaaaaaaaaaagagaagagacgaggggaagatgcaggaaatggacccgatgttctgttgtgtctgtattgtgatgccttgctaggacatcactgtataaggtcagtcaccatgccgcgcccatgccaaccggtgctaatgccatgctggatctggatgag

SEQ ID NO: 216371 - DNA, 749 bp, Zea Mays
ttgagattctgggctgatgcacatcagcagaggctgggctagccgctgaggtgggtgccactagtagattcccatgggtagctggctgctgcgtgggccagtttttagcagagctccaagagcaacttccagactgaatcactgaattcatgagaagctgtgccaaacagttttttttttactgtgaagtgattatttgctgatttattgaagtgattttctgaaatgaaccaggagactgggaaaacaattcttgtgattcactccgcacacagaattattagtaaatcatggagaatcaaataatcacttttcacaagagaatcaggttccacagaaaatctggagcgggaggggctctaccaaactggcccttaaatcactttcatcttctccatctccaactccaaagtgcataaggataagaacgttgtgacagtgttcagcgcgcctaactactgctaccgatgcggaaacatggctgccatcctcgaaattggcgagaacatggatcagaacttcctccaattcgacccagctccgaggcaaattgagccggacatgacgcgcaagacaccagactactttttgtagaaaaaacaggtgtggctaaaaaaaaaagagaagagacgaggggaagatgcaggaaatggacccgatgttctgttgtgtctgtattgtgatgccttgctagtcaccatgccgcgcccatgccaaccggtgctaatgccatgctggatctggatgag

SEQ ID NO: 216372 - DNA, 503 bp, Zea Mays
catcagcagaggctgggctagccgctgagaattattagtaaatcatggagaatcaaataatcacttttcacaagagaatcaggttccacagaaaatctggagcgggaggggctctaccaaactggcccttaaatcactttcatcttctccatctccaactccaaagtgcataaggataagaacgttgtgacagtgttcagcgcgcctaactactgctaccgatgcggaaacatggctgccatcctcgaaattggcgagaacatggatcagaacttcctccaattcgacccagctccgaggcaaattgagccggacatgacgcgcaagacaccagactactttttgtagaaaaaacaggtgtggctaaaaaaaaaagagaagagacgaggggaagatgcaggaaatggacccgatgttctgttgtgtctgtattgtgatgccttgctagtcaccatgccgcgcccatgccaaccggtgctaatgccatgctggatctggatgag

SEQ ID NO: 216373 - DNA, 1096 bp, Zea Mays
tgataagtagatgtaccatctccatttcgaatcaggatagaagagatcagaagcgatgaatggtttcagaaaaattatgaacctatcaaagaaatagaaaatgaggaaagtcaatctcgatgatgtcaatgcagcttttgatgatcctgaggacgataatgaggatgctttcgaagatgaaacaggtcctctaacacttaatgcattcgacctaatcattctttcgcaaggattgaatcttgcagcgctctttgaccgcagacaggactgtgacaagcttcaaaatagattcttatcacgcaatccagcaaaggttatcttgtcaagcatggaggttgttgcgcaatcaatgggatttaagacacacattcgcaattataagatgagggtggaaggtctaaatgccgacaagactagtcatctctcagttatggttgaagttttcgaagttgctccatcaatcttcatggtagaactacaaagagcagcaggagatacttcagagtataacacgatacatccaaagggacaaatttacattggacagtaatgcctgtaatagggtgatgctgatgcttgctgcacagattaacttctaataaaattttcgtaaataactactgcggcaaattagatgatatcatctggaaatttccaactgagaagggaaaatcaaggataccccggttatcaaagtctcattcataatctagtgctgtgtgttatcaattactatggacttaagtggatatatttgcagagtgtatcgcaattggattatgatattctaagtgtagctcttcgagtagtatatgtttgtatattcagagtccccatgtacaaagaggccgttttaattgaggtttccgtacctcgattccctgtgcaaagttttcatcgatgttttagactgcacatctgtatattttgtcgagagcatcagtttcttagacaccacctatgtatcatgtgtttgttgccaactagtgtcatttttgtaagatctaacttgtgatatacttggattgagtggtatggttgaaaagagtgtgaaagtccattaaaaatgttagtgaaaatacaaacttacacaaag

SEQ ID NO: 216374 - DNA, 1854 bp, Zea Mays
aaaaaagagaaacccactgtctccgctccgactagcccaggccagcagaaacccactgtctccgctccgactcccttttcctctctctctctcgttctcatccatccagccaggcgagccaacaagcaagcaaaagtaaacggggcgaggagctgcggctgagcaggaggagggagccggagatggtgggtctcgtcggcggcagcacggcgcgggcggagcacgtcgtcgccaacgccggaggggaggcagagtacgtgcgccgcatgcaccgccacgcgccgaccgagcaccagtgcacctccaccctcgtcaagcacatcaaggcgcccgtccacctcgtgtgggagctggtgcggaggttcgaccagccgcagcggtacaagccattcgtcaggaactgcgtcgtgcgcggggaccagctcgaggtgggcagcctgcgcgacgtcaacgtcaatcccggccttgatatgcccgcgactgtagcttgtgaaatcaaggcacagcttgtccgcacagccgaggcggctaggcagctcgcgccaatgctcgaagtcgggaggccaagctaccaaggccgcagctcagtctaccaatcttcctcaaagatgatgtcggctatctccgtggctcatttggggtgcaaagacatggacgtcgtggacgtcggagtggtagggatggtggactcgcagagcctatcctcggcacttgagaaactctatttctgggagaggaagctgtatgctgaggtcaagattgtaggctgtggagtacggagttcacaaaatctaggagatgaacaacctcagggtaaccctctcattgtctcatgccagcagccgcacccacgtcctgttctgtctcgcacgctctcgccaacttgtggttgtccatccgccgccaagcacccgaccccagcagtcgcaatgcgattgcgttgtgcatggcggacttgagacagttgatggtttgtccgaagcattggaaatctgagaattacttctgtgaaaattatacggaacaagcagactgggcactcagaaggctatggttttattgagttttcctctcgagctactgcagaacatactctgataaacttcaatcggcagatgatgtcgaatgttgagatgacttttaagctgaactgggcttctgctagcactggtgataagcgtggagatagtggttctgatcacacaatatttgttggtgatttggctcatggtgttactgactccatgttggaagatgtgttcagagctaagtacccttcagttagaggagctaatgttgttgttgatacttgataggatgactggatggcccaaaggatatggtttcgtgcgttttggagatctgaataatgcattgtgaagatgtacatttgtgcttgtttgatctgaaaaggggacaacttttagatatagcataataggatatgaagatgaaagatctgtacttagaaatttgttcatgaatgctttgtttgacatttaacttcgtatgctggcatctcagtgtattaagtgttaatgttacaattattcttggatcaacaccattcgagtatttgactattgtttgtcacgtgcacttattattcttgcatcgctattttgaaccaatttttaagttaccgtagcaacgcaaaacttgatctgagtgactgatcgtgagctaatgtaacagtatgaattatatggcttgaacatggtaggtgtaaaatgttttgttcatcggtagagtattccagatgtgatcggcttaacagtatgaaatatatagaactatgtgagccaatgtaacagtatgaattatataagttatcaagatattatatgccctcgt

SEQ ID NO: 216375 - DNA, 1743 bp, Zea Mays
gcagaaacccactgtctccgctccgactcccttttcctctctctctctcgttctcatccatccagccaggcgagccaacaagcaagcaaaagtaaacggggcgaggagctgcggctgagcaggaggagggagccggagatggtgggtctcgtcggcggcagcacggcgcgggcggagcacgtcgtcgccaacgccggaggggaggcagagtacgtgcgccgcatgcaccgccacgcgccgaccgagcaccagtgcacctccaccctcgtcaagcacatcaaggcgcccgtccacctcgtgtgggagctggtgcggaggttcgaccagccgcagcggtacaagccattcgtcaggaactgcgtcgtgcgcggggaccagctcgaggtgggcagcctgcgcgacgtcaacgtcaatcccggccttgatatgcccgcgactgtagcttgtgaaatcaaggcacagcttgtccgcacagccgaggcggctaggcagctcgcgccaatgctcgaagtcgggaggccaagctaccaaggccgcagctcagtctaccaatcttcctcaaagatgatgtcggctatctccgtggctcatttggggtgcaaagacatggacgtcgtggacgtcggagtggtagggatggtggactcgcagagcctatcctcggcacttgagaaactctatttctgggagaggaagctgtatgctgaggtcaagattgtaggctgtggagtacggagttcacaaaatctaggagatgaacaacctcagggtaaccctctcattgtctcatgccagcagccgcacccacgtcctgttctgtctcgcacgctctcgccaacttgtggttgtccatccgccgccaagcacccgaccccagcagtcgcaatattacttctgtgaaaattatacggaacaagcagactgggcactcagaaggctatggttttattgagttttcctctcgagctactgcagaacatactctgataaacttcaatcggcagatgatgtcgaatgttgagatgacttttaagctgaactgggcttctgctagcactggtgataagcgtggagatagtggttctgatcacacaatatttgttggtgatttggctcatggtgttactgactccatgttggaagatgtgttcagagctaagtacccttcagttagaggagctaatgttgttgttgatacttgataggatgactggatggcccaaaggatatggtttcgtgcgttttggagatctgaataatgcattgtgaagatgtacatttgtgcttgtttgatctgaaaaggggacaacttttagatatagcataataggatatgaagatgaaagatctgtacttagaaatttgttcatgaatgctttgtttgacatttaacttcgtatgctggcatctcagtgtattaagtgttaatgttacaattattcttggatcaacaccattcgagtatttgactattgtttgtcacgtgcacttattattcttgcatcgctattttgaaccaatttttaagttaccgtagcaacgcaaaacttgatctgagtgactgatcgtgagctaatgtaacagtatgaattatatggcttgaacatggtaggtgtaaaatgttttgttcatcggtagagtattccagatgtgatcggcttaacagtatgaaatatatagaactatgtgagccaatgtaacagtatgaattatataagttatcaagatattatatgccctcgt

SEQ ID NO: 216376 - DNA, 964 bp, Zea Mays
cttaacaaagtctctagaggtggtttgtctagatacttttttaaagacaggattatgagacagcctaatatactcttcaaaagcaggtgactcagcaaaattaagaggaagatcaagtctagcaattaatctacatatctgagttctagcacgattaggacagtatcccattcgcagccaaagttgaaagcttatatggatacaccaactctcttctaaggccctgcatatttccacaggctgtgatatgattcttgaaagatgacgactcagttcctgttgtcgatgattggggaggttgtgttggtattgttcaccgtgatgattgtaccttgattgtaccaagctggatgcacctcttcttgtgcctacttcaaccaccgtggagcacgtcattgacctactcctcagggagaaatccgagatggtggtggtgaagagcggtaacatgtacgaaggcagctcaagacccttgggtattttctccctcgccatgctgtggagtttcaccagcgactactcgtcggaatcagatgtcctcgacccaggcgtctcctgggcaaccaaaccaaaacaagatgtcgacacctacaatcacggctgattcagcagctagtttggtgtcctttaccagcttatagcaattgtagtttagatggttagctggtctgagtatgttcgagttgtcttatctgtatgtcagagtttttttctttttcttttttcttatagcaagtccgcatcgtgatgccgcgcaaaccagtaatgtaatggtcctccaattcgacaaggagggggcgaaatggttttttgtcaaaggaagccgctaggctgatcatgacctgcccgtggatctgtatgatgttttctgatgcacagagcaaaagtgacagtggagcggagattccggattcccgcccagccaccgcgcgcgcagggatatggtcctgagtcctgaccggtc

SEQ ID NO: 216377 - DNA, 479 bp, Zea Mays
ctggttacacaagccaaaaaagtgtgaagtggaatcaaaatgggaactgggtgcagactgcctcaaaggatcagattattaaggattctatactatctatggagatggcccaatccatccttatgatcaaatgatcgataagtttgttttctgatgccagtaaattattgattttggtccatttgctaattcattttgcaactgtatgacattagatccatgaaagagcagcaatccttctgaggggacgtcgctggttagatagttattacagtatcaagatttttatatgttcctttacatattttaaggttcacaaattgatacaggttttatatgtagcagttcatttgttcactgtaaccatacatgtaaaccataagcaaatgtaacataggagattgttatataaagagacttttgcagccactttgatgttttgttttatgcttctttttgtgaaaaattattgtggtgct

SEQ ID NO: 216378 - DNA, 4218 bp, Zea Mays
atgcctggccggagcagtggccaccactgtcgtcggatgaggagaagagggttccagttgcggtgtgggtcacttggccgaggagaagagggtcctcgggcggttctggctcccacctgtccccgtcaatccgcagtcaagtcggcaatcccagtccatgcaaacaccgcttctttctcctgcatgcgcggtctgcggtgtggctggctagtggctgcggcttccatccgtcgtctccgtccatccgtccctggccgactgcctgcctgctggctagggccaatgccacagggagcaggatcaccagcggcagccgacagcgagacgaggcgagtgctatgcgcccactcccaatcgcgcggggccgtttcctcccagaccgctgcggcgtcgaagccgcagcagcagcctcctcctcctcggcctccgcggcagccaccgtcgcctccatctcggtcgcgtgctcgaccgccttcacctggagaaacacaagttacacatatcagcagcacaaatacaggaagacgatggaacaacgactccatgggggaccgcaatcagcggcgagacgcgagcgtggcggcgaggtctttgcgtacgggcctgaaaccagagcatacctagaaacagcccaacatttgcgcgaggacgaaaccctcgcaccgtttcagttttccctcccaaacttgccccaaatatctaaatccatcctccttcgcaggcgctccaactttccccttcccggcaaccaccctgtgccttcctcgctgcctcgattccgcttctgtgctcggctagggagagcggcagagtatcaggcgggtgacctctatctcgccggggcggggcggggcggtgacgctcgcaatccctcgcttgctgctgcattttcgaatactgagatggccatggagatgtccccgcggcagtcgcctccgcggacgccgcgtagggcggcgaagccgcgactgttcatcaaggagatggtcctccgcaacttcaagtcctacgcaggggagcagcgcatcggtcctttccacaagagcttctcggctgttgttggtccaaatggcagtggaaagagtaatgtcattgacgcaatgctttttgtgtttgggaagcgtgcaaagcagatgcgcctaaacaaggtctccgagctcatacacaattcttccaatcatcagaacctagacagtgctggtgtttctgttcattttcaagaaattattgacatggatgatgggaactacagtgctgttgagggtagtgactttgtcatctcaagggttgctttccgtgacaacacttctaaatactacataaatgagcgtggaagcaattttactgaagtaactaaactgctgaagggcaaaggagttgaccttgataataaccgttttctcatcctccagggtgaggttgagcaaatctccctaatgaaaccaaaggctcaaggtccacatgatgaaggttttctagagtatcttgaagacataatagggacaaaccagtatgttgaaaaaattgaagaagcgtacaagcaggagaagatacaccagaattcacaaactctgaaggaaatggaggctatttacagtaaacatgtcaaaaggcaagaggaccttgaaaataacatgaagagctgcaaagaccagtttaaagagtttgagaggaaagacgtaaaatacagggaagatctaaagcatcttaagcagaacatcaagaagctggatgacaaagctgaaaaggatacatcaaaacgtgatgaaaaaacaaaagagatggaggagtcatccaatctcattccacagctggaggcagaaatacccaaattgcaaaagcgacttaatgaagaagagaaagtcttagagcagatcaaagcatcctctcgagaagaaactgagaggtttcgtgctgaacttactcaagtaagaactgagcttgaaccatgggaaaatcaaattattgaacataaaggaaggttggatgttgcatctgcggagaaaaagttaatgaaacaaaagcatgatggagcacaagcagagttaactgatgcacaaaatcagatggaaagtataaaggagaaagttaaaacaaaggattcatacattgtggggcttcaagaaaaaatagagaagcatttgaatgaagcatctgaagctcgcaaaatcgaacaggaatgccaaaagcaggaggattcactgatccctctggaacaagcagcaaggcagaaagttgcagagatgaaaaccactagggattctgagaagaaccaaagtactgctctgaaggcaattttgcaagccaaggaatcaaatgaaatacaagggatttatggcaggcttggtgatcttggtgcaattgatgtaatttcggtaacactgaacttctcaaacaaggagaatatgaaactctggtctgcagcaaaatatgacgtggccatatcaacatcagcttcatctgggcttaattatattgtggttgaaacaataaattcggcgcaagcttgtattgagttgttacgtagaaggaaccgtgaggaaactgtaacttgtttaatcctggaaaaacaaacacacctccttcacaaaattaaggagaaagtaaaaacacctgaaggagttccacgcctttttgatctagtaaaggttaaagatgagaagctgaagttagccttcttccatgtcttggggaatactgttgttgcaaatgatcttgatcaggcttcacgaattgcatacactgcagcaaaggagttccgtcgggtagttaccctcggcggtgaattatttgagaagtctggtaccatgagtggtggcggtaaaagggtacaacgaggcatgatgggaacagccatccgagaaagcttttcagaagaggctattaaaaatgctgaaaatgaactaaccaagcttgttgatgaactcaacaagttgcgtgaaaaaatgaataatgctaaaaaacaatatcgatccatggaagatgctaaatcccgtcttgaaatggaattggcaaaagctaaaaaggaggttgagagtatgaatgcacaatatatttacaatgaaaagcgactagattctctgaaaaccgcttcacaacctaaagctgacgagcttcgcagaatgcaagagctggatggcatcatatctagtgagcaagctgaactagagaggctcacaaagtgttccagcaaacttaaagatcaggcaagtgcctatagacagtctcgtttccatttccaggcttcggaacttcaacaaaaagttgaaaatgctggagggaagaagctgaaggaccagaagacaaaagttggcaacatccaatctgaacttgacaaaacaagttcagaaatcaacagacacaaagtcaacgtaacttcaggtgagaagttggtgaaaaggttaaccaagggcattgaggagtccaagaaagatagagaaaaactttctgctgaaacagagaagatgatgtctatgttcaaagagattgagaagaaagcgtttgttgttcaggaagagtataagaaaaccccggagatgatagacaaccataaagttgagcttgacaaaactaaggaagaatacaccaaactaaaaaaagcaatggatgaactgagagccacagaggttgacgctgagtacaaattgcaagatacaaaaaaacttgccaaggagtgggaaatgaaggtgaaaacattcaagaaaaggcttgatgaaattcagataaatgttgttaaacacatggatcaaatccaaaaggatgctgttgatcctgataaactcaaagcgactctaggtgatgagcaactaaatgatacatatgacatgaaaagggcaatggagatggtagcattgttagaggcccagattaaagatttgaacccaaatctggattccatagcagagtaccgcacaaaggcttgcttgtacggtgagcgtgttgatgagttaaatgctaccactcaagaacgtgatgatcttaaaaagttgtacgatgggttaaggaagagaaggctagatgaattcatggctggattcaacataatatctttgaaactgaaggagatgtaccagatgattactcttggaggtgatgctgaactggaacttgttgattccttggacccattttcagaaggtgttgttttcagtgtgaggcccccaaaagaaaagctggaaaaatattgccaatttatctggtggtgagaaggtatgttcc

SEQ ID NO: 216379 - DNA, 1833 bp, Zea Mays
cacaaacacgcacgcacacacagcacgactcgaacgcgtcgcgtctcttctctcttttctcccgtcctttgtccctctgccctgcaggcctctctgcctccgccccgcagttccgcacccaccctacgctctcctccctctccacggaacgcctcgcgagggaacgcccacgcagctgccgggaggattcggcgggcgtccgcctggacgcgaaatgcccgcccagaagggcccgctcccgtcgcccacccccgatgattccgaaggccgcgtcgcagtgcggcacaccgccgccagcggtgatggaggcaggagcggagcctcacatgagatggatggggaggcctccgcgcgtcaggagagcccaccgcatcggggacctcgcgacggtgatcccgacgataaggaagagggtggctgcggcggaggcgacggagtcgacaccaccagcgaatcgtctctgactccgagcgccggaagcatggacgagtttatgctagtgaaattagcagagataaggaaggaggttcagtgccctatctgtttaggcattattcggaagacaaggacagttatggaatgtctgcaccgcttctgtagagactgcattgacaaatctatgcggctaggaaataatgaatgcccatcgtgtcgcactcattgtgcaagtcgacgttctttgagggacgatcctaactatgatgcactgattgcagccttatatccagatattgataagtacgaggaagaggaacttgcttttaatgagcaggagatgactcggaatcaaaagatacaagaaaccattgaggaaacattccgaagacagtcccaggcaattggtaagaaacgttctatagcaaaagaaactggcactgcctttgcaaggaagtacagaagaaatatgcgaacacgggggagaggtagaactactacccctgatattgctcctactagctcaaatgaggaggatagggaaggagaaaatgtcaatgaggtcaccaaagtaccatcttctgctgacgatcattctccagatttaagacagaaaagatgcaggaagacgtccacatcacaagcatcgcctgctagaaacattggcagtagtgatcacagctttgaggagaacgatgaattagttgccgcaaaagaaattttagccacctctccattgcgaggggagatgcttgcatggggtaaaaatggtacacggagccaaaatcgacatggcagtgctggttcaaatggcaggattggaaggagcgggcgcattgccaaattggtggatcacctatgtaatgctgatgaaatggataaagagttaattgctcttcagttgtctcggaaagtcgaagaacttgagatgtacataaggatggacggcgaccatggaagtgttggctcgatggcttgcagtataggtgaatttgatggcttggaaaggctgagggaagataaacttctttcggaacttcatccttcgtttgcctctagcaacggtgatctggagttgcgatatgctttgaaaactcgagactagatcagttttaatcttcagctactaatttatgaagtcactgtccatacggtggtgatgcaaatgagatctgcatctggtgaacggatttatgtaaaaagaatattcaatgtgaaaaaatggtgaacctgtttttctgatgagtcttgctaggttaatttaccaactttgtaaatatataatgaactgaattgtgaatgtttgcagtaggtgaacatgctgtctaatatttatattcactgttcatttatatgagaagtgagataataggagtcaagctgattacagtaatataa

SEQ ID NO: 216380 - DNA, 1465 bp, Zea Mays
gggaatgcgatgcccccaacaggggaagcagcgcccacgagcgtcgccgtcgccgaggctttcgcccaagaagcccccagcaccaacgcattattcggaagacaaggacagttatggaatgtctgcaccgcttctgtagagactgcattgacaaatctatgcggctaggaaataatgaatgcccatcgtgtcgcactcattgtgcaagtcgacgttctttgagggacgatcctaactatgatgcactgattgcagccttatatccagatattgataagtacgaggaagaggaacttgcttttaatgagcaggagatgactcggaatcaaaagatacaagaaaccattgaggaaacattccgaagacagtcccaggcaattggtaagaaacgttctatagcaaaagaaactggcactgcctttgcaaggaagtacagaagaaatatgcgaacacgggggagaggtagaactactacccctgatattgctcctactagctcaaatgaggaggatagggaaggagaaaatgtcaatgaggtcaccaaagtaccatcttctgctgacgatcattctccagatttaagacagaaaagatgcaggaagacgtccacatcacaagcatcgcctgctagaaacattggcagtagtgatcacagctttgaggagaacgatgaattagttgccgcaaaagaaattttagccacctctccattgcgaggggagatgcttgcatggggtaaaaatggtacacggagccaaaatcgacatggcagtgctggttcaaatggcaggattggaaggagcgggcgcattgccaaattggtggatcacctatgtaatgctgatgaaatggataaagagttccagttgtatctggttctgcttcctgtcgatggacaaaccatacctcacttggaaaagccttatctaagttgtcaaccaaccttgtccattcaacatcttgtagagttgtctcggaaagtcgaagaacttgagatgtacataaggatggacggcgaccatggaagtgttggctcgatggcttgcagtataggtgaatttgatggcttggaaaggctgagggaagataaacttctttcggaacttcatccttcgtttgcctctagcaacggtgatctggagttgcgatatgctttgaaaactcgagactagatcagttttaatcttcagctactaatttatgaagtcactgtccatacggtggtgatgcaaatgagatctgcatctggtgaacggatttatgtaaaaagaatattcaatgtgaaaaaatggtgaacctgtttttctgatgagtcttgctaggttaatttaccaactttgtaaatatataatgaactgaattgtgaatgtttgcagtaggtgaacatgctgtctaatatttatattcactgttcatttatatgagaagtgagataataggagtcaagctgattacagtaatataa

SEQ ID NO: 216381 - DNA, 384 bp, Zea Mays
gcgacgcgcgcggcggtaacagatccgacccaaaatcaaggatgatggacttaattgggagattatttgacggactcaaaattcaatcaagaagtttatgtgagcagtttagtatctggatttttagcaaggatgaccattaggatggcatgttcaaggttgtcgtggtgcccttggtggagaactgcatagttagctataacgccacattcttgcttacggccaactaaactgcaggtttaagttgctgatcgctgttgtaaatactcaagttataatattgcgttgtcatgggtttacctttcaattaattacaaatttgtctacttctgctagacagtaagcgaaaaattacaatgcttggtgacatagaaaatggaacac

SEQ ID NO: 216382 - DNA, 1263 bp, Zea Mays
cgtccctacattggagggctccaaggatgcggcacaaaaggctcgcctccctcccgaccaccaaacaatctccaagaatagcgggggggacggctataaatcggaaaatctgcccctcaagtttgccaactttaggataggccgtgcaaatccatttcttgccttgccggcacagctctgcatagctcctcccaagctttaggattaggatttggatttggatttggatttggatcgggtgtgtttcctgcgtaaccatgagcgagatcatgaagctaaagcgtgggatcagcaccaaaccaggagaccacctcgtccaaaatggccaacaacatccatgtcacgaatgggaggagcaacagcgctactggccctcgccgcgggcgccgccggcgagcccgacggagtcgcccaggaccccaggcgggagccagaagaaggcggttctgggcaaggtgaagagcaaggccaagaaatggatgcacatgctgcatcacaagaagaaacccgcgccaccggaggagatgatgtggacccccagggccgggcctggacccagcgcggcacaagacagcatgcccagcagggaggagcgacacgccgccgagcaccgtggcactggcactggcacccccaggaaaccgcagcaacacgcgccttcctgttcctcgagcgatccagagcgggcgtccgaggtgttcctggaagcgtcaccgaggcagaactcgccggtcccgagccccaccgcgcacaggcagcagcagcagccgcagccgtacttcaaggtcagcagcaggttcgagtcggagatgaaggaggccaacgagatgctgatggagtccaagaagctccgcgtcaacacgaccaagcccagacggtgctcgagatggtcgccaggatccaggaggcggtggcgctcgttgacggacggcggcacgtggtagagaggctcgtgtcgctcggcaggtacctggtgatgaagctggagcctgggcaggacgacacgttgctctcggaagcgatcactgacgccgtcctcgacctgttcgacgcgtggagcgagagcgtcgagaggcctttggtgcgacgggcgaaggagatctcttcttggttcctgcaggaaggaagagaagacacacctcctcctgttccgccgtctacgcgtccttgtgcggccgaagctcataggatgaaaaggtgaatccagaacttttctcgttggtacacttcaattcgagcttctgaaatggactgcacgtgaag

SEQ ID NO: 216383 - DNA, 909 bp, Zea Mays
gtcaatccaggctccgctgctcgagcaggcggagagagaaagaagaagggagctaacgatgcggcctggatcgacctccagaccttctccgcgccggtgcctctatgtctatggctccgcctccgcgctcccgaagctgctgctgctgcttctagctgcatcatcatccgcgcaagcccagcaagcggcgaggatgaagaccgatccagtcgaagcggcggcggtgaacgcggtgttcgccaagctccgccagacagcgtcgtcggaatggaacatcagcggcgacccctgcaccggcatcgccacggacggcaccgtcatcgaagacaacggcaacttcaacccgggcatcaagtgcgagtgctccgaccagaacaacatcaccgtctgccacgtcaccaagctgaagatatacgcgctcaatgccgttggccccataccacaggaactgcagaatcttacgcgcttgatcaatctggatttaagcaagaattacttaacaggttctttgccatctttcctcgggaatttgactgctatgcagtacatgactttgggcaccaatgcattgtctggatctgttccaaaggagcttgggaaccttgtgaatcttgtatctctaggctttggctcgaactacttaaatggcccccttccttgggagttgggaaacctggcaaaactggagcaattgtatattgatagtgccggcctaagtggtctcctaccatcatcgctttctaggctaacaagaatgaacatactgtgggcatcagataatgattttactgggcaaataccagattatattgggagctggactaatttgacagatctgcggtttcaaggcaattcgtttcaaggtccacttccagccagtttttctaatctcgttcaactaacaaactt

SEQ ID NO: 216384 - DNA, 4112 bp, Zea Mays
aaacaaaacgcagatgaaaagtttaatatatttgcatcaaattcacattggctgcacattttatttctctcattatgattgaagctttgagaaatattatagtgcaacggctttagcgagcaatgaataatgttgtatattcagaaacctcgcatccaccgtccgtcccttccgttgcgccggcccggataaggtaaggagaggataccttcactgctctgcggctgctccgccacgccgccgtccatcgtccatcgtccatggcgtcaccgcaccttcctttcctctccttccccaaaacattaccgccgctacctcccccactcaagacccacgcccaccgcacctccctagccgccgctcctgctccgccgcccgccccgcctgacggcgcggggcccgccgcgcccacgcgtggggaccgcttcctcggccgccagctggccaccgaggccgccgcgcgcgtgctcgcgcccgaggacgccgacaggcggcgccgacgcaaggagaagcgccgggccttggcacggaagccctccggcctcgcatcctgctacggctgcggcgccccgctgcagacggcggaggaggccgcgccgggatacgtcgacccggacacgtaccaactgaagaagaggcatcaccaacttagaaccgttctatgtgggaggtgcaagctgctgtctcatggccacatggttactgctgttggtggccacggcggttatccagggggcaagaagtttgtttctgcggaacagctcagggagaagctgtcatacctccgtcacgagaaagcgctcatagtcaaattggttgacatcgttgacttcaatggaagtttcctggcacgtgtacgcgattttgctggtgctaatcctattatacttgtgataacaaaggttgatctccttcccagagatactgatttgaattgtataggcgactgggttgtcgagtcagttgtcaagaagaagcttaacgtccttagtgtccatttgacaagctcaaagtcattggtcggtatcacaggggttatatcagagattcatcaggaaaggaagggccgagatgtatatatactgggttccgcaaatgttggaaaatctgcatttatcagtgcaatgctaagaacaatggcgtacaaggacccggtagcagcggcagctcaaaaatacaagccaatacagtctgctgttcctggaacaacccttggccctattcaaattgaagcatttttaggcggagggaaattgtatgatacacctggagtccaccttcaccataggcaggcagcagttatccatgctgatgatctgccttctcttgcaccacaaagtcgtttgaaagggcgatgttttccggctaatgatacagatgttgaattgagcgggaattcattgttctgggctgggctagtccgcattgatgttatcaaggctcttccacgttcacggctgacattctatgggcccaagaagctaaagattaatatggtcccgacaacagaagctgatcaattttacgagactgaagttggggtcacattgactccgccaactggtaaggagagagctgaaggatggacagggcttcaaggggttcgcgagttgaagataaaatatgaggaacgtgacaggcctgcctgtgacatcgcgatctctgggcttgggtggatttctgtggagccatcaggtgtgccttcaaacagcgctgaggaagtttatgatggcggtgagctgcatctggtggtacatgtgcccaaaccggttgaggtcttcatgcgtcctccattacctgtcggcaaagcagcgtcgcaatggtaccggtatcaagagctgacagaggaagaagaggagctgaggcctaaatggcattactgatgctgctctgtttctctagggctggctctagcagtagtacagatttctgtaatccaaatatttagcagagtgttaggacctggtgatgaaatggattcagaaaacaagttttgaataaatctgtctctggtggtgtctatttagcactttgctttggcatgaggaaagaggaatcctcccatgtcctgcacatgtactcggaatgaaggaccttccagacaaggtattgaagagatttaccaatttaatttcggcaacaaaactgctctggtctggtctgcctttagccatatgtaagcacaaaattttcgttttcacgtcgtgtcttgatgctcctatttaggagtacgtatacatagccaggaagcgtattttttttgccatccattctccttattcctcgttgaattcggcccattggattcctccgacgcactgacccgcagtcccgcacaaccaccaccaccaccaccaccatggccgccgcgccaacaagctccggcgactcgccgccgcctgcgcagccggagtacggttccatctcctccatggtagcctcgtctgcctcctccgctgcagccgcggtcgcggacttcacccgctgggccgagaccttcggcaccgagaaggccgacgccgccaaggctgccctaacctccgccaccaccttggccacctcatctgcctccgaggcggcttctgcttcctccaaggccgcgtcctccgcatatgcggccgcctccgacctcaccctcgtcgccaaggaggagctggaatggttcaagacggagtactctgctcacgagcagattgtgttcggcaagatcaaagagggtgtcgtcatggcgataatgcatccaggcattgctgcaggctctgcaacccttgcagggattatccttttcaaaaggccaaggagctaccttattcaacgagtacggcacatgtttgttagcaaggagaccctactttctggagtacaggctgaagtgaatcacatgcggcagactgtgaatcttgtatccaatgaacgccaaaagctgttggatagagcagcaactgcagagaaaagattccaaaaaggatggaatacactcagggaagaagggcgttccattcaacacgagttgcgtgagattagtgatattgaaaaccaagcagtaggtctgaagggaattcttgatcagcttcccagagcacatgcatctgaatttcggtcgaagatgtctggcctagcttctcaggttaagaaggagaagcgagtgctcaacgccgccctcacgaagattgtgaactacggtgtccccatctgactgccactccagccagttgttctgagggtccattgtattgtatcagatttttgtgaaggaagacatgttcgatgtgtagggtgaacgctatactgcccacttggtttcgagaaaaggaaaagagaataagttgtgacccgtgcagatttctaatgtcgcaaaagcaacatctttgaaacctgagtaacagatgacattttgctatgaaaaaaaaggtgcccacgaaatgctgatcacgggggacgctgcagttggaatgggcatgtgggacttttgcacgagattctggggtgcgctctaaaccaccaaggtatgtcagacatgtactaacagaaatagaaatgcggggggttttggacattttgtagctatatatatatatatgtgtgtgtgttttgttttatgttttagagagaagggaaagagttgggctggcctcgtttacaggtgagaaaaatggagcaggagccgcatgcagatgcccttgtacagataatctgcgcctacccagttttttttttttttaaaaaaaaaacgcgaacaagttcacacccgcactccattttgatgttcgtttctgggcgaaggatagaagagaaggtgcgttctagtgtgacaagtatggctctgtagagtactgttgttttggtgtactgcactagccgcagtatattgtctctgttttattctttgggtacgaatcgattctttcatcttgaaacaattgtgttacgccttgttgtgtattcttgtgccctggccgatgtggcggatgcaattgtacgtgttcttcaggtcttggttgtgctgtcgctatatccttgagcacacgtgtgtgctgagctgttttgttgacaatgcgcatcgtaatactggatctttttttaataaactacacgatttgcagttagttgtt

SEQ ID NO: 216385 - DNA, 2976 bp, Zea Mays
accgtggctccgcccccgagattgtcgcgcccacagcctcgcctcccatggatcctctcgcctctgcatctcgccattgttgccgccattctcgcgcccgtgcccctccattctcgcctccgcccccggatcctctcgcccccgcgaccttcgatggaagcccgcaatctgcgcccttccatcgccgcaatgcatcgatcccattccattttgcgagaagggcgggcgcgtgcagggcttcgcaatggctgacggttcaattggaagatcaaccacagggagtaggactcctaaatgagccgccaactgttcttctccttcccaatcatcggcaatcccacacgctctggtggctaaggctgcgggattcccaggtgcagcgtgctggggtcgcccaggcacggagtcggccaccacgcagcagccgtcgcccctccacctcgttgtcgtccgtccatggtacacctcgcccgcggccatcatccctacactagtaccagcgcgtgtatcgagttacagttctctctgttttcttctgaagagtgagcaaaggatgcacacgctggtactgtggtatgtgctgatcgattaactgtaatgagcctgtgttgatccattttcttcctacgaagggtgatagaagatgcagaggagaggggttggccctctttgctatttagagaggttacaggctcattgcagttatgccgactaaatactcgcttgtcatgcagatcttgttgtggttcatgagcactgagctatacttcaacttaactggtatgattagttgaaagaaaggtacaacatcaccttacgtgttgaattgccttgattaagaaatttatgggtagccttccgtgtgtgtatgtgtgtgcagattcagcccttggctttctgggcatgtttgacaaagttgaatagctatgaaaccgaaaacaactgccaaatgtacatgttctgaatcaagttatgatgctaatgtctcagcgaatgtacatgttctgaatcaagcaatggcgaattttgaagcccactttagattaatcggtatatatggatacagtagcatgtgttcaaatgatgcttatttctcaacgaatagtagcaatcattggtcaggacatgtagcttaatgctatcttgttgttattacatgggtgtcgtaacaccttgccgactgttcataaacgcaggacctgagatctagaaggacacaacaggcaaggtggatgtattcgtagctggttcaggcacagaagggtcgttttgagatactctctgtctgggtcgtttcttcaataagataacggtggccatcatagtcgaattggtgggcctgctagcgtccccaatggtcgtgtcctggcctgtgtggtagtgttgccggacttctgatagttgcttcgccagtacagatcatagtggaaccatcatggatgtttaatattgcagtccaaggtaagaaagtattgcagaaccaagcacaaaagcatccaggaagaaaaatagaagggacaagctgaatgagagaggaattaggtcagcaattttgaagttgggttaaggtttttgacacttccatcattccctccatctccctgtttacatatttgtcatatcactccctaattatttagttgggatctcggtaattgctacttgtaatagagctctacacgccaatcttgttacacttttttacctcatagtgatctttgtgtattgcgcacaacattatgtaccttactacgttttctcagtaattgctacttgtaatagagctctacacgccaatcttgttacacttttttacctcatagtgatctttgtgcattgcccacaacatcatgtaccttactacgttttcctgcttattgaaatcctgtgagccctactcagtttttacctatcttttgattttacccatggagaaatattggctgggtgactgccatgaaggcatgaaccttaaaaaaagtttgttttttcaattctaaatatcttgtgacttatttatattgagcatgtgtttacaaataatgttctcatcagctcatgtggtattttaagctcgcctctacatggacgccggcctcgcttccgcagtcaccatgctccggacctgcaccgatgtcgtgcacctcgcgcacgttctcgagcagtttcgccttgcctggtgcggcaagctcgttcgggacacccgcgccgtcgctccgtcaagggcctctgcttcgacctcttcatcattaggggtggaaacagagctttcaatgtatgctggaggtgagcgatgtgatcgatattatccatgcttgataaattatgacaatggtgatggccatgatatatggtcaggttctatccggacatccggagaactgggcaccggtgatcggatggcggcctccggcgctaagatctggcggtcacaacctagccgcgccgtcgacgagcaccggtaccgcccccgttggcgcggacgcctgccatcggccgcgagctgttgatgggggaaacaaaaataggaagggacatcggagacaatccctgccgcgttcatcctttattaacgagcagaaaccatggttcgggacttcaggtgcagatgggggacggaggccgggcaacgcaactaactaacccaacaaaggcaaccaaccactactcgcccgttcctcctgctgctcagctcatgctcctgagtcctgcctggatggtctctttcctttgaaactgggcaatgtttggaccaaccaaccaacaaccgagatgcccaggttattcgtcccggaggataggacgcttgggcttacatcagcctccgagtcgatcggccggtggtcaactaatgaaacccgtttcatttttgaactaatgaaagagagtatatattagtgaaaaaggtacataaacggaatattatttatttcttcacgtaacaaaaaagtgcataacatgctacgaaaagacaaa

SEQ ID NO: 216386 - DNA, 3138 bp, Zea Mays
accgtggctccgcccccgagattgtcgcgcccacagcctcgcctcccatggatcctctcgcctctgcatctcgccattgttgccgccattctcgcgcccgtgcccctccattctcgcctccgcccccggatcctctcgcccccgcgaccttcgatggaagcccgcaatctgcgcccttccatcgccgcaatgcatcgatcccattccattttgcgagaagggcgggcgcgtgcagggcttcgcaatggctgacggttcaattggaagatcaaccacagggagtaggactcctaaatgagccgccaactgttcttctccttcccaatcatcggcaatcccacacgctctggtggctaaggctgcgggattcccaggtgcagcgtgctggggtcgcccaggcacggagtcggccaccacgcagcagccgtcgcccctccacctcgttgtcgtccgtccatgatcttgttgtggttcatgagcactgagctatacttcaacttaactgattcagcccttggctttctgggcatgtttgacaaagttgaatagctatgaaaccgaaaacaactgccaaatgtacatgttctgaatcaagttatgatgctaatgtctcagcgaatgtacatgttctgaatcaagcaatggcgaattttgaagcccactttagattaatcggacctgagatctagaaggacacaacaggcaaggtggatgtattcgtagctggttcaggcacagaagggtcgttttgagatactctctgtctgggtcgtttcttcaataagataacggtggccatcatagtcgaattggtgggcctgctagcgtccccaatggtcgtgtcctggcctgtgtggtagtgttgccggacttctgatagttgcttcgccagtacagatcatagtggaaccatcatggatgtttaatattgcagtccaaggtaagaaagtattgcagaaccaagcacaaaagcatccaggaagaaaaatagaagggacaagctgaatgagagaggtatgtgccctggtgagacaaatcattttagttcttagatataatacttgcatcattgtctaagctggtagcatcgtagatatattttttatccaaataatgattgtgctcatgtaaaccatgccaaatattattctacaatgaatagcccatcgctgaaaaatgcagaaatcaagaagagcttttaccattgcattgcaaagtccacatgttcgacgattcggtcttatgatttgtttagaattttgtttcacttattaacaacttattacatgtatgggttattggttatgaacctatctaaaagttgaattttaaattaattgtaccttttgtcatggacaaaatttggttatccttgaaatgttaacctggtacctagcataataagatgttttgctggttttaaccaaagtggtcaagtttgttagtataagcatgccacgggcagccaaccatacttcatgttaaacattataaaaatgatactgtattgattagcattatcttttcatttttacatgaaaaatcttgttgcattttttctggtggtttttttctaagcttctacccaggcttacttcatgtgtgtcaccatttaaaaagctaatacattttgtttgtggtgccacaggaattaggtcagcaattttgaagttgggttaaggtttttgacacttccatcattccctccatctccctgtttacatatttgtcatatcactccctaattatttagttgggatctcggtaattgctacttgtaatagagctctacacgccaatcttgttacacttttttacctcatagtgatctttgtgtattgcgcacaacattatgtaccttactacgttttctcagtaattgctacttgtaatagagctctacacgccaatcttgttacacttttttacctcatagtgatctttgtgcattgcccacaacatcatgtaccttactacgttttcctgcttattgaaatcctgtgagccctactcagtttttacctatcttttgattttacccatggagaaatattggctgggtgactgccatgaaggcatgaaccttaaaaaaagtttgttttttcaattctaaatatcttgtgacttatttatattgagcatgtgtttacaaataatgttctcatcagctcatgtggtattttaagctcgcctctacatggacgccggcctcgcttccgcagtcaccatgctccggacctgcaccgatgtcgtgcacctcgcgcacgttctcgagcagtttcgccttgcctggtgcggcaagctcgttcgggacacccgcgccgtcgctccgtcaagggcctctgcttcgacctcttcatcattaggggtggaaacagagctttcaatgtatgctggaggtgagcgatgtgatcgatattatccatgcttgataaattatgacaatggtgatggccatgatatatggtcaggttctatccggacatccggagaactgggcaccggtgatcggatggcggcctccggcgctaagatctggcggtcacaacctagccgcgccgtcgacgaggttttcgcctgtgattccataattcgaggaagagccgtgctgctcgcagcaccggtaccgcccccgttggcgcggacgcctgccatcggccgcgagctgttgatgggggaaacaaaaataggaagggacatcggagacaatccctgccgcgttcatcctttattaacgagcagaaaccatggttcgggacttcaggtgcagatgggggacggaggccgggcaacgcaactaactaacccaacaaaggcaaccaaccactactcgcccgttcctcctgctgctcagctcatgctcctgagtcctgcctggatggtctctttcctttgaaactgggcaatgtttggaccaaccaaccaacaaccgagatgcccaggttattcgtcccggaggataggacgcttgggcttacatcagcctccgagtcgatcggccggtggtcaactaatgaaacccgtttcatttttgaactaatgaaagagagtatatattagtgaaaaaggtacataaacggaatattatttatttcttcacgtaacaaaaaagtgcataacatgctacgaaaagacaaa

SEQ ID NO: 216387 - DNA, 2439 bp, Zea Mays
accgtggctccgcccccgagattgtcgcgcccacagcctcgcctcccatggatcctctcgcctctgcatctcgccattgttgccgccattctcgcgcccgtgcccctccattctcgcctccgcccccggatcctctcgcccccgcgaccttcgatggaagcccgcaatctgcgcccttccatcgccgcaatgcatcgatcccattccattttgcgagaagggcgggcgcgtgcagggcttcgcaatggctgacggttcaattggaagatcaaccacagggagtaggactcctaaatgagccgccaactgttcttctccttcccaatcatcggcaatcccacacgctctggtggctaaggctgcgggattcccaggtgcagcgtgctggggtcgcccaggcacggagtcggccaccacgcagcagccgtcgcccctccacctcgttgtcgtccgtccatgatcttgttgtggttcatgagcactgagctatacttcaacttaactgattcagcccttggctttctgggcatgtttgacaaagttgaatagctatgaaaccgaaaacaactgccaaatgtacatgttctgaatcaagacctgagatctagaaggacacaacaggcaaggtggatgtattcgtagctggttcaggcacagaagggtcgttttgagatactctctgtctgggtcgtttcttcaataagataacggtggccatcatagtcgaattggtgggcctgctagcgtccccaatggtcgtgtcctggcctgtgtggtagtgttgccggacttctgatagttgcttcgccagtacagatcatagtggaaccatcatggatgtttaatattgcagtccaaggtaagaaagtattgcagaaccaagcacaaaagcatccaggaagaaaaatagaagggacaagctgaatgagagaggtatgtgccctggtgagacaaatcattttagttcttagatataatacttgcatcattgtctaagctggtagcatcgtagatatattttttatccaaataatgattgtgctcatgtaaaccatgccaaatattattctacaatgaatagcccatcgctgaaaaatgcagaaatcaagaagagcttttaccattgcattgcaaagtccacatgttcgacgattcggtcttatgatttgtttagaattttgtttcacttattaacaacttattacatgtatgggttattggttatgaacctatctaaaagttgaattttaaattaattgtaccttttgtcatggacaaaatttggttatccttgaaatgttaacctggtacctagcataataagatgttttgctggttttaaccaaagtggtcaagtttgttagtataagcatgccacgggcagccaaccatacttcatgttaaacattataaaaatgatactgtattgattagcattatcttttcatttttacatgaaaaatcttgttgcattttttctggtggtttttttctaagcttctacccaggcttacttcatgtgtgtcaccatttaaaaagctaatacattttgtttgtggtgccacaggaattaggtcagcaattttgaagttgggttaaggtttttgacacttccatcattccctccatctccctgtttacatatttgtcatatcactccctaattatttagttgggatctcggtaattgctacttgtaatagagctctacacgccaatcttgttacacttttttacctcatagtgatctttgtgtattgcgcacaacattatgtaccttactacgttttctcagtaattgctacttgtaatagagctctacacgccaatcttgttacacttttttacctcatagtgatctttgtgcattgcccacaacatcatgtaccttactacgttttcctgcttattgaaatcctgtgagccctactcagtttttacctatcttttgattttacccatggagaaatattggctgggtgactgccatgaaggcatgaaccttaaaaaaagtttgttttttcaattctaaatatcttgtgacttatttatattgagcatgtgtttacaaataatgttctcatcagctcatgtggtattttaagctcgcctctacatggacgccggcctcgcttccgcagtcaccatgctccggacctgcaccgatgtcgtgcacctcgcgcacgttctcgagcagtttcgccttgcctggtgcggcaagctcgttcgggacacccgcgccgtcgctccgtcaagggcctctgcttcgacctcttcatcattaggggtggaaacagagctttcaatgtatgctggaggaaacaaaggcgccatcgccggttgcaactccaacccaccgaatccgtttccacaaaagtcaaaacaactccgccatctcgatcaaacaaggcggacaatgtcaacgcccctcggcaccag

SEQ ID NO: 216388 - DNA, 3836 bp, Zea Mays
cccggttctgagggcgaagcgcaccggcacacgcggtgacgtggaaggcgaatcggtatcctcccgggcccggcagccggctcctgccgtcatattctctccccttctccgaccgatccccacctcacacgatactttccccctccactagggttccccgtccgttccccctcggccgcatcagatctccgcggcggagtttcgtaccgtatttgtctttgcaacattcgagttgattattttggaggagtcgctctctagggttgattgagcgctgttgttttttttgtgcgacgacggtggtgtgttgattggatgttgaaagaattgtagctgtttgaggcggcaaccaagggccgcggaagcatctgtgtcgagccatggataaggggatcttcaccaacgatggctccttcatggagaggttcaagcagatgcagcaggaggcgcaggagaagaaggccgctgctgcctctgcctcatcggctcccaagcatgcgaaccccaagcaggggtttgctgttgcggcaaacaagaggccattcgagctgaagaacgctgctccggtagcctcagctggtaagctggcctttagtctcaagaaggccaaggtcgccgttgcacctgtgtttgcagccgacgaggaggatgaggatgctgtggatgttgagagggaggagcccgccaaacgccagaagtctgtgcaagctgatgctcctgcggcagctgccgcgtccggggctgttggtaattatttatatttattaatttcttgctgttttactgttagcttgtttagtgaaggcgttctatgggttgtagtttccaattttccatcgcatgattaggtttaaacatgtgataaggcttctaattcagtaaccgagacagaacatcagtgatatattaccttatagcttttcatgcaattagtgttttttcatcgaattcagtcacggatttagattatctcattgaatttgacgcaaatcatttcacacgcatgcgacataccttagtatttttactattgaagtgagttctaatttctgatatctgttcccaaagtattacagctggtgcagatgattgcattatcagtttctatgtagagtttttttattccatttatttgatggtgttgtcctggaagtattgcgattctgaacacatttgataatgaaactaagtaataactatatggtttgaatttaattttcttacatactgattattgaaatctctaaaggaccgtttggatggtcggtaatatttgagttctttatggttactaaaatataccataacatttaaagcttcaaggtgtttcgatacaacgatgtagttttacatccaattaccatgttattttgagttcttgaagaaaacctattcaaaactcattttccccatttttttttaaaaatcaaagcacacctcacattacctttggcaccattgtgagttatgaagcattggcctgtctaatttcatgcgaaagggcctccagctgagttggttaggtggtctgattagcactccttaggtcctgagtttagctccccgtgggagcaaatttcagtacgattttaaaaatcccctcgtctgtctcacgccaaagcacaagtctagtgcttggccctggtcgtggttgttcagcgaggcaggggttcggggggttttctcgacttgtatgaggtattcttagtacaatgtccaaggctgtctcacttccgcaggttgagttttttttttattttcatgcactagcagtacacattcctaatgtatatacttgtattgtgtacattcgttttcgattgtccacagggtacttaagcccttttcgattttccatatataaactattgctatgtatcaaagctagtagtatctatatatatgtctagctttattatttttcttctggtgtttgattatatagtatgatgtatatttgatcacaaaggaaaaaaacactaagccaaaaccacaaaatatgttattgttttttctatgtattattatattgtaaaaacagtgttctttttcacaacctatgtcatttcattactcgtgtattgaaactatgggtttgaaatgttctaatgtccagacattccataaccataataatattgaattcatgcatttatactagtgacaatgaatcttgcaatgcattttagcggtggaatttgtcaacatcgtttaaatttttagaaataaccattgaaattgcttgctgttgcaccaaggtgctgtgaacttttttgtttttgttttatgcatacatttttggtttacaaaagaaacatctccctctcatcatctgcatccattattagtcactattgtcaccagaaagtcgtgaaggttgtcttttttttatgactgcagcttatagttaactaaattgacattgctgggaaggatgtgattgagggagttggaggctctactgcagtaatttgcattgccttgtcatgcactagatattaatcagttctttaagtgacatgcagccccacccccaccaaatgatatgacagtgagacaagtcgctgacaaactggcaagctttgttgccaaaaacgggagacagtttgagaatatcacacgacagaggaatcctggagatacaccattcaagtttctatttgacaaaaactgtccagactacaaatattatgagtttcagcttgctgaagaggaaagggctcttgctcagtcaaaggaggctgaagcatcgaaagctaactctggcactgcaagcttcaaggcaccaggtggtacttatagaagctcatttgaacagaagtctaactatcagacacctgcatcagctttgtacggggcatatgagggtagttcttcccaaggaagctcttctagttatggtgatcatacagctccaccatcagatcctgtagcattgatggaattctatgcaaagaaggctgcactggaagaacggaagaggccaccaaggcagtcgaaagatgaaatgccgccacctccttctcttcaaggtcctcctaagaagggacaccacatgggtgatttcattcctcaagaagaacttgaaaagtttatggcacggtgtaatgatgctgcagcacaaaaggctaccaaagaagccgctgagaaggctaagattcaggcggacaatattgggcacaaacttttatctaagatgggttggagggaaggtgagggtcttgggagcgagagaagaggccgtgcagatcccgttatggctggagatgtgaagaaggatcatcttggtgttggggcagtccagcctggtgaggtcacatctgaagatgacatctatgagcaatacaagaagcggatgatgcttggataccgctataggccaaaccctctgaacaatccaaggaaatcatactactgatgtgggggagttcgtctgaggggagataaatgtcaagaagttcgttattcagcatatttcttggaatgccacagatgcaaggcttccgggggttctacaaagctttgttctttgtgtagtgtgtttatctttgtgggtttaaatgtctgttcaaacgtgtatcatgtttcagactgttgtattgctttcttggatcacccttttttctgatctcatttcagttacaagttggaaccataaggtacaaaatttgtgttgggaggggttatattttagaatggagtgtgaataactatagctagcataaggctatctccagcagattagccatcctcacatctaacagtacagtctatagtgcaaaatattgtaaaacagtgttttagttgaccatacggtgaattgttggacacggtct

SEQ ID NO: 216389 - DNA, 3877 bp, Zea Mays
ccggttctgagggcgaagcgcaccggcacacgcggtgacgtggaaggcgaatcggtatcctcccgggcccggcagccggctcctgccgtcatattctctccccttctccgaccgatccccacctcacacgatactttccccctccactagggttccccgtccgttccccctcggccgcatcaggtaaattactggtctatccgccccgcattcgatctgatcccgtgattcaagcccttgtgcatcgatccgggactcctccacctgcagatctccgcggcggagtttcgtaccgtatttgtctttgcaacattcgagttgattattttggaggagtcgctctctagggttgattgagcgctgttgttttttttgtgcgacgacggtggtgtgttgattggatgttgaaagaattgtagctgtttgaggcggcaaccaagggccgcggaagcatctgtgtcgagccatggataaggggatcttcaccaacgatggctccttcatggagaggttcaagcagatgcagcaggaggcgcaggagaagaaggccgctgctgcctctgcctcatcggctcccaagcatgcgaaccccaagcaggggtttgctgttgcggcaaacaagaggccattcgagctgaagaacgctgctccggtagcctcagctggtaagctggcctttagtctcaagaaggccaaggtcgccgttgcacctgtgtttgcagccgacgaggaggatgaggatgctgtggatgttgagagggaggagcccgccaaacgccagaagtctgtgcaagctgatgctcctgcggcagctgccgcgtccggggctgttggtaattatttatatttattaatttcttgctgttttactgttagcttgtttagtgaaggcgttctatgggttgtagtttccaattttccatcgcatgattaggtttaaacatgtgataaggcttctaattcagtaaccgagacagaacatcagtgatatattaccttatagcttttcatgcaattagtgttttttcatcgaattcagtcacggatttagattatctcattgaatttgacgcaaatcatttcacacgcatgcgacataccttagtatttttactattgaagtgagttctaatttctgatatctgttcccaaagtattacagctggtgcagatgattgcattatcagtttctatgtagagtttttttattccatttatttgatggtgttgtcctggaagtattgcgattctgaacacatttgataatgaaactaagtaataactatatggtttgaatttaattttcttacatactgattattgaaatctctaaaggaccgtttggatggtcggtaatatttgagttctttatggttactaaaatataccataacatttaaagcttcaaggtgtttcgatacaacgatgtagttttacatccaattaccatgttattttgagttcttgaagaaaacctattcaaaactcattttccccatttttttttaaaaatcaaagcacacctcacattacctttggcaccattgtgagttatgaagcattggcctgtctaatttcatgcgaaagggcctccagctgagttggttaggtggtctgattagcactccttaggtcctgagtttagctccccgtgggagcaaatttcagtacgattttaaaaatcccctcgtctgtctcacgccaaagcacaagtctagtgcttggccctggtcgtggttgttcagcgaggcaggggttcggggggttttctcgacttgtatgaggtattcttagtacaatgtccaaggctgtctcacttccgcaggttgagttttttttttattttcatgcactagcagtacacattcctaatgtatatacttgtattgtgtacattcgttttcgattgtccacagggtacttaagcccttttcgattttccatatataaactattgctatgtatcaaagctagtagtatctatatatatgtctagctttattatttttcttctggtgtttgattatatagtatgatgtatatttgatcacaaaggaaaaaaacactaagccaaaaccacaaaatatgttattgttttttctatgtattattatattgtaaaaacagtgttctttttcacaacctatgtcatttcattactcgtgtattgaaactatgggtttgaaatgttctaatgtccagacattccataaccataataatattgaattcatgcatttatactagtgacaatgaatcttgcaatgcattttagcggtggaatttgtcaacatcgtttaaatttttagaaataaccattgaaattgcttgctgttgcaccaaggtgctgtgaacttttttgtttttgttttatgcatacatttttggtttacaaaagaaacatctccctctcatcatctgcatccattattagtcactattgtcaccagaaagtcgtgaaggttgtcttttttttatgactgcagcttatagttaactaaattgacattgctgggaaggatgtgattgagggagttggaggctctactgcagtaatttgcattgccttgtcatgcactagatattaatcagttctttaagtgacatgcagccccacccccaccaaatgatatgacagtgagacaagtcgctgacaaactggcaagctttgttgccaaaaacgggagacagtttgagaatatcacacgacagaggaatcctggagatacaccattcaagtttctatttgacaaaaactgtccagactacaaatattatgagtttcagcttgctgaagaggaaagggctcttgctcagtcaaaggaggctgaagcatcgaaagctaactctggcactgcaagcttcaaggcaccaggtggtacttatagaagctcatttgaacagaagtctaactatcagacacctgcatcagctttgtacggggcatatgagggtagttcttcccaaggaagctcttctagttatggtgatcatacagctccaccatcagatcctgtagcattgatggaattctatgcaaagaaggctgcactggaagaacggaagaggccaccaaggcagtcgaaagatgaaatgccgccacctccttctcttcaagaagaacttgaaaagtttatggcacggtgtaatgatgctgcagcacaaaaggctaccaaagaagccgctgagaaggctaagattcaggcggacaatattgggcacaaacttttatctaagatgggttggagggaaggtgagggtcttgggagcgagagaagaggccgtgcagatcccgttatggctggagatgtgaagaaggatcatcttggtgttggggcagtccagcctggtgaggtcacatctgaagatgacatctatgagcaatacaagaagcggatgatgcttggataccgctataggccaaaccctctgaacaatccaaggaaatcatactactgatgtgggggagttcgtctgaggggagataaatgtcaagaagttcgttattcagcatatttcttggaatgccacagatgcaaggcttccgggggttctacaaagctttgttctttgtgtagtgtgtttatctttgtgggtttaaatgtctgttcaaacgtgtatcatgtttcagactgttgtattgctttcttggatcacccttttttctgatctcatttcagttacaagttggaaccataaggtacaaaatttgtgttgggaggggttatattttagaatggagtgtgaataactatagctagcataaggctatctccagcagattagccatcctcacatctaacagtacagtctatagtgcaaaatattgtaaaacagtgttttagttgaccatacggtgaattgttggacacggtct

SEQ ID NO: 216390 - DNA, 1412 bp, Zea Mays
ctgccgtcatattctctccccttctccgaccgatccccacctcacacgatactttccccctccactagggttccccgtccgttccccctcggccgcatcagccccacccccaccaaatgatatgacagtgagacaagtcgctgacaaactggcaagctttgttgccaaaaacgggagacagtttgagaatatcacacgacagaggaatcctggagatacaccattcaagtttctatttgacaaaaactgtccagactacaaatattatgagtttcagcttgctgaagaggaaagggctcttgctcagtcaaaggaggctgaagcatcgaaagctaactctggcactgcaagcttcaaggcaccaggtggtacttatagaagctcatttgaacagaagtctaactatcagacacctgcatcagctttgtacggggcatatgagggtagttcttcccaaggaagctcttctagttatggtgatcatacagctccaccatcagatcctgtagcattgatggaattctatgcaaagaaggctgcactggaagaacggaagaggccaccaaggcagtcgaaagatgaaatgccgccacctccttctcttcaaggtcctcctaagaagggacaccacatgggtgatttcattcctcaagaagaacttgaaaagtttatggcacggtgtaatgatgctgcagcacaaaaggctaccaaagaagccgctgagaaggctaagattcaggcggacaatattgggcacaaacttttatctaagatgggttggagggaaggtgagggtcttgggagcgagagaagaggccgtgcagatcccgttatggctggagatgtgaagaaggatcatcttggtgttggggcagtccagcctggtgaggtcacatctgaagatgacatctatgagcaatacaagaagcggatgatgcttggataccgctataggccaaaccctctgaacaatccaaggaaatcatactactgatgtgggggagttcgtctgaggggagataaatgtcaagaagttcgttattcagcatatttcttggaatgccacagatgcaaggcttccgggggttctacaaagctttgttctttgtgtagtgtgtttatctttgtgggtttaaatgtctgttcaaacgtgtatcatgtttcagactgttgtattgctttcttggatcacccttttttctgatctcatttcagttacaagttggaaccataaggtacaaaatttgtgttgggaggggttatattttagaatggagtgtgaataactatagctagcataaggctatctccagcagattagccatcctcacatctaacagtacagtctatagtgcaaaatattgtaaaacagtgttttagttgaccatacggtgaattgttggacacggtct

SEQ ID NO: 216391 - DNA, 2071 bp, Zea Mays
ccgatccccacctcacacgatactttccccctccactagggttccccgtccgttccccctcggccgcatcagatctccgcggcggagtttcgtaccgtatttgtctttgcaacattcgagttgattattttggaggagtcgctctctagggttgattgagcgctgttgttttttttgtgcgacgacggtggtgtgttgattggatgttgaaagaattgtagctgtttgaggcggcaaccaagggccgcggaagcatctgtgtcgagccatggataaggggatcttcaccaacgatggctccttcatggagaggttcaagcagatgcagcaggaggcgcaggagaagaaggccgctgctgcctctgcctcatcggctcccaagcatgcgaaccccaagcaggggtttgctgttgcggcaaacaagaggccattcgagctgaagaacgctgctccggtagcctcagctggtaagctggcctttagtctcaagaaggccaaggtcgccgttgcacctgtgtttgcagccgacgaggaggatgaggatgctgtggatgttgagagggaggagcccgccaaacgccagaagtctgtgcaagctgatgctcctgcggcagctgccgcgtccggggctgttgcttatagttaactaaattgacattgctgggaaggatgtgattgagggagttggaggctctactgcagtaatttgcattgccttgtcatgcactagatattaatcagttctttaagtgacatgcagccccacccccaccaaatgatatgacagtgagacaagtcgctgacaaactggcaagctttgttgccaaaaacgggagacagtttgagaatatcacacgacagaggaatcctggagatacaccattcaagtttctatttgacaaaaactgtccagactacaaatattatgagtttcagcttgctgaagaggaaagggctcttgctcagtcaaaggaggctgaagcatcgaaagctaactctggcactgcaagcttcaaggcaccaggtggtacttatagaagctcatttgaacagaagtctaactatcagacacctgcatcagctttgtacggggcatatgagggtagttcttcccaaggaagctcttctagttatggtgatcatacagctccaccatcagatcctgtagcattgatggaattctatgcaaagaaggctgcactggaagaacggaagaggccaccaaggcagtcgaaagatgaaatgccgccacctccttctcttcaaggtcctcctaagaagggacaccacatgggtgatttcattcctcaagaagaacttgaaaagtttatggcacggtgtaatgatgctgcagcacaaaaggctaccaaagaagccgctgagaaggctaagattcaggcggacaatattgggcacaaacttttatctaagatgggttggagggaaggtgagggtcttgggagcgagagaagaggccgtgcagatcccgttatggctggagatgtgaagaaggatcatcttggtgttggggcagtccagcctggtgaggtcacatctgaagatgacatctatgagcaatacaagaagcggatgatgcttggataccgctataggccaaaccctctgaacaatccaaggaaatcatactactgatgtgggggagttcgtctgaggggagataaatgtcaagaagttcgttattcagcatatttcttggaatgccacagatgcaaggcttccgggggttctacaaagctttgttctttgtgtagtgtgtttatctttgtgggtttaaatgtctgttcaaacgtgtatcatgtttcagactgttgtattgctttcttggatcacccttttttctgatctcatttcagttacaagttggaaccataaggtacaaaatttgtgttgggaggggttatattttagaatggagtgtgaataactatagctagcataaggctatctccagcagattagccatcctcacatctaacagtacagtctatagtgcaaaatattgtaaaacagtgttttagttgaccatacggtgaattgttggacacggtct

SEQ ID NO: 216392 - DNA, 1794 bp, Zea Mays
ctcacacgatactttccccctccactagggttccccgtccgttccccctcggccgcatcagaattgtagctgtttgaggcggcaaccaagggccgcggaagcatctgtgtcgagccatggataaggggatcttcaccaacgatggctccttcatggagaggttcaagcagatgcagcaggaggcgcaggagaagaaggccgctgctgcctctgcctcatcggctcccaagcatgcgaaccccaagcaggggtttgctgttgcggcaaacaagaggccattcgagctgaagaacgctgctccggtagcctcagctggtaagctggcctttagtctcaagaaggccaaggtcgccgttgcacctgtgtttgcagccgacgaggaggatgaggatgctgtggatgttgagagggaggagcccgccaaacgccagaagtctgtgcaagctgatgctcctgcggcagctgccgcgtccggggctgttgccccacccccaccaaatgatatgacagtgagacaagtcgctgacaaactggcaagctttgttgccaaaaacgggagacagtttgagaatatcacacgacagaggaatcctggagatacaccattcaagtttctatttgacaaaaactgtccagactacaaatattatgagtttcagcttgctgaagaggaaagggctcttgctcagtcaaaggaggctgaagcatcgaaagctaactctggcactgcaagcttcaaggcaccaggtggtacttatagaagctcatttgaacagaagtctaactatcagacacctgcatcagctttgtacggggcatatgagggtagttcttcccaaggaagctcttctagttatggtgatcatacagctccaccatcagatcctgtagcattgatggaattctatgcaaagaaggctgcactggaagaacggaagaggccaccaaggcagtcgaaagatgaaatgccgccacctccttctcttcaaggtcctcctaagaagggacaccacatgggtgatttcattcctcaagaagaacttgaaaagtttatggcacggtgtaatgatgctgcagcacaaaaggctaccaaagaagccgctgagaaggctaagattcaggcggacaatattgggcacaaacttttatctaagatgggttggagggaaggtgagggtcttgggagcgagagaagaggccgtgcagatcccgttatggctggagatgtgaagaaggatcatcttggtgttggggcagtccagcctggtgaggtcacatctgaagatgacatctatgagcaatacaagaagcggatgatgcttggataccgctataggccaaaccctctgaacaatccaaggaaatcatactactgatgtgggggagttcgtctgaggggagataaatgtcaagaagttcgttattcagcatatttcttggaatgccacagatgcaaggcttccgggggttctacaaagctttgttctttgtgtagtgtgtttatctttgtgggtttaaatgtctgttcaaacgtgtatcatgtttcagactgttgtattgctttcttggatcacccttttttctgatctcatttcagttacaagttggaaccataaggtacaaaatttgtgttgggaggggttatattttagaatggagtgtgaataactatagctagcataaggctatctccagcagattagccatcctcacatctaacagtacagtctatagtgcaaaatattgtaaaacagtgttttagttgaccatacggtgaattgttggacacggtct

SEQ ID NO: 216393 - DNA, 1231 bp, Zea Mays
aatttttttcttaccaactcttttacggtttctatttgacaaaaactgtccagactacaaatattatgagtttcagcttgctgaagaggaaagggctcttgctcagtcaaaggaggctgaagcatcgaaagctaactctggcactgcaagcttcaaggcaccaggtggtacttatagaagctcatttgaacagaagtctaactatcagacacctgcatcagctttgtacggggcatatgagggtagttcttcccaaggaagctcttctagttatggtgatcatacagctccaccatcagatcctgtagcattgatggaattctatgcaaagaaggctgcactggaagaacggaagaggccaccaaggcagtcgaaagatgaaatgccgccacctccttctcttcaagcacaactaattcctgtgcaggtcctcctaagaagggacaccacatgggtgatttcattcctcaagaagaacttgaaaagtttatggcacggtgtaatgatgctgcagcacaaaaggctaccaaagaagccgctgagaaggctaagattcaggcggacaatattgggcacaaacttttatctaagatgggttggagggaaggtgagggtcttgggagcgagagaagaggccgtgcagatcccgttatggctggagatgtgaagaaggatcatcttggtgttggggcagtccagcctggtgaggtcacatctgaagatgacatctatgagcaatacaagaagcggatgatgcttggataccgctataggccaaaccctctgaacaatccaaggaaatcatactactgatgtgggggagttcgtctgaggggagataaatgtcaagaagttcgttattcagcatatttcttggaatgccacagatgcaaggcttccgggggttctacaaagctttgttctttgtgtagtgtgtttatctttgtgggtttaaatgtctgttcaaacgtgtatcatgtttcagactgttgtattgctttcttggatcacccttttttctgatctcatttcagttacaagttggaaccataaggtacaaaatttgtgttgggaggggttatattttagaatggagtgtgaataactatagctagcataaggctatctccagcagattagccatcctcacatctaacagtacagtctatagtgcaaaatattgtaaaacagtgttttagttgaccatacggtgaattgttggacacggtct

SEQ ID NO: 216394 - DNA, 2385 bp, Zea Mays
gcagagtgggtgaaaggtggggggacgattcggagagatcgagaaagaggagagagagagggacgggggcggggccggcggaagcggagcctgcgcccgccggaccgaatcctcgccggatcgcccggcctgccggggcggcgctgcggactgcctgatccggctggaatggcggcgggccgacgagggatctagcggaggtgggtgtcgcgcggcaatggctgcggcggaggcgcggcgccggtcagcggtctgggccctgctgccgctgctgctgcggctgctccacccggccgcgctcgtgctggccaacaccgaaggtgatgccttgcatagcttgaggactaacttaaatgatcctaataatgttctacaaagttgggatcccactctggtcaacccctgcacttggtttcatgttacctgcaataatgacaacagtgttatcagagttgatcttggaaatgctgcactatcaggaactttggttccgcaacttggccagctcaaaaacttgcagtacctggagctctacagtaataatatcagtggcactatacctagtgaacttgggaatcttacaaacttggtcagtttggatttgtacttgaacaacttcactggtcccataccagattcattggggaagctattgaagctgcggttcttgcgtcttaacaacaacagcctttctggttcaattccaaaatcgttaactgctatcactgcactccaagtcctggatctgtcaaataacaatttgtctggagaagttccatcaactggttccttttcgttattcacccctatcagttttgggaacaaccctaatttatgtggtcctggcaccacaaaaccttgtcctggtgctcctcccttttctccacctcctccatacaaccctacaacccctgtgcaatcaccaggaagtagctcttccagtactggagcaattgctggtggagtggctgctggtgcagccttgctatttgctattcctgcaattagttttgcctattggcggcgcaggaaaccacaagaacatttctttgatgtacctgccgaggaagatccagaggtgcatcttggccagcttaaaagattttcactacgagaattacaagttgcaacagatggcttcagcaataagaacattcttggaagaggtggatttggcaaagtctacaaaggacggctggcagatggatctttagttgctgttaagagactaaaggaggagcgcacgcctggtggagaattacagtttcaaacagaagttgagatgattagtatggctgtacacagaaatctattgcgtcttcgtggattctgtatgacaccaacagaaaggttgcttgtgtatccatacatggctaatggaagtgttgcgtcacgtttaagagaccgaccaccagctgaacctccgctagattggcaaacaagacaaaggattgcattgggttctgctaggggcctgtcttatttacatgatcattgtgatccaaagattattcatcgtgatgtcaaagctgcaaatattttgttagatgaagacttcgaagctgtggtgggggatttcggtttggccaaactaatggattacaaggatacccatgtaactactgctgttcgaggaacaattgggcacattgcacctgaatacctttcaacaggaaaatcctctgagaaaactgatgtatttggctatggaattactcttttagagcttattacaggacaacgtgccttcgatctagctcgtcttgctaatgatgatgatgtcatgcttcttgactgggtcaaggggttgctcaaggagaagaaactggagagtctggtcgacgaagatctagaccacaactacatcgatgtcgaggtggaatctctgatccaggtggcactcccactaattctggtacggaggagtattttgcaagggcacaatagagatgtgtatcaatcatcctagtaaaaaaaaaatccaccaatttgttaatataccagtcagtgggtgaagcgaagattggcagccatggctttggatgtatattgcttgatgtggtcagccatgccttttgagttcttctatgccagggcagcagagctggaggagcttatgtcatgtgcagttgccgcatgcgccaatgctcctgtgtttgtaaaggtcggagctgaggtgctgcggctatcatctgggtccgcgataagttaattgtactgatagttgatatctaactactattttgtgtatcaaatgaaaatgttggaactaaaggatcggatagtataggtgtcttatgaacctgttctggctggcaaaattaaccagaaatatggatttgccacttcaactatgtcagcagatttgcgcatttgccactccat

SEQ ID NO: 216395 - DNA, 1054 bp, Zea Mays
ctcctgtgactctctccattccggtccaaggactagcataaaaaaccttcggctggccgcaacgggcatcctccattggggtgagcattctctaagggcatgtttagaaggagctaaaatactcttattatccaattttgaatatgaagaagattttaatcctctccaattctctagctcccaacatgcactaagcgatatattctgctgggccttggtgggcatttgctgaatggaatatgtaccgtatcattgaagtccgtacatcgccccaatataaatatatatgtgatcacttctatctgaattgcaagttattttccattccagtcaatttctctactaggattagctttgaacatttttttcactatatatatggaggaggacaggggggtgaccgtgctttcaagccgcatagaacggtggcagctgaggcgcggcgatcacatctatgcctggcggacaggctactcccatcatggaatctacgaaagcgacgagaagcaagtgccgtgaagctatgcgtggaggcggtgtcgtggtctgctgcctcgactgcttcctggaaggggacaatctctgcctcttcgcctactcagtgtccatggcattcgctgcactgagcaatatcggtgctcaagacacctgctccgtggtagacgaagacccacccgacacggtcttgcgccgcgccaacgacttcctcgactacggcggcttccgcagctacaacgttgcaggaacaccaacgttccccggcatgtacaatcctttagagctcctttggatggttgggtagtacccactagagatgattttacccgatatcaatttaggagctctaaagttagaaaaatcacgaaaaaacagatgattgtgaaatgttgctgcaatccacaaaattagtggcaaaaataaactttattcagtataagtatatgctttggatgaaaacattctatacaaattcaaagtacataaaaggctaattgctacaaggtataccaaagttaactattttacatataactaaaagtcttattcaaatgtc

SEQ ID NO: 216396 - DNA, 3075 bp, Zea Mays
cgaagccccggcggagaggcgaggtgagctttctcggagaggggacctcgcgccaccagccgcccgagcttcccgcgccatggatcccatcatgaagctactcgaggacgacgaggatgagagtctgcactcgggtgccgacgtcgaggccttcacggcggcgctgaaccgcgaggtggaggccagcgcgagcgccagcgccagcaccagcaccagcgttcccgccggctcctcgtcccagcccacggatcacggtgctggacttttacctcaggaacacaagtcactattaaaccatgatcctggtcagtggcaagatcctgtaaagaatgaaattgtaaaccaggagagtcagcaacaggaacagacacatgcatttagaaatgatcacccgtcaagacctgaaatggtttctcaaggttctaataactgcccccttcccactaatacaccaaaagaatgtgatttactgaaggcaaaacaagaacctggaagtacatctcaacaaggtattgttgctcagcatcagcctatgcagcaaatgaagagtgaacaaacaccaattgtcagtcagcagcagtcgatgcagcaaatgaagaatcaacaaacaccagtcacaaaccaaacaaatagtgcaactacaacagcaaaagctccagttgttacatttcacatgttaattccaattttgagtcgctacctagacaaagccagggacatagaagtgcagtccattttcgccaagttgcggaaaaatgaagtcagcaaggaatacttcttaaaaactgtaaggaatattgttggtgataaattgcttaagcaagctgcttcacaatatcaaatgcaggcacaacgaagccctcagacaaacccaagcaactattctttatcaggtcaagtttctggtcagcagactgctcccagtggttctgtgacaggagatgaacagaagggatatccaggggctcacaccatccctatgagacaagctattgccagcactcgaccacctcaatttcggccttcctcgtctggccaaatgcggagtaatacggtcaatcaagccttgggatcttcaaaagtcagtgctggcatggaaagccagtcacaacaattgagtgcgcctaagcctttagctgcaacaagcttaagtcagactcaatctcatggcattcaagaagagcctaaaattcagatccaatcttctgtgcaagcacctcctgcagcagcttctaaaacacctcagaggaaggcatcttctggacagaagaagcctttggaagtcttaggctcatcccctccaccatctagcaaaaagcagaaggtatctgggggtttccatgaacaaagcattgaccagcttaatgatgtcactgcagttagcggtgttaatctgagggaagaagaggaacaccttttctctgctccaaaggaagagggtcgagtttcagaagttgctcggaaagttgttcaactagaagaagaaaagctcattctgcagaagggacctctgacccaaaaattagcgggaatcatgagtaaatgtaatttgaaggtcattggcactgatgtggaacgctgtctgtccatgtgtgttgaggagaggttacgggggtttataagaagtataataaggttctctaaacagagggttgaggttgaaaagtcaagacatcatttttatccattatcctcagatgttcgcagtcatattatgagagtgaatcgagaagcaagagaacagtgggagaaaaagcaggctgaagatgctgagagaattaggaaacaaaatgatggagatggcaatgcaaatgttgatcttgaaaaagacagaatcgagacccgtggtttgtcaaagcatgcaaagacttacaaggaggacgatgataagatgcgaactacagctgcaaatgttgctgcacgagttgcagcggggggagatgacatgctgtcaaagtggcaattactagctgaacggaataagcagagaagtgagggaggtgatggttcttctggctctgtaccaggtaacatgttgcaacacaggccatcactgaaatctgggaaagacttaagggaagaacatgaagttgaaaagagaggatactccacaatgcttggatctggtggtgttagaaggtcaccgctaacaaaagtggcgcggagtatttctatgaaggatgtggtagcggcactcgagcgagagcctcagatgtcaaaatcctcattacttttccgcctatatggaaggccattgacagaaccatctgcaaagtaatttggaggataatcattgcagttcatattacagaggggcaacttttggtcaatatatgaggaggcccaatcaccaagcgatggggctgattggtcgacgatcaattttgcggggatttagcgattacttggaagccagcgtttccctggagccatttttgttttttcaagggaacagtctgcagatgtttcttttttttcaatgtttttttctctatataatcatgtgttgatcacaatgcccagccagcttcagctggtatgaacatcgtgatcgtttttgtatagcagatggagtaggatgttccttgagatgcttatgacttgctaagtgtcctattctttaatcgtgcgattttgttgtacagaaaacatgaaatgtatgtattggaggctcaaatttattcatgaacaatatgtgccctcgtttcagaacagtttgttttggtttgcaaaatatcaacacaagggcataaaagcagctattctgaatgcacacagaatatcaggacttgctatgccacccttatcaaatctagtcttaatatcatacatatatatagtcacgacattcttgaagctaggtttctattgataatactatcttgtctttccccctttcaactggggaaggtggtacattgttgatcggcatctaacatccaaaatcataaggaaccaatccttgtagctctggaccgttgagcctgctgttgttctcaaagctgcaaagtagagatgtgttagcgctttgtcaaaatcatacggattcacatcgaagttctagtggtaaataaa

SEQ ID NO: 216397 - DNA, 3274 bp, Zea Mays
ccgttcgtcgaagccccggcggagaggcgaggtgagctttctcggagaggggacctcgcgccaccagccgcccgagcttcccgcgccatggatcccatcatgaagctactcgaggacgacgaggacttttacctcaggaacacaagtcactattaaaccatgatcctggtcagtggcaagatcctgtaaagaatgaaattgtaaaccaggagagtcagcaacaggaacagacacatgcatttagaaatgatcacccgtcaagacctgaaatggtttctcaaggttctaataactgcccccttcccactaatacaccaaaagaatgtgatttactgaaggcaaaacaagaacctggaagtacatctcaacaaggtattgttgctcagcatcagcctatgcagcaaatgaagagtgaacaaacaccaattgtcagtcagcagcagtcgatgcagcaaatgaagaatcaacaaacaccagtcacaaaccaaacaaatagtgcaactacaacagcaaaagctccagttgttacatttcacatgttaattccaattttgagtcgctacctagacaaagccagggacatagaagtgcagtccattttcgccaagttgcggaaaaatgaagtcagcaaggaatacttcttaaaaactgtaaggaatattgttggtgataaattgcttaagcaagctgcttcacaatatcaaatgcaggcacaacgaagccctcagacaaacccaagcaactattctttatcaggtcaagtttctggtcagcagactgctcccagtggttctgtgacaggagatgaacagaagggatatccaggggctcacaccatccctatgagacaagctattgccagcactcgaccacctcaatttcggccttcctcgtctggccaaatgcggagtaatacgggttatccaccttcacaaaccaatttgcataaggctaatgaaatgggaaacatgtcagatgggaaaggggtccatatgttacaaactcgtccacccaataactccataccagtacaaacaatgcagcatcatgtgcagcgaccacaaacatcttcaccagtgtttggggcaaatagtattcatgcacgtccatttccgcggccacttggaggtccagctgcaccatttagaccacaaatggcagattccaatccaaaagcacaattgattcagggagctgtgaccacagtatctgggagtgtgccaacacgatccatagtgtctggaaatgcgccagtcaatcaagccttgggatcttcaaaagtcagtgctggcatggaaagccagtcacaacaattgagtgcgcctaagcctttagctgcaacaagcttaagtcagactcaatctcatggcattcaagaagagcctaaaattcagatccaatcttctgtgcaagcacctcctgcagcagcttctaaaacacctcagaggaaggcatcttctggacagaagaagcctttggaagtcttaggctcatcccctccaccatctagcaaaaagcagaaggtatctgggggtttccatgaacaaagcattgaccagcttaatgatgtcactgcagttagcggtgttaatctgagggaagaagaggaacaccttttctctgctccaaaggaagagggtcgagtttcagaagttgctcggaaagttgttcaactagaagaagaaaagctcattctgcagaagggacctctgacccaaaaattagcgggaatcatgagtaaatgtaatttgaaggtcattggcactgatgtggaacgctgtctgtccatgtgtgttgaggagaggttacgggggtttataagaagtataataaggttctctaaacagagggttgaggttgaaaagtcaagacatcatttttatccattatcctcagatgttcgcagtcatattatgagagtgaatcgagaagcaagagaacagtgggagaaaaagcaggctgaagatgctgagagaattaggaaacaaaatgatggagatggcaatgcaaatgttgatcttgaaaaagacagaatcgagacccgtggtttgtcaaagcatgcaaagacttacaaggaggacgatgataagatgcgaactacagctgcaaatgttgctgcacgagttgcagcggggggagatgacatgctgtcaaagtggcaattactagctgaacggaataagcagagaagtgagggaggtgatggttcttctggctctgtaccaggtaacatgttgcaacacaggccatcactgaaatctgggaaagacttaagggaagaacatgaagttgaaaagagaggatactccacaatgcttggatctggtggtgttagaaggtcaccgctaacaaaagtggcgcggagtatttctatgaaggatgtggtagcggcactcgagcgagagcctcagatgtcaaaatcctcattacttttccgcctatatggaaggccattgacagaaccatctgcaaagtaatttggaggataatcattgcagttcatattacagaggggcaacttttggtcaatatatgaggaggcccaatcaccaagcgatggggctgattggtcgacgatcaattttgcggggatttagcgattacttggaagccagcgtttccctggagccatttttgttttttcaagggaacagtctgcagatgtttcttttttttcaatgtttttttctctatataatcatgtgttgatcacaatgcccagccagcttcagctggtatgaacatcgtgatcgtttttgtatagcagatggagtaggatgttccttgagatgcttatgacttgctaagtgtcctattctttaatcgtgcgattttgttgtacagaaaacatgaaatgtatgtattggaggctcaaatttattcatgaacaatatgtgccctcgtttcagaacagtttgttttggtttgcaaaatatcaacacaagggcataaaagcagctattctgaatgcacacagaatatcaggacttgctatgccacccttatcaaatctagtcttaatatcatacatatatatagtcacgacattcttgaagctaggtttctattgataatactatcttgtctttccccctttcaactggggaaggtggtacattgttgatcggcatctaacatccaaaatcataaggaaccaatccttgtagctctggaccgttgagcctgctgttgttctcaaagctgcaaagtagagatgtgttagcgctttgtcaaaatcatacggattcacatcgaagttctagtggtaaataaa

SEQ ID NO: 216398 - DNA, 3411 bp, Zea Mays
cccgttcgtcgaagccccggcggagaggcgaggtgagctttctcggagaggggacctcgcgccaccagccgcccgagcttcccgcgccatggatcccatcatgaagctactcgaggacgacgaggatgagagtctgcactcgggtgccgacgtcgaggccttcacggcggcgctgaaccgcgaggtggaggccagcgcgagcgccagcgccagcaccagcaccagcgttcccgccggctcctcgtcccagcccacggatcacggtgctggacttttacctcaggaacacaagtcactattaaaccatgatcctggtcagtggcaagatcctgtaaagaatgaaattgtaaaccaggagagtcagcaacaggaacagacacatgcatttagaaatgatcacccgtcaagacctgaaatggtttctcaaggttctaataactgcccccttcccactaatacaccaaaagaatgtgatttactgaaggcaaaacaagaacctggaagtacatctcaacaaggtattgttgctcagcatcagcctatgcagcaaatgaagagtgaacaaacaccaattgtcagtcagcagcagtcgatgcagcaaatgaagaatcaacaaacaccagtcacaaaccaaacaaatagtgcaactacaacagcaaaagctccagttgttacatttcacatgttaattccaattttgagtcgctacctagacaaagccagggacatagaagtgcagtccattttcgccaagttgcggaaaaatgaagtcagcaaggaatacttcttaaaaactgtaaggaatattgttggtgataaattgcttaagcaagctgcttcacaatatcaaatgcaggcacaacgaagccctcagacaaacccaagcaactattctttatcaggtcaagtttctggtcagcagactgctcccagtggttctgtgacaggagatgaacagaagggatatccaggggctcacaccatccctatgagacaagctattgccagcactcgaccacctcaatttcggccttcctcgtctggccaaatgcggagtaatacgggttatccaccttcacaaaccaatttgcataaggctaatgaaatgggaaacatgtcagatgggaaaggggtccatatgttacaaactcgtccacccaataactccataccagtacaaacaatgcagcatcatgtgcagcgaccacaaacatcttcaccagtgtttggggcaaatagtattcatgcacgtccatttccgcggccacttggaggtccagctgcaccatttagaccacaaatggcagattccaatccaaaagcacaattgattcagggagctgtgaccacagtatctgggagtgtgccaacacgatccatagtgtctggaaatgcgccagccttgggatcttcaaaagtcagtgctggcatggaaagccagtcacaacaattgagtgcgcctaagcctttagctgcaacaagcttaagtcagactcaatctcatggcattcaagaagagcctaaaattcagatccaatcttctgtgcaagcacctcctgcagcagcttctaaaacacctcagaggaaggcatcttctggacagaagaagcctttggaagtcttaggctcatcccctccaccatctagcaaaaagcagaaggtatctgggggtttccatgaacaaagcattgaccagcttaatgatgtcactgcagttagcggtgttaatctgagggaagaagaggaacaccttttctctgctccaaaggaagagggtcgagtttcagaagttgctcggaaagttgttcaactagaagaagaaaagctcattctgcagaagggacctctgacccaaaaattagcgggaatcatgagtaaatgtaatttgaaggtcattggcactgatgtggaacgctgtctgtccatgtgtgttgaggagaggttacgggggtttataagaagtataataaggttctctaaacagagggttgaggttgaaaagtcaagacatcatttttatccattatcctcagatgttcgcagtcatattatgagagtgaatcgagaagcaagagaacagtgggagaaaaagcaggctgaagatgctgagagaattaggaaacaaaatgatggagatggcaatgcaaatgttgatcttgaaaaagacagaatcgagacccgtggtttgtcaaagcatgcaaagacttacaaggaggacgatgataagatgcgaactacagctgcaaatgttgctgcacgagttgcagcggggggagatgacatgctgtcaaagtggcaattactagctgaacggaataagcagagaagtgagggaggtgatggttcttctggctctgtaccaggtaacatgttgcaacacaggccatcactgaaatctgggaaagacttaagggaagaacatgaagttgaaaagagaggatactccacaatgcttggatctggtggtgttagaaggtcaccgctaacaaaagtggcgcggagtatttctatgaaggatgtggtagcggcactcgagcgagagcctcagatgtcaaaatcctcattacttttccgcctatatggaaggccattgacagaaccatctgcaaagtaatttggaggataatcattgcagttcatattacagaggggcaacttttggtcaatatatgaggaggcccaatcaccaagcgatggggctgattggtcgacgatcaattttgcggggatttagcgattacttggaagccagcgtttccctggagccatttttgttttttcaagggaacagtctgcagatgtttcttttttttcaatgtttttttctctatataatcatgtgttgatcacaatgcccagccagcttcagctggtatgaacatcgtgatcgtttttgtatagcagatggagtaggatgttccttgagatgcttatgacttgctaagtgtcctattctttaatcgtgcgattttgttgtacagaaaacatgaaatgtatgtattggaggctcaaatttattcatgaacaatatgtgccctcgtttcagaacagtttgttttggtttgcaaaatatcaacacaagggcataaaagcagctattctgaatgcacacagaatatcaggacttgctatgccacccttatcaaatctagtcttaatatcatacatatatatagtcacgacattcttgaagctaggtttctattgataatactatcttgtctttccccctttcaactggggaaggtggtacattgttgatcggcatctaacatccaaaatcataaggaaccaatccttgtagctctggaccgttgagcctgctgttgttctcaaagctgcaaagtagagatgtgttagcgctttgtcaaaatcatacggattcacatcgaagttctagtggtaaataaa

SEQ ID NO: 216399 - DNA, 5253 bp, Zea Mays
ggatgagactggagcctcggatgagagcaagtctcatgggggtattcttcgggaaaggtgcaatggccctgctcaagcttgcaggcaaatgagatggttgaaggatcagacagtgcctcaagggataatttaggtgaaccaggatcattcgtggcaaacgaatcttgtgaatgtacacggcagtctctgttcagaaagaattgtgcttcttccgttgatggtgcaaacattctgtcttgcagcaagaagtctgtattttataaagagttgaaaagactgaaactagttgaggagatagtctgtttgaagagcaacattacttgctgcagcggtgatgcaatctttttcacttcattagtgtcggctgctactgctgctggtgatgtacttatgaaattacaagggcttctcatggtggtgtcgacagaaagtataaatcttgaacttattggggatgaagcccccaaaaagaaagatgttgaaaagaccagtggaggttctcggaaaggaaagaagaagtctaacaccttgaaaaagctaacgacatctgctaagccatctaagttaacctttttccaggataatggatgcagtagttcagataatcgcaattgtagtcctttaccaaaccattgtgctccatctgttgaaggcactgctgctggacctccatctgaaaaaactccttacaaggaaattgtaccaacaacgaaggttgtaagcattactttgccaatctgttttgtttggttgttcatttattcatgacttatgagggacatctcgatattttaggaacaaactgtctcgttggatggttgcaaaaatcaatgtaacaaaaagaagaacaagcggaaagggaaaacaaaactatcaaatccgatgaggcctgagagcccaagatctaccaaattaaaaacagttgttccccatagtgctgcagaggccttgcatgaagctgctaaagaggctgatgtctcacctcatcacccatcgtatgtccatccttccaagaacgagatctctgaagctgttagctgttctgacccttccattttatctaatggaacaaaggtaatatccaccagtaagggcacaaaacttgaagacacattgtattctcctagagttcactcatcacttgctacagaacgttttcagagtgcccatgatgatgccttcaaagtggctgtgcaggcctcatcgtaccttagccaaagtgaatccttggttcagtcatcctcttgtctaccttccagaagcaatgaggtctcttctactaatctgtatggaagttcagttgactccttggtaagatctgcacaggaaaaaactgaatgtgatgggaaacatgtggatcataaatctgaagtgacaaaggacagaattttaccttctgctattcctactgacatgcttcaaagtgctataagtaaaaatggtggagttatgaaaaatggtggtggtgaatgttatgtatacaataggaacctactgggaggaacgtcgtatgaatggcctagtgtaacaccatctcattttgtatctcctcaaatgcaacaacgtccagctgcagcagacaggttgcatcttgatgttggttacagatggccaactcaatttaaccaaccctttcttcctgccaaccatcaggtgaggaatccgccaattgatgctggacacaatcaaatgttaccttctctagcagttccactaagttttgactggcctccagtttttagaggttatggtaaaaatgcttctgtaagctatgatccattgtataccccacagatgcaatcttctgcttggtcagggttccctgctcaactagtgcaaagagggggtatttgcagtgacagtgatgttgcggatgatactgaaagctattggttttctgaagaagaatcagatagtcgtgcacattctggaagagatattaatcaatactttggtggaggtgtgatgtactggagtcctgcagaacatgcaggaactggtttttccaggccaccatctcttagttcagatgatagtgcctgggcttggcatgaggctgatgttatacgagttgttgatgatgtagctaatggtattccatctacatacacaaatggtgtatcatcaccaccctccactccatcttgttctcaaaatgaatctttggatccagctgctcacttgataacagggaatgagatcaataatgaagctctgacttctccatcttcggtgcaagatagtcctgaagataaaataatgcaagttgcaaaggctgtgtcttgtggcagtgaagtagttaaggcagatacattgccatatgccatgctgcggccgatagttgttcctagtatatcacgaaggtcatcacgatctgagattaagggtgctcatgatcacaggaggagcccatgtgtaccatcaacaaggagggacatacctattctaagaagacctccatcaccagtagtacttagtgttcctcgcgtacctaggccaccacctccttcacctgctggagagtcaagaaaacgagggttccctatcgttagatccggcagctcaagtcctcgacattgggggatgagaggtttattttctgaagacaaaatttttcatagggctcagttttgcttggatggtcctgaagttgtatggccttcatggggtaacaagggtacttctggtacattggtgcaaacaattgaggatactgttttgcaggaccaccttgttaagatttcacagctatcttgtgatcaacatccagatgtggcattgcctgtacagccactagatatgctaaatggttcgtctcacaaggcatccctctctttgatgcacaatgctctacatgaagaaatagatcaattctgtaagcaggttgctgctggtaatctggtgaggaggccctatataaactgggctgtcaaaagagtcacccgttgcctgcaggttctgtggcctcgctcccgtacaaatctatttggctcaaatgccactggtctggctcttccaactagtgatgttgatcttgtggttagtcttcctcctgtccgaaacctggaacctattaaagaagctggaattttggaaggccgtaatggcatcaaggaaacatgtctacagcatgcagcaaggtgtcttactaaccaggactgggttagaagtgattcccttaaaacagttgaaaacacagctatacctgtgatcatgcttgtagcggatgtaccctgtgacacgaatatgtccaatgagtattcttcagtactagatggctcacaagactattcagttaacatgcttggagaacaagggagtcctcctcggtctgacacctctagttcagaaggcagcaacatgctgatgtgctcaaaattgaataaggatgattgtgatattgtgcagtcaattcgtcttgatataagtttcaaatcgccatcccatacaggactgcagactactgagttggtacgtgagttgagccagcaatttcctgcagttatacctcttgccttgattctcaagaagtttttggctgaccggagtttggaccacccctattcaggtggtctgagctcttactgtttggtgctgttaattgttcgttttctccagcatgagcatcatcttggtcgacctattaataaaaatctgggcagccttttgatggatttcttgtacttctttgggaacatatttgatccacgccatatgcgcatttctatccaaggaagtggaatttatttgaatcgagaaagagggcaaagcattgacccgattcacatagatgatccacattgccctgctaacaatgtgggcaggaattgtttccgcattcaccaatgtattaaggcatttgctgatgcgtttgctgttcttgagaatgagctactgcagttcagttcagaatgtagcatgcctgtatcttcattcaatatactaaagaaaataatcccaagtattgattctgatgagctgtagctataaaaaagaggtacgattccacagaatacaattgatgacagggtggaatgacctgtgctgccttctagacacactgatgtctatgcagctgctcagaagcctcagtgtggcaagtttgatacctctggaatagaccaaaaaatagaccggcaagatggcaatattcaaacgtgagctcttgtgtgttcatgcaatggcacatgatgccttgctccctgatcgagcttcttgatgttcagatctctgactgaggtaaattggcttactcaagaacaaggtggtgaattggctttctcatgaacaaggcgttgctgcacacagactactgacgtggctgttcttgcacctttctgaataagcccattcatgtaatgtttggtaaatgcaaaccgcatgattatccgcttgatactgtgattgatagatgcttcacctcgtgccaatattctgtgttccaatgccaagtcacatattctgagcagcaactggagatttgctcatgtaccgattcttcaaggtcctaggatcatttggggtgatgaagattgtgaaatacatgtggaggggtacttatatggagatgcatggtcttagtaattaagcggtcaagaacttatggtcacctgatgaaaacaaggatggttgtgaagagaacggagtagtggcatcagctatcagggaaagggaagtgctattgacatcatggctgacccctttcagattatcgcgctgagatcttcctggcgaggattgggagctacgagccagatatccttgacggaaatgtttgcttggacagcgtaaaccggaaagtaccggcgatgatattgatgatgataatcgcactgctctctattgtcatactgttgtctgcactcttcagcgacatgtcttgtgccttttcaacgtgcgaaatgtgagcaattgctcttgtaaagctgcactatttcactaaaacattattgtttgggttatttagatccatggtattactatttatctatttggaaacttacattacaattttccctggatgtacccgatccatgccatttcctacgcttctccactcggcagattgttgaatcgtatcccaaaatctctcccattgtcgtctccatgaattgctcatctcacctctctaccatggagggtttagggtttatatctttctatcaggttaaactggttggtgtatataacttaatatggtattagatgtctcgaatttaaatcctagttagtataattaaataaaaataaata

SEQ ID NO: 216400 - DNA, 5948 bp, Zea Mays
cgcaaaccaagcaagaccggaagagcgcccaggcccaccacagcggccactcctcccccattcccgagtcccgaccaaccaccggcaccgacgcggccgctccccagcatggcctccaccgccgccgcgccgcgcaccacgaaggagctcatggacgccctcaccgcgcacctctctctctaccacgccgccgcgaaccctagccccgccaccgctgctgcctctacctcctcctcgtcaccgcgcgctgcgatcctccggtggctcgcctccctctcccccgccgcgcgcgctgcggctgccacctccctcctctcccccgccgcggctgccgcgctgctctccatggtccgccggctccgcctccgcggccactcctccttcttcgtgctccactcctcgtccccgtccacctccgcgcgcggagccgaggagccaaccgtcctctcgcgcctctcccggggcctcctcgcccgcgccgccgccagctcccgggcgcaggcgctcctcttcgccaacaccctcctcttcccctcgtcgcccgcatcgtcgcggcgccccgacgtgatcaccgtcgccgaagccttcgtcgctgacctcgacggctttgtcgcagccatggatgagatctctggcgggaggttcctctgctgcggggagggggaagtggacctggccgcgctggcgtgtcaagatttcccggagctgccctggcttaatgccaaggggtactacgtgatcgaggagtttctggccaataggttggatatcgcactgcgaatgtcgtgggcagcggcagggggtgggtcagctggagggagaaaggcggtgagaattgggaagagtgcgaaggagaaggctgggcttgctgcaaacgcgttctggagggagaagggatatgcggattggtggatgagactggagcctcggatgagagcaagtctcatgggggtattcttcgggaaaggtgcaatggccctggcaaatgagatggttgaaggatcagacagtgcctcaagggataatttaggtgaaccaggatcattcgtggcaaacgaatcttgtgaatgtacacggcagtctctgttcagaaagaattgtgcttcttccgttgatggtgcaaacattctgtcttgcagcaagaagtctgtattttataaagagttgaaaagactgaaactagttgaggagatagtctgtttgaagagcaacattacttgctgcagcggtgatgcaatctttttcacttcattagtgtcggctgctactgctgctggtgatgtacttatgaaattacaagggcttctcatggtggtgtcgacagaaagtataaatcttgaacttattggggatgaagcccccaaaaagaaagatgttgaaaagaccagtggaggttctcggaaaggaaagaagaagtctaacaccttgaaaaagctaacgacatctgctaagccatctaaggataatggatgcagtagttcagataatcgcaattgtagtcctttaccaaaccattgtgctccatctgttgaaggcactgctgctggacctccatctgaaaaaactccttacaaggaaattgtaccaacaacgaaggaacaaactgtctcgttggatggttgcaaaaatcaatgtaacaaaaagaagaacaagcggaaagggaaaacaaaactatcaaatccgatgaggcctgagagcccaagatctaccaaattaaaaacagttgttccccatagtgctgcagaggccttgcatgaagctgctaaagaggctgatgtctcacctcatcacccatcgtatgtccatccttccaagaacgagatctctgaagctgttagctgttctgacccttccattttatctaatggaacaaagaacgttttcagagtgcccatgatgatgccttcaaagtggctgtgcaggcctcatcgtaccttagccaaagtgaatccttggttcagtcatcctcttgtctaccttccagaagcaatgaggtctcttctactaatctgtatggaagttcagttgactccttggtaagatctgcacaggaaaaaactgaatgtgatgggaaacatgtggatcataaatctgaagtgacaaaggacagaattttaccttctgctattcctactgacatgcttcaaagtgctataagtaaaaatggtggagttatgaaaaatggtggtggtgaatgttatgtatacaataggaacctactgggaggaacgtcgtatgaatggcctagtgtaacaccatctcattttgtatctcctcaaatgcaacaacgtccagctgcagcagacaggttgcatcttgatgttggttacagatggccaactcaatttaaccaaccctttcttcctgccaaccatcaggtgaggaatccgccaattgatgctggacacaatcaaatgttaccttctctagcagttccactaagttttgactggcctccagtttttagaggttatggtaaaaatgcttctgtaagctatgatccattgtataccccacagatgcaatcttctgcttggtcagggttccctgctcaactagtgcaaagagggggtatttgcagtgacagtgatgttgcggatgatactgaaagctattggttttctgaagaagaatcagatagtcgtgcacattctggaagagatattaatcaatactttggtggaggtgtgatgtactggagtcctgcagaacatgcaggaactggtttttccaggccaccatctcttagttcagatgatagtgcctgggcttggcatgaggctgatgttatacgagttgttgatgatgtagctaatggtattccatctacatacacaaatggtgtatcatcaccaccctccactccatcttgttctcaaaatgaatctttggatccagctgctcacttgataacagggaatgagatcaataatgaagctctgacttctccatcttcggtgcaagatagtcctgaagataaaataatgcaagttgcaaaggctgtgtcttgtggcagtgaagtagttaaggcagatacattgccatatgccatgctgcggccgatagttgttcctagtatatcacgaaggtcatcacgatctgagattaagggtgctcatgatcacaggaggagcccatgtgtaccatcaacaaggagggacatacctattctaagaagacctccatcaccagtagtacttagtgttcctcgcgtacctaggccaccacctccttcacctgctggagagtcaagaaaacgagggttccctatcgttagatccggcagctcaagtcctcgacattgggggatgagaggtttattttctgaagacaaaatttttcatagggctcagttttgcttggatggtcctgaagttgtatggccttcatggggtaacaagggtacttctggtacattggtgcaaacaattgaggatactgttttgcaggaccaccttgttaagatttcacagctatcttgtgatcaacatccagatgtggcattgcctgtacagccactagatatgctaaatggttcgtctcacaaggcatccctctctttgatgcacaatgctctacatgaagaaatagatcaattctgtaagcaggttgctgctggtaatctggtgaggaggccctatataaactgggctgtcaaaagagtcacccgttgcctgcaggttctgtggcctcgctcccgtacaaatctatttggctcaaatgccactggtctggctcttccaactagtgatgttgatcttgtggttagtcttcctcctgtccgaaacctggaacctattaaagaagctggaattttggaaggccgtaatggcatcaaggaaacatgtctacagcatgcagcaaggtgtcttactaaccaggactgggttagaagtgattcccttaaaacagttgaaaacacagctatacctgtgatcatgcttgtagcggatgtaccctgtgacacgaatatgtccaatgagtattcttcagtactagatggctcacaagactattcagttaacatgcttggagaacaagggagtcctcctcggtctgacacctctagttcagaaggcagcaacatgctgatgtgctcaaaattgaataaggatgattgtgatattgtgcagtcaattcgtcttgatataagtttcaaatcgccatcccatacaggactgcagactactgagttggtacgtgagttgagccagcaatttcctgcagttatacctcttgccttgattctcaagaagtttttggctgaccggagtttggaccacccctattcaggtggtctgagctcttactgtttggtgctgttaattgttcgttttctccagcatgagcatcatcttggtcgacctattaataaaaatctgggcagccttttgatggatttcttgtacttctttgggaacatatttgatccacgccatatgcgcatttctatccaaggaagtggaatttatttgaatcgagaaagagggcaaagcattgacccgattcacatagatgatccacattgccctgctaacaatgtgggcaggaattgtttccgcattcaccaatgtattaagaatgagctactgcagttcagttcagaatgtagcatgcctgtatcttcattcaatatactaaagaaaataatcccaagtattgattctgatgagctgtagctataaaaaagaggtacgattccacagaatacaattgatgacagggtggaatgacctgtgctgccttctagacacactgatgtctatgcagctgctcagaagcctcagtgtggcaagtttgatacctctggaatagaccaaaaaatagaccggcaagatggcaatattcaaacgtgagctcttgtgtgttcatgcaatggcacatgatgccttgctccctgatcgagcttcttgatgttcagatctctgactgaggtaaattggcttactcaagaacaaggtggtgaattggctttctcatgaacaaggcgttgctgcacacagactactgacgtggctgttcttgcacctttctgaataagcccattcatgtaatgtttggtaaatgcaaaccgcatgattatccgcttgatactgtgattgatagatgcttcacctcgtgccaatattctgtgttccaatgccaagtcacatattctgagcagcaactggagatttgctcatgtaccgattcttcaaggtcctaggatcatttggggtgatgaagattgtgaaatacatgtggaggggtacttatatggagatgcatggtcttagtaattaagcggtcaagaacttatggtcacctgatgaaaacaaggatggttgtgaagagaacggagtagtggcatcagctatcagggaaagggaagtgctattgacatcatggctgacccctttcagattatcgcgctgagatcttcctggcgaggattgggagctacgagccagatatccttgacggaaatgtttgcttggacagcgtaaaccggaaagtaccggcgatgatattgatgatgataatcgcactgctctctattgtcatactgttgtctgcactcttcagcgacatgtcttgtgccttttcaacgtgcgaaatgtgagcaattgctcttgtaaagctgcactatttcactaaaacattattgtttgggttatttagatccatggtattactatttatctatttggaaacttacattacaattttccctggatgtacccgatccatgccatttcctacgcttctccactcggcagattgttgaatcgtatcccaaaatctctcccattgtcgtctccatgaattgctcatctcacctctctaccatggagggtttagggtttatatctttctatcaggttaaactggttggtgtatataacttaatatggtattagatgtctcgaatttaaatcctagttagtataattaaataaaaataaata

SEQ ID NO: 216401 - DNA, 183 bp, Zea Mays
gttttctttatggagaacagagagcaaacacaaacaaatcagatgggacataatgttgtttgcacaccatgtgcatacatctcaaacaccattaatagagttagctttccagatggctatagcaccattgattccacaaactttgcaacacaagacgttgcaggtcctaaaaataacacaaaa

SEQ ID NO: 216402 - DNA, 934 bp, Zea Mays
cgctctcacagtttgtctacgcccatttccccatcaacgcgtccatcaccaactccaacaccgccatcgagataaggaacttcctcggcgagaagaaggtcagaaaggtggacatgcttgacggcgtgaccatcctccgctccgagaaggtcaaggacgagcttattctcgatggcaacgacgtcgagttagtctctcgctccgccgccctcatcaaccagaaatgccatgtcaagaagaaggatatcaggaagtttttggatggtatctatgtgagcgacaagggtgtgatcgaagaggagcagtgagggacaattagttgttatcgtttgagttggaattattgtttggtttgcaattttctcaaggtgaactttgtaatcggttaggatgtgttgtggaccattatcttatcctacaatattatcgtatctgtttaagaatatgaagcttgtttatcatttcctaaaaggatctggtcgacgaggttactaaaacaggtgaaggttaaaggtttaaacgtagctttaaacaatatagtaaaatattaatatattatagtttcagacaataatatgaagctaaataccaaacaatcaacattgttcacataataatattctgcaaaatgatatctctacaactggtcaactgcacaagttcaactaatagtaagttgacaaacgcaaacaaaatagaatgaaatctataaacataacaaaaaaagcaaatagagtggaatgcaatgttcacaaaatcaagcacacaagcgttatctagtctccctttattatatgttaataaccatcatctaaatcatctataactaacttcatccttgtctaatttgttgcttatcaccatatccaccgctgttgtttctggcttcatcatccatatcaaggtcatcaagcaaaaaaaaaaaaaaaataac

SEQ ID NO: 216403 - DNA, 7249 bp, Zea Mays
cccacatcaaccctcatagcatccgctgcgctgtcccgaacacgcaccaggcttgccactccaggcacgcactgtcctttctcctttcccttccgtttcatccgggcgcatggacctgcgctgcgcggttcggctgcgctcccgtccgaatcgcgccccttccttaacctcagcgttgctttgctcgtgctgctctctgttccgccgctcgccacaaaacccctctcccctcacgctccccacccacctcctccccctcgaggcaatgccgagcgcccttaacctagcctgagttcgagctcaatccccattccgtcatggatcggccgccgcatctcgtcatcgacctcaacgaggccccgccgccgccgtcgagcgacaccccgccggcgcaggccccgtcgccgccgcaggagttggctccgcccgtccaagctcctcctcctcctcctcctccgccgccgccgccgcagtttcctcctctcctgccgccgcagctgcccctgggtgcgcccaaccaacaggtgcggctccagcaggaggccctcgacgtggtgcttcgggtccaccgccccctcgaactgaggaatacaccttttgggcccatagggaacgtgcccgccggcttgctccctggtctggggctgccgctgctccctctgcagccgccggcgcctcaccctggggaggcgggttggggcaacccgccggccccctgctcgtcctgcggtcgccaggagattctggggggaaccttggtctgcgacgcgtgtgacagggggttccatcccaactgcgtccgcgtctggccgcctctcttccccccgcccccgccacccggcccccctggcgcccggcggccccgtgccgccgccaacgaggactggatctgccctgcgtgtgagaggcgtggcgctcgctccacccgctggaagctaggtgcagttgagcttgacatcaacgctgctccgccagaggaccccgtcacagtcatcgccaatgacatccgcagacaaaatatcaccgatggaccccagttgacagttgccaacttgccacattttgaggggggtcacttgcagaatactactctttatgatggaatgcagtttatgccagcatttgatcttgcccagtgttttggcatgagacaaaattttacttccatggatcaagatttaattgctgatggaaacgtaccacaaagatcagctcatttacgcagaagaagagatcttccacaaacatcaacattacccaaggttgcagtgaaccatgagttaggaagtgctggcacgtctatggatccatcattttttaacaatacaatcaaacaaagtcctagtgaaaacagaagttccttaaagcctccaatatttcttatggagaacagtaatcatcagccacatcatcatacagttgcactacctgttcaatatagtgattttttcattaccagcttgggagaaattgacaatcggacaagttaccacaattcataccagatatggccagttgggtttacgtcttactggcatgatagagttactggttcactgtttgagtgtgaagtgcacgatggagggaattttggacctttgtttaagatgagaaggttaccgtgttcagcattccaacttccggatgcatcaaccacagtgtgcctaaatgttgttaggaacgctgatacaatagaaacgaaggaagatttctctgagacgaatcaagatttcttatcatgtctaggtaatgatttggagggtaaagaaagtttagggtgcagtaatgtagaaactaaggatatgacagtgccagatgtgctgtcagatcctggctctttcagttgggcaccgaccaatgatgcaaatatgtatgacaaaattggtgacttcagttatgaaggaacatcaccttcctcagtctggaggatgatttcttgtgctatgatggaagcctgtgaaaaaatgtacaaggagcatggccatttggtattattctgcactcacagtagtgaaaaatctccatttgactatgaaagtggacctcagcgcactgatggtcctttcaatctattggctaagttttgctcatcaaatgggcctaaggtaccacagtttatagaaaaggagaatgatgtgcagtcaacttgtgcattacttaaagaatggctgtatccagacagaatcgggtttgatttggaatttgttcaagaatttgtggaatctcttcctaaatccggggcttgttcacactatcagttcttgtgtaacaggactggaattaactcttcactgacgattgcaagtggcacactggtagctgttaataaaaatagtccaatgcatgcgagacatggatctgtagtgagtgggccgcaggatcatgctcagcctagctcttctagcatccgtgagcttcctccaggaaatcctattagccgcaagcttgcaccagaattggctggggatgttttccagatattggagtttcttggacgatttgctgaaatcatcggcctgaaagaacttccttcaattgagcaagtagaagatgaactcattgacccatggccaatgcatccaaataaaaatgacatccacaactacatggatcacaatccaccgatgaattcacctgctaatgtttcttcatcgtactcgaatggcgaatcagcacgagaagctgctcaaaataagttggctgcccagacacttgggagatgtagtggtttagtgctgcctgagatccacattgcactcttgaaggttcttttcaccgaacttgtatctagagtcgcaatttttgtggatccaagcattgatttaaaagaatcaaaatccagacgaggaagaaaaagggacactgatactctaacaagagagttaaagattgatatgctgactgctaacaatttgacttggccggagttggctagaagatatattttagctgtttcttccatgagtggctgcatggatttatctgatatttctagtcgagaaggagtgaaattgttccgctgcctacaaggtgatggaggtatcctgtgtggagctctacccggggttgttggcatggagaaggatgcatcgctacttgcagaggctgaaacattgatatgcaattcttcagcaaatgaagggaataccgtctttatgatggattacaaggatactgatattgtagattctcctgaggagcctgctagtgacactacgttgccagattgggtgaaatcattggagcctgtgagaaaattgccaactaatgtgggaacaagaataaggaagtgtgtttatgaagctttggagagaaaacctccagaatgggcaaggaaaattttggagcactcaatcagtaaagaggtctacaagggtaatgcatctggaccaaccaagaaagctgttttatccgtcttgacagaggcatgccgtacaaaagtaccccagaatacagaaaaaccaagaaaagagagaaatattatctccatctcagaggctgtcctgaaaaagtgccgtattgccctgcggcgtgctatttcctctgatgaatcaaagcagtttgctaatttgcttggaacaactctaacaaattccaatgagaatgaagatgagggcatccttggatttcctggtatggtatcccgccctttggatttccgcacaattgatataaggttggctaagggagcttatcgcggatcttgggaggcttttcttgatgatgtacaagaagtaatttgtaatctgcaaactgcatttgctgatcgacctgaagtgctgataatggttgttgcactgtctgagagttttgagtcattgtataagacagaggtacaagaccttgttgagaaatttgacagatatctaagcaatgaaaatgatagctcagaaatccaccaggagctacaagatgctctcacggcagcaaacaataaactgccgaaagcaccatgggaggatggtgtctgcaaagtctgtggaatcgaccgtgatgacgagagcgttcttctatgtgataattgtgactctgaataccacacttattgcctgaacccaccactggcacgcataccgcttggaaactggtattgtccatcatgtactgcccaaactcatgttgcagtgcaagaacaaaagaagtgccttggggaggaagctcatgtttttattgagaaactcaacaagttagctgttgcgatggatgagaaagagtactgggagctaaccgtagcagagagaatctatttgctaaaatttctatgtgacgaattgcacaacacagctctcatcagagaacatctagatcagtgttcagacaagtcaaatgatctccagcagaaattacgtcacctgaattatgaactgaaagagttaaggtatcgggtagaaataaaaaatccttatgccacacaaagtagatggatgaaaaatgaccaagtaagcaatagttcaggactcgtggagaatcagcagcgtgctatgcccacagcctcagagcatcttgaagaggctgaacaggttaatgttggagttaacctgaacaaccctgctgaaggggttcctgctgcactattggatgtgggtaaaccttgcagtactgacaatggcatatccagcacatctgttattgaaggaaataaatctttggggctttcagaacaaccatcaaagataattactgaccagactgatcgggactctattgccgaaggatccaatagttgcgagaaatcattagttggcaaaagtggtacttgtgatccgaatgtgggagagactcatgctgctacagttatcaatgcaccaaatggagatttacctgatgaaaatgctatgacattgtcccaagataatattgaaacatcgacatctaaactggttgaccatgatgctgatatgaacgaatcaaataatttattggagaggatttcacagttgcatggttcaattagcacagtagagtcacagcttagtatggcatccttgagaggagagtgcctgggtagggattctgttggtcgattgtactgggttacaggaagaccttgtaagcgtcctcgtcttgttgcagatggaagcatgatgatacccaaggacagagacattagcatggttacaagccattctcagtcaacattcgatagaggttggaattcggcatcacttgttatttatgaatctgatgaagaaatgaagtgtcttgttgactggctaagggacattgatccaagggagaaggatctgaaagactctatcttgcactggcaaaagtctatttatcgccaggctagtttccccatcactgatcctccagtgtccaagttttcaaagagtgagccacttatggagcttccaaacaccaatgcttttatagttttggagcaaaagtatggtctgcaaacggatcaggacactagtgagctatccaaaaggagaggaacgaagtcaaggtcgggttctgaagaaagagtatatcgctgcgactgtttagagcctatatggccttctcgacaccattgcttaaattgtcatgaaacttatctcacattgatggaatatgaagggcataatggtggaaaatgcaccagcagtaacgactgtcctaatgaaagtaaagaaattgatgagccgaaactgaagggcagcaagtctgatataaaggaaaaagatcctgtagttcataattgttccgttgaaccatctaacagtggaaaattggagtcatgcccttatgactttgaagaaatttgtagaaaatttaccacaaatgattcaatcaaggagacggtgaaggagattgggctgcttggctcaaatggaattccatcttgtgtaccttcacctgcatatttccttgacccgccagttctgctaaatgaaagtaaaagaaatgacgataaaccaaatgattggacttcctcattgcaggaatgccaagctgtgtctgccaaaatgtcagggcaagagggatctcaagttggccaagatttttctggcaatgcaggtgatgaggagttgccaaaatctaagaagcctgtcagggatagtacttcagccaaggaagcaccttcaacagacatatccacaagattgctaactgttaatgggggattggttccagagtcatcactgatgcctgtaataggcaggaattttcatatcctgaagcagctaaagattaacttgcttgacatagaagcagctttgcctgaggaagcattcagagcctcaaagtctcagcaaataagaagacgttcatggcgtgcttttgtgaaggatgcagaattaatatcatatgtggtattggcaatcaatttcttgcagagcatgataaaagccgagtttctgaagaaagattggtggtactggtcctccttcactgcagctatcaagacaacaactgtatcatcgcttgcgctcaggatttacaccctcgacgactgcatcatgtacacaaaggatccagctccaaacctgcagccagctgacaatgcaaggtctggaaacaaggggaagaggaagaaagacatagattcatgagcatcgtaaccacaatgctcctggcttcccctgtagattctatctatctgcatttagaggcttctcagttctctggcagcataacaacgcggtcaggtagattggagatatagatggtagtggtcaggtagattggagatatagatggtagtgatacaggtcgcaacctatgtgtgacctctttcttactgtacattccagtgtcacagcaagggtgcagccatgatttgcccgtttcagtcttgtcctacttactggcctgccattgcgcgatatctgctgttgctaaggctcaatctctgtaaattctactcgagggatggcaccgggcaagtgctggtgtttaatctgttgcccgatgtgttgatctgttctaggggattagaggaggaatgctaggtcggtaggatttaccccatttctaccctgcttcattttattttagtggtggcagtgggtagtcgtagttttttcttttcttttcttttcagagctgggattgtttgatggatgtcccctgcggcatctgactgctttagggaatttgatacatgacgagtgtaatattttttttgacatagaagttgtaactaaaccgaaactaataatgatgaatgaaaatgaatccctgttcctttccccgtttcttcatgttggctggtcgcatgtgccattcaacttgggtgtggggaaaggttgagttgaac

SEQ ID NO: 216404 - DNA, 1457 bp, Zea Mays
  misc_feature (1)..(2): n is a, c, g, or t
nngaattctccgatgcaaattggaattcttttgcagtgcatcaaaagatggcttataatggacagtatgggtttggatcttatggcatgggcttagaagataaactggggttgtatccatcttcatctggtacactgagtcaggacatccagatgagtgaagagcatagcggagttgtgaagaagaggaaaggagtggaggactgtgtcacattgttgcacgatgcaggtgatcaacaaacaaaaggttcgcctcagccagaaaggaattcagtggaggaggggaaccgaaagatttcgcccaaaatgcaaagcaaggaagattcttctgatggtgatggtactaaagaggactatgttcatatccgggcaaagcgaggccaagccactaacagccacagccttgcagaaagactgaggagaaagaagataagtgagaggatgaagcttcttcaagatcttgttcctggatgcaatcactggcaaggcagtcatgctcgatgagattatcaactatgtgcagtcattgcaacgacaagtcgagttcttgtcaatgaaactcgcaactgttaaccccgagcttggctttgacattgagcagatcatatccaaacaaatgctgctttcacaagacagacatcttgctttctatggagtcgaaccaggatcaagcggccttactggcccatttaaccaaggaatcatgcagccagaattgatgtgcaccattgccaatcccgttgatgttttgcacggagctattcacgacgcgtcaacaatgaaccatataccttctatgtgggaaggacttcagaatatgcctcagatgaacttcaaccctggcgtggcagccgatagcggcaccaacaactctggctccatgaagatcgagcagtgagcttctgtatagctccggaattgttctgtgaatcatgaatcgtcgaaaagcgctcacggggtggagtcttttttgtatagctggaggcctaaccattcatgccggtttccttctgttgcttccatactgtgcgacacattgtttatggtacggcaaatgaggatcatgtacagctggagctggaaaactgatgccactgtaaatttctgctgtgttttggcctgtggaaattgggatggaaacctattaccatccatgaaatccaatggcagaagcttgttggaactagggaccaggtgctgaatgctgatgggccaacatactagaatggaatagtaggtacaaaaatgcagagtttgaagcctctttgtcggaaattccatggaacatgcaatgtaaggtttcatcatgcaatggaaggaaactcattattgttaatacttgttatttcaaacgtgtgatcataattttagtagaaatagtaggagattgccatatttatgttatcaaaacagtaaaactgaatgggagctggcacttggtgcaagcctccaacctgg

SEQ ID NO: 216405 - DNA, 1592 bp, Zea Mays
gggatttgatgccttgcggtcttgcggagtaccacgacgaaagttcagagcgggaaggcggggagaagtgtgataaaggaaatggggcacacctcatctggcaatgaagtgcccttgaaatattcttcaggcaaagctttccccctaggagtgtcacaagttgacgatgggctaaattttgcaatattctcacagcatgcttcttctgtcaccctttgcttgaaacttcctgagagaggcacccaagatgatgcggacattatagagtttgctttagaccgccagaagaacaaaactggagatatatggcatgtgtcagtggagggtttgcctgcttcttgtgttctctatgggtatcgtgttagcggtcctcaagggtggcaacaaggtcatagatttgatgacagcgcttttgactccgtgtcatggccgtttctcattggggttttgaggaaaatggggtttgggcagatttggtgtgatgttgtttgtgggctgttggctacttcctccacaagaattttgctaaatggcgttcatggggagatcatttcgcaccagaggggtctaaggcaaggagacccactatcccctatgttgttcattttggttatggatgttctgaacttgctcattcaaaaggcttccgatgaagggttacttcagcagctatcagctgggactttgcatcacaagctttctctttacgcggatgacgcggtggtttttcttaggccggtggcttcagacatcaatttggtcctggagatccttcggctttttggggaagcctcggggctcaagaccaatgtcctgaaaagtagtgtgttccccattcgttgtaccgaagatgatttgatgcgggtccaagcttctctcccctgccccatttcagatttcccgtgtcaatatcttggactgcccctgtccttgggaaagctttcaaaggcccaactacaggcattggtggacaaagcagctagtgtactcccgggttggaaggccgacctgatgacaaaagcgggtcgagctgtttatgttcagtttgttctcacagcaaaaatgatttatgctgcgatggctttggacctccctaattggaccaccaaagctattgacaagataagaagaggtttcctttggaaaggaagaaaacaagccaatggtggtcactgtttagtggtgtggggtaaggttactaggcctaaagttctgggcgggcttgggatcactgatctttggcttttgagcgtggcgcttcgagctaggtggccttggctccagagaaccgatcactctaagccttggtcggtcctccctgttcaggcctgtggtgcgatggaagccttgatcaatgttgcagttgtgtctcaattgggtgatggacatgatatcctcttttggaaggatcggtggctgaatggtagatgcatcggtgaggtggcacctgaggttcttgagcatgtacctacgtgtgtcgcttccaaaaggctggtaaaagatgctctaacaaatctgaattgggtggctgatataaggggtgcgctttcagtcagggcgcttgcacaggttttggatctctgtgacttgtt

SEQ ID NO: 216406 - DNA, 4090 bp, Zea Mays
attacttctgaaacaacaaaggatacacatccattttgtcttgaacgtccagcctgaactgaaatcgtggaggctgagtgaaggatgctttaaagaatttcaaggttatagatgttagtggaaaagaattcaaattcacctgggcatctgaacgtggcgaattgtgtgatatttatgaagaacgtcagagtggagaggatggaaatgggttgcttctggagtgtggctctgcttggcgcaagatcaatcgtgctggaccctgccaatccatctgtcaagagtcaggccaagtcaatggctgcagcagctgtagaaggcaatccacggaggatgcactggaagcagaagaatgaattttttaagaagaataaagctgctgttatcaccccaaccaaatcagtttcgaaggtcaagttatctaacaatattcccaaagggaatatctcgagttcacctgcaccttctcctgaacaacctggagcaagcaatccttcatttcctgttggatcagatgcaaataatgaagtcacaacaccttttgatttgaacaaaggggaaaacagtaaacatgagaaatcgactgcaagtaagatgtctaacaaaggtataaatcgccgtgcaagttctcatgctgcaaatgtggataataatacaaaagaagtgcgaagctacttgatatctgtgctctcaaaaaatccaaaaggaatgggcctaaaggccttggagaaagttgctgcagatgcatttccaaatgcatcaaagaaaatagagagcatcgtcaagaatattgcaaattaccaagggcctgagaggtatgttctcaaaccagggttggaggtagaaagctctaaaaggcatgcatctgaaggagtaagatccatcagcgagaatattgaggaatctgctccaagcctaaagattgatgatcctgatatatgtgagaggattgacattgtgggctccccacttgctgtaacagatggaaaactcagtaatgatagtgaaggtaaggctggaacttccagtgacagtggaagtgacagcgatagtgatagtgacagcagtgacagtggaagtgatagtgagagccaaagcagaagtgctgcggaaactggtagtgggagtagcagtgatagtgacagtgatgcctcatcaagcagcaaggaaggatctgatgcaattgttgatattacaagtgatgatgacaaagcaaatacagcacacacaaaagtagtagatgaccttaatttgtcttcatcaccaagagatttgacaagacttaatgttgacgatgaacaaattgacattggaacaaatctggactacaggagtgcatcaccccatattgatctgaacaattttaatactggcaatgatgatgcagcagcagagggctttagttctggcaacctgaacaagccatctgaaatgccgggaagcaagaacatgacaaacaccagaatggattctatcggagttgataacaagcacaatgaaatgtctttcgtggacaaccttttcgatgattccatgagagcagccagtgagaactcacccaagggggaagctggtcaattgacagtgcagcatggcaataagagaaaatcaacatctaaggatgaatcaaaactcgtcccagtgaatattgccaaacccaaattaaaaaggtcttctggtagtgagaactccacagcaaagcctgagagtgccaaaaaggccaaacctgacgtaacatcaccaataggttctttatcagaacacaaaagaagtttaccccctgaaaagcataccaatgataggttgaacaaggagacggggaatgttagccgtgatgcttcacgagatagcagtcctgccatgaaaggaagaccttcagctcctggaaatttacagaggatagatcagagcccaaatttacctatcccaacaatgcattctgagggaacaaaaggaaatgctgttaaatcaagttcaaagaaaaaatcagataagatgcagaaaccatggcatggtattgatggtgactttggctcatgttattcacatggtgtagatcaccatgccaattttgatggctctgatgattcttccacaagaaaaaggagtagacatgagaatcctcttattgatgataaaatgcttaagcattcgaaggacactaatgctaatataaattccatgaatttaaccaaaagttccagagaaattgttgtgcctgatgaggtaactgcttttcctgaatctaatgaaagtaatggtgagccatcaaattcacaaagagataatgttgagaaatcaccttatggtaaaaaaaagctccagagagagctttctgatcttgagttgggtgaacttcgcgagacttctttggaaaatgatgatggaaggataaggaagcaatttgagagaaatagttcctccaagtcgcttgatgctaaactaactggtgtaaataacttctaccccagtataaatgacaggaagactcctgtaaccgtctttcatgataagaggaaaccttcacctcaagaatatggaaatagaggccatgtaaaccaggaagggtttcagaggaaggcagcagtgtacgcgtttgatgataataggcctcaacaaagagagaattttccagagagcctgcatttgccaaagattgataattcagattctgagaacataatgtatccagataggtcaggagaaaaaacaagcaaaagggaaactaggatggcacatagtggaatgctagagtatgctgatatgcagaagaagaaagcaacctcaaggcttccacagaacggtactaataatgtcatagtgtctcgaatgcagaaatcaatatccacatcagataatgaggaaagaagtagaaacaactctttgattgagacaaagacaggtagaaagagaagagacagttcttcagatgatgataatttatttttctccaagtatgataaagatgcaccagaactcaaaggtccaataaaagatttctcacaattcgaagattatgtgcaggagtacaatgagaagtatggagtctattcttacttgagcagtcagatagacaaaactaagtcagattttttaagggttcaggatgatctcaatgttgcgaaagaaagagacaaggaacagtattataacacggtggaaagactcagagacatgtatcatgaatcaggagcaaggcataaattgatgaagaaggtcttccttttgcttcatgaggaactgcagattattaagcaaagaattaaagatttttcagaggcctattgaaatgagtcactcataacatgtcacttgcaattgtgtttcggagactgtcgctcatcgtaaggctgataatgtctgggcatgagcattatgctttgcctttgtagaagtttgcttgtcttggaaagattcagtcaatggcgcatatcacaggaaacctgagagactccgtgatttctggaatcacatcgtgctgaatttgatagtaatcacggtgaagtggaggcaaggacagttcaaatatcaatgacgttgttggacacctccgcagccccgcacgggggagatagcagaagaaatgattcatcactcagggaagaggtaatgtcgggaagcgaggaggccttacctcagcagttttgcagctagtttggcactgaactgtaaccgggcggttctctttgtagatgttctgtatcttttacccccacccccagtgaagggcgcgatctctccttccctggcattgtacatcactttgtattagtgtgattcatgtcaaactgaagtaagttgctagctgtgtacatatatatagagccggtagagaagttttgaagcgaggagagacaaatctgggacaatttctttttaacgcgtacatcaattcttcgatgttgcagttcagtttctgaaatatgcatatgctctactgtatattggaccaagcctgaagaacaattccagagcatatgaaaatttggatctttaaactggctctcaaactatttagattctcaaaataggtaggtattcctcaacagatcctgtaaaccatgttctctgatttttatataaagatctgtag

SEQ ID NO: 216407 - DNA, 4121 bp, Zea Mays
ctgaaatcgtggaggctgagtgaaggatgctttaaagaatttcaaggttatagatgttagtggaaaagaattcaaattcacctgggcatctgaacgtggcgaattgtgtgatatttatgaagaacgtcagagtggagaggatggaaatgggttgcttctggagtgtggctctgcttggcgcaaggtgaatgtgcaacgcattttggatgaatcaacaaagaaccttgtgaaaatgcgctcagaggaggctgaacgtctctcaaaatctcgaaaatcaatcgtgctggaccctgccaatccatctgtcaagagtcaggccaagtcaatggctgcagcagctgtagaaggcaatccacggaggatgcactggaagcagaagaatgaattttttaagaagaataaagctgctgttatcaccccaaccaaatcagtttcgaaggtcaagttatctaacaatattcccaaagggaatatctcgagttcacctgcaccttctcctgaacaacctggagcaagcaatccttcatttcctgttggatcagatgcaaataatgaagtcacaacaccttttgatttgaacaaaggggaaaacagtaaacatgagaaatcgactgcaagtaagatgtctaacaaaggtataaatcgccgtgcaagttctcatgctgcaaatgtggataataatacaaaagaagtgcgaagctacttgatatctgtgctctcaaaaaatccaaaaggaatgggcctaaaggccttggagaaagttgctgcagatgcatttccaaatgcatcaaagaaaatagagagcatcgtcaagaatattgcaaattaccaagggcctgagaggtatgttctcaaaccagggttggaggtagaaagctctaaaaggcatgcatctgaaggagtaagatccatcagcgagaatattgaggaatctgctccaagcctaaagattgatgatcctgatatatgtgagaggattgacattgtgggctccccacttgctgtaacagatggaaaactcagtaatgatagtgaaggtaaggctggaacttccagtgacagtggaagtgacagcgatagtgatagtgacagcagtgacagtggaagtgatagtgagagccaaagcagaagtgctgcggaaactggtagtgggagtagcagtgatagtgacagtgatgcctcatcaagcagcaaggaaggatctgatgcaattgttgatattacaagtgatgatgacaaagcaaatacagcacacacaaaagtagtagatgaccttaatttgtcttcatcaccaagagatttgacaagacttaatgttgacgatgaacaaattgacattggaacaaatctggactacaggagtgcatcaccccatattgatctgaacaattttaatactggcaatgatgatgcagcagcagagggctttagttctggcaacctgaacaagccatctgaaatgccgggaagcaagaacatgacaaacaccagaatggattctatcggagttgataacaagcacaatgaaatgtctttcgtggacaaccttttcgatgattccatgagagcagccagtgagaactcacccaagggggaagctggtcaattgacagtgcagcatggcaataagagaaaatcaacatctaaggatgaatcaaaactcgtcccagtgaatattgccaaacccaaattaaaaaggtcttctggtagtgagaactccacagcaaagcctgagagtgccaaaaaggccaaacctgacgtaacatcaccaataggttctttatcagaacacaaaagaagtttaccccctgaaaagcataccaatgataggttgaacaaggagacggggaatgttagccgtgatgcttcacgagatagcagtcctgccatgaaaggaagaccttcagctcctggaaatttacagaggatagatcagagcccaaatttacctatcccaacaatgcattctgagggaacaaaaggaaatgctgttaaatcaagttcaaagaaaaaatcagataagatgcagaaaccatggcatggtattgatggtgactttggctcatgttattcacatggtgtagatcaccatgccaattttgatggctctgatgattcttccacaagaaaaaggagtagacatgagaatcctcttattgatgataaaatgcttaagcattcgaaggacactaatgctaatataaattccatgaatttaaccaaaagttccagagaaattgttgtgcctgatgaggtaactgcttttcctgaatctaatgaaagtaatggtgagccatcaaattcacaaagagataatgttgagaaatcaccttatggtaaaaaaaagctccagagagagctttctgatcttgagttgggtgaacttcgcgagacttctttggaaaatgatgatggaaggataaggaagcaatttgagagaaatagttcctccaagtcgcttgatgctaaactaactggtgtaaataacttctaccccagtataaatgacaggaagactcctgtaaccgtctttcatgataagaggaaaccttcacctcaagaatatggaaatagaggccatgtaaaccaggaagggtttcagaggaaggcagcagtgtacgcgtttgatgataataggcctcaacaaagagagaattttccagagagcctgcatttgccaaagattgataattcagattctgagaacataatgtatccagataggtcaggagaaaaaacaagcaaaagggaaactaggatggcacatagtggaatgctagagtatgctgatatgcagaagaagaaagcaacctcaaggcttccacagaacggtactaataatgtcatagtgtctcgaatgcagaaatcaatatccacatcagataatgaggaaagaagtagaaacaactctttgattgagacaaagacaggtagaaagagaagagacagttcttcagatgatgataatttatttttctccaagtatgataaagatgcaccagaactcaaaggtccaataaaagatttctcacaattcgaagattatgtgcaggagtacaatgagaagtatggagtctattcttacttgagcagtcagatagacaaaactaagtcagattttttaagggttcaggatgatctcaatgttgcgaaagaaagagacaaggaacagtattataacacggtggaaagactcagagacatgtatcatgaatcaggagcaaggcataaattgatgaagaaggtcttccttttgcttcatgaggaactgcagattattaagcaaagaattaaagatttttcagaggcctattgaaatgagtcactcataacatgtcacttgcaattgtgtttcggagactgtcgctcatcgtaaggctgataatgtctgggcatgagcattatgctttgcctttgtagaagtttgcttgtcttggaaagattcagtcaatggcgcatatcacaggaaacctgagagactccgtgatttctggaatcacatcgtgctgaatttgatagtaatcacggtgaagtggaggcaaggacagttcaaatatcaatgacgttgttggacacctccgcagccccgcacgggggagatagcagaagaaatgattcatcactcagggaagaggtaatgtcgggaagcgaggaggccttacctcagcagttttgcagctagtttggcactgaactgtaaccgggcggttctctttgtagatgttctgtatcttttacccccacccccagtgaagggcgcgatctctccttccctggcattgtacatcactttgtattagtgtgattcatgtcaaactgaagtaagttgctagctgtgtacatatatatagagccggtagagaagttttgaagcgaggagagacaaatctgggacaatttctttttaacgcgtacatcaattcttcgatgttgcagttcagtttctgaaatatgcatatgctctactgtatattggaccaagcctgaagaacaattccagagcatatgaaaatttggatctttaaactggctctcaaactatttagattctcaaaataggtaggtattcctcaacagatcctgtaaaccatgttctctgatttttatataaagatctgtag

SEQ ID NO: 216408 - DNA, 4114 bp, Zea Mays
gatgctttaaagaatttcaaggttatagatgttagtggaaaagaattcaaattcacctgggcatctgaacgtggcgaattgtgtgatatttatgaagaacgtcagagtggagaggatggaaatgggttgcttctggagtgtggctctgcttggcgcaaggtgaatgtgcaacgcattttggatgaatcaacaaagaaccttgtgaaaatgcgctcagaggaggctgaacgtctctcaaaatctcgaaaatcaatcgtgctggaccctgccaatccatctgtcaagagtcaggccaagtcaatggctgcagcagctgtagaaggcaatccacggaggatgcactggaagcagaagaatgaattttttaagaagaataaagctgctgttatcaccccaaccaaatcagtttcgaaggtcaagttatctaacaatattcccaaagggaatatctcgagttcacctgcaccttctcctgaacaacctggagcaagcaatccttcatttcctgttggatcagatgcaaataatgaagtcacaacaccttttgatttgaacaaaggggaaaacagtaaacatgagaaatcgactgcaagtaagatgtctaacaaaggtataaatcgccgtgcaagttctcatgctgcaaatgtggataataatacaaaagaagtgcgaagctacttgatatctgtgctctcaaaaaatccaaaaggaatgggcctaaaggccttggagaaagttgctgcagatgcatttccaaatgcatcaaagaaaatagagagcatcgtcaagaatattgcaaattaccaagggcctgagaggtatgttctcaaaccagggttggaggtagaaagctctaaaaggcatgcatctgaaggagtaagatccatcagcgagaatattgaggaatctgctccaagcctaaagattgatgatcctgatatatgtgagaggattgacattgtgggctccccacttgctgtaacagatggaaaactcagtaatgatagtgaaggtaaggctggaacttccagtgacagtggaagtgacagcgatagtgatagtgacagcagtgacagtggaagtgatagtgagagccaaagcagaagtgctgcggaaactggtagtgggagtagcagtgatagtgacagtgatgcctcatcaagcagcaaggaaggatctgatgcaattgttgatattacaagtgatgatgacaaagcaaatacagcacacacaaaagtagtagatgaccttaatttgtcttcatcaccaagagatttgacaagacttaatgttgacgatgaacaaattgacattggaacaaatctggactacaggagtgcatcaccccatattgatctgaacaattttaatactggcaatgatgatgcagcagcagagggctttagttctggcaacctgaacaagccatctgaaatgccgggaagcaagaacatgacaaacaccagaatggattctatcggagttgataacaagcacaatgaaatgtctttcgtggacaaccttttcgatgattccatgagagcagccagtgagaactcacccaagggggaagctggtcaattgacagtgcagcatggcaataagagaaaatcaacatctaaggatgaatcaaaactcgtcccagtgaatattgccaaacccaaattaaaaaggtcttctggtagtgagaactccacagcaaagcctgagagtgccaaaaaggccaaacctgacgtaacatcaccaataggttctttatcagaacacaaaagaagtttaccccctgaaaagcataccaatgataggttgaacaaggagacggggaatgttagccgtgatgcttcacgagatagcagtcctgccatgaaaggaagaccttcagctcctggaaatttacagaggatagatcagagcccaaatttacctatcccaacaatgcattctgagggaacaaaaggaaatgctgttaaatcaagttcaaagaaaaaatcagataagatgcagaaaccatggcatggtattgatggtgactttggctcatgttattcacatggtgtagatcaccatgccaattttgatggctctgatgattcttccacaagaaaaaggagtagacatgagaatcctcttattgatgataaaatgcttaagcattcgaaggacactaatgctaatataaattccatgaatttaaccaaaagttccagagaaattgttgtgcctgatgaggtaactgcttttcctgaatctaatgaaagtaatggtgagccatcaaattcacaaagagataatgttgagaaatcaccttatggtaaaaaaaagctccagagagagctttctgatcttgagttgggtgaacttcgcgagacttctttggaaaatgatgatggaaggataaggaagcaatttgagagaaatagttcctccaagtcgcttgatgctaaactaactggtgtaaataacttctaccccagtataaatgacaggaagactcctgtaaccgtctttcatgataagaggaaaccttcacctcaagaatatggaaatagaggccatgtaaaccaggaagggtttcagaggaaggcagcagtgtacgcgtttgatgataataggcctcaacaaagagagaattttccagagagcctgcatttgccaaagattgataattcagattctgagaacataatgtatccagataggtcaggagaaaaaacaagcaaaagggaaactaggatggcacatagtggaatgctagagtatgctgatatgcagaagaagaaagcaacctcaaggcttccacagaacggtactaataatgtcatagtgtctcgaatgcagaaatcaatatccacatcagataatgaggaaagaagtagaaacaactctttgattgagacaaagacaggtagaaagagaagagacagttcttcagatgatgataatttatttttctccaagtatgataaagatgcaccagaactcaaaggtccaataaaagatttctcacaattcgaagattatgtgcaggagtacaatgagaagtatggagtctattcttacttgagcagtcagatagacaaaactaagtcagattttttaagggttcaggatgatctcaatgttgcgaaagaaagagacaaggaacagtattataacacggtggaaagactcagagacatgtatcatgaatcaggagcaaggcataaattgatgaagaaggtcttccttttgcttcatgaggaactgcagattattaagcaaagaattaaagatttttcagaggcctattgaaatgagtcactcataacatgtgagttaagctctaactgtcacttgcaattgtgtttcggagactgtcgctcatcgtaaggctgataatgtctgggcatgagcattatgctttgcctttgtagaagtttgcttgtcttggaaagattcagtcaatggcgcatatcacaggaaacctgagagactccgtgatttctggaatcacatcgtgctgaatttgatagtaatcacggtgaagtggaggcaaggacagttcaaatatcaatgacgttgttggacacctccgcagccccgcacgggggagatagcagaagaaatgattcatcactcagggaagaggtaatgtcgggaagcgaggaggccttacctcagcagttttgcagctagtttggcactgaactgtaaccgggcggttctctttgtagatgttctgtatcttttacccccacccccagtgaagggcgcgatctctccttccctggcattgtacatcactttgtattagtgtgattcatgtcaaactgaagtaagttgctagctgtgtacatatatatagagccggtagagaagttttgaagcgaggagagacaaatctgggacaatttctttttaacgcgtacatcaattcttcgatgttgcagttcagtttctgaaatatgcatatgctctactgtatattggaccaagcctgaagaacaattccagagcatatgaaaatttggatctttaaactggctctcaaactatttagattctcaaaataggtaggtattcctcaacagatcctgtaaaccatgttctctgatttttatataaagatctgtag

SEQ ID NO: 216409 - DNA, 1136 bp, Zea Mays
actgtttacacttcgaccagtgtcccaatgattcgaagattatgtgcaggagtacaatgagaagtatggagtctattcttacttgagcagtcagatagacaaaactaagtcagattttttaagggttcaggatgatctcaatgttgcgaaagaaagagacaaggaacagtattataacacggtggaaagactcagagacatgtatcatgaatcaggagcaaggcataaattgatgaagaaggtcttccttttgcttcatgaggaactgcagattattaagcaaagaattaaagatttttcagaggcctattgaaatgagtcactcataacatgtgagttaagctctaactgtcacttgcaattgtgtttcggagactgtcgctcatcgtaaggctgataatgtctgggcatgagcattatgctttgcctttgtagaagtttgcttgtcttggaaagattcagtcaatggcgcatatcacaggaaacctgagagactccgtgatttctggaatcacatcgtgctgaatttgatagtaatcacggtgaagtggaggcaaggacagttcaaatatcaatgacgttgttggacacctccgcagccccgcacgggggagatagcagaagaaatgattcatcactcagggaagaggtaatgtcgggaagcgaggaggccttacctcagcagttttgcagctagtttggcactgaactgtaaccgggcggttctctttgtagatgttctgtatcttttacccccacccccagtgaagggcgcgatctctccttccctggcattgtacatcactttgtattagtgtgattcatgtcaaactgaagtaagttgctagctgtgtacatatatatagagccggtagagaagttttgaagcgaggagagacaaatctgggacaatttctttttaacgcgtacatcaattcttcgatgttgcagttcagtttctgaaatatgcatatgctctactgtatattggaccaagcctgaagaacaattccagagcatatgaaaatttggatctttaaactggctctcaaactatttagattctcaaaataggtaggtattcctcaacagatcctgtaaaccatgttctctgatttttatataaagatctgtag

SEQ ID NO: 216410 - DNA, 834 bp, Zea Mays
ccaaacatgtcacttgcaattgtgtttcggagactgtcgctcatcgtaaggctgataatgtctgggcatgagcattatgctttgcctttgtagaagtttgcttgtcttggaaagattcagtcaatggcgcatatcacaggaaacctgagagactccgtgatttctggaatcacatcgtgctgaatttgatagtaatcacggtgaagtggaggcaaggacagttcaaatatcaatggcgttgttggacacaggcaaggacagttcaaatatcaatgacgttgttggacacctccgcagccccgcacgggggagatagcagaagaaatgattcatcactcagggaagaggtaatgtcgggaagcgaggaggccttacctcagcagttttgcagctagtttggcactgaactgtaaccgggcggttctctttgtagatgttctgtatcttttacccccacccccagtgaagggcgcgatctctccttccctggcattgtacatcactttgtattagtgtgattcatgtcaaactgaagtaagttgctagctgtgtacatatatatagagccggtagagaagttttgaagcgaggagagacaaatctgggacaatttctttttaacgcgtacatcaattcttcgatgttgcagttcagtttctgaaatatgcatatgctctactgtatattggaccaagcctgaagaacaattccagagcatatgaaaatttggatctttaaactggctctcaaactatttagattctcaaaataggtaggtattcctcaacagatcctgtaaaccatgttctctgatttttatataaagatctgtag

SEQ ID NO: 216411 - DNA, 3049 bp, Zea Mays
ctattctgtcggagtcggacttgtgtccatcttgcttttgcttctccctcccccatgatccaatccctaacccgcagtctacttgatcgtggctagaatgatcgcgatcgagtttcttcggagcttcttcggtgccactgccacggccccgatccaatccctaacccgcaggccccgatccaatccctaacccgcagctggctatttgcttttgctttcgcgtacgtgatggctgacacgagggcgaggccgtgggaggcggacgagagctcgcggtcgcgggactccaaagttccgcggctggacttgctggccgcatcggcggcggaggaggaggagaaagtgaagcatctgctaggccaggaggaatgtaccgagatgaccggccacgatccatgctgcgatcacgtccccacggacagttatcacaatgatattctgatctcgtcgttgctatccgacgacgcggggaattgccaggactgccggggccggcggcgcgaggaggccgatgggcccggcggccggcccatgtatcgccggatcatggtgtgcctggaatgcggccggcattcctgcggggattcgacgagctatatcccgtacggacacgctcaggaccacgccaaccaggaaaagcattgggttgccgcgatgttcgacgatccacaggctggattctgcttcaagtgcgaacacgaagtgcctgtgtatccagagccagacgagatggagatgataacgggcgagattcaggccggcggcggcggcggcggcggtggtcatgcgtttggattcgacatgtcccgcgatctcgccaccgtgttgctcaatctcggggacgcatggtgtgcagccgccgatctcgggtccgtgaatgcgcaaggctatgctatcagagggatgccaaaccgcgggaacacatgctacatgaacgcgatggtgcagtgcctcctcgcgctcgacaagctgcgggcaaggatgctagggccggatactccgccgggccaccttggaatggcactgaaggagcttttcgtggaggcgagcgctgctggttctgcgggaggcatgctgaacccagataaactcttgagaagtgtacgattacatgctggcaagtacgaaccttacacgatgcacgacagctatgaactgctcgagtccttgcgcagcgcattgcatgacgaggaagagggaattcaagctccttacagggaaagaggtgccccgacagtcattgatgcggtcttcaagggcgaactgtgtgatacaaggtcctgcaaagattgtcagtctgcttcggctttccatggagaattctgggagctttcattatcgctgccatcaaaagaggatctatgtgaaaattttgcatcatcatcacaacgagcaagcaagaatctcaaccctcaaccggagaaggctgctcctcagttactttcagcaaatgagagtaacttgtggaagatcgatgccagtaaaactggtgattttcatcttcttgtttcagaactgaacgattctggtgaagagcagcgcaccttgcaaatcaagaatcttatacatgttttgtgcacagaggagccactaaattcagttgattttgttcctcatagcatctatgatgctaaagttgagcagatgattcagataacagcagattccctgcctccactgattgttccacaagttgaacacgatgcatcaacggcgccgggcagctatgtagatcaaaatggcaaggggataggggaggatagcaattgtgtactaacaatcgaggattgtctttcactcttttttagagaggaggtggtagaacggagctgtgattgttccaaggtacctatggaggagccaagcactaaccaaagcagaaagggtaagcagatggaggtaggcaccaatgatgaggtagcagctaatgggagccatagtaaacagtcagaccggacaacatgctcaaatggccaatctagtaaactgaatagtttgtcagtagaatacaacagttgttactgtaggcaacaacatggttctgacgaagagagtgacattacacagatggcagatacacatactgctggagcaaattcaaggatgacttgtggtcttaaggaaaccgagtatcatggtggtattcaagaaactgtacgtagtagttccctttcgactgagaaacaaaccgatctgttgagcacccagcatagccaaagcctcatcccacagaatcaagacctgaggttggatctcagtgcacaccagttaggagacaagcaaaatggacagaaagagaggagtggacgtgctattcaaaggactaatattactaagctgccgcctgtgttgacccttcatctcaagaggtacttcaagaacggcaacgagtaccataaaaatgaagcccgcgtgagctacaaggagcatcttgatgtaggacggttcatgaactctagttccgcggacaaaagcagcaccgtctaccgtctagccggcgtcgtggagcaccgcggtggacccttcatgaacgcaggacactacgtcgcctacgtgagagcaaggaagatcgggaagcagagcagccggccttcgtcatggttctgcgcggacgacagcaacgtcagagaagtcgctctggaagaggttctcgagcgcaaggcttacgttcttttctacgagagggtggaggacgcaaacacgctgattggttaagagacgttgcagctcgtcggaatagcagcaacaagagacgctgattggttaagagtagctagcattctttgcaatggcattggttagactgttagggtagttgaccatattcaggattatatatatagcttcattcgatcctacagattgatgtttttggctcgcctagtcagggtgattggttatttaattgattggcaaattttggccatgaatgaaatggggacgcttggcttggtcggactggtgaatgtgaatttgtaaggttgtgctgatggtagtgttaattagatgctaaccatttagatgcgttgtggacaagtattgagaggac

SEQ ID NO: 216412 - DNA, 3115 bp, Zea Mays
atcagcccaatcgcaaatctccactccgcgttcgccacgcgaaatccctctccaaaacccttccggttccgggcgtcgccgcggtccctcagttccggcgccattttcgccggcagtttgttttatttcccttctcctgtttcttttctattctgtcggagtcggacttgtgtccatcttgcttttgcttctccctcccccatgatccaatccctaacccgcagtctacttgatcgtggctagaatgatcgcgatcgagtttcttcggagcttcttcggtgccactgccacggccccgatccaatccctaacccgcaggcgtacgtgatggctgacacgagggcgaggccgtgggaggcggacgagagctcgcggtcgcgggactccaaagttccgcggctggacttgctggccgcatcggcggcggaggaggaggagaaagtgaagcatctgctaggccaggaggaatgtaccgagatgaccggccacgatccatgctgcgatcacgtccccacggacagttatcacaatgatattctgatctcgtcgttgctatccgacgacgcggggaattgccaggactgccggggccggcggcgcgaggaggccgatgggcccggcggccggcccatgtatcgccggatcatggtgtgcctggaatgcggccggcattcctgcggggattcgacgagctatatcccgtacggacacgctcaggaccacgccaaccaggaaaagcattgggttgccgcgatgttcgacgatccacaggctggattctgcttcaagtgcgaacacgaagtgcctgtgtatccagagccagacgagatggagatgataacgggcgagattcaggccggcggcggcggcggcggcggtggtcatgcgtttggattcgacatgtcccgcgatctcgccaccgtgttgctcaatctcggggacgcatggtgtgcagccgccgatctcgggtccgtgaatgcgcaaggctatgctatcagagggatgccaaaccgcgggaacacatgctacatgaacgcgatggtgcagtgcctcctcgcgctcgacaagctgcgggcaaggatgctagggccggatactccgccgggccaccttggaatggcactgaaggagcttttcgtggaggcgagcgctgctggttctgcgggaggcatgctgaacccagataaactcttgagaagtgtacgattacatgctggcaagtacgaaccttacacgatgcacgacagctatgaactgctcgagtccttgcgcagcgcattgcatgacgaggaagagggaattcaagctccttacagggaaagaggtgccccgacagtcattgatgcggtcttcaagggcgaactgtgtgatacaaggtcctgcaaagattgtcagtctgcttcggctttccatggagaattctgggagctttcattatcgctgccatcaaaagaggatctatgtgaaaattttgcatcatcatcacaacgagcaagcaagaatctcaaccctcaaccggagaaggctgctcctcagttactttcagcaaatgagagtaacttgtggaagatcgatgccagtaaaactgattctggtgaagagcagcgcaccttgcaaatcaagaatcttatacatgttttgtgcacagaggagccactaaattcagttgattttgttcctcatagcatctatgatgctaaagttgagcagatgattcagataacagcagattccctgcctccactgattgttccacaagttgaacacgatgcatcaacggcgccgggcagctatgtagatcaaaatggcaaggggataggggaggatagcaattgtgtactaacaatcgaggattgtctttcactcttttttagagaggaggtggtagaacggagctgtgattgttccaaggtacctatggaggagccaagcactaaccaaagcagaaagggtaagcagatggaggtaggcaccaatgatgaggtagcagctaatgggagccatagtaaacagtcagaccggacaacatgctcaaatggccaatctagtaaactgaatagtttgtcagtagaatacaacagttgttactgtaggcaacaacatggttctgacgaagagagtgacattacacagatggcagatacacatactgctggagcaaattcaaggatgacttgtggtcttaaggaaaccgagtatcatggtggtattcaagaaactgtacgtagtagttccctttcgactgagaaacaaaccgatctgttgagcacccagcatagccaaagcctcatcccacagaatcaagacctgaggttggatctcagtgcacaccagttaggagacaagcaaaatggacagaaagagaggagtggacgtgctattcaaaggactaatattactaagctgccgcctgtgttgacccttcatctcaagaggtacttcaagaacggcaacgagtaccataaaaatgaagcccgcgtgagctacaaggagcatcttgatgtaggacggttcatgaactctagttccgcggacaaaagcagcaccgtctaccgtctagccggcgtcgtggagcaccgcggtggacccttcatgaacgcaggacactacgtcgcctacgtgagagcaaggaagatcgggaagcagagcagccggccttcgtcatggttctgcgcggacgacagcaacgtcagagaagtcgctctggaagaggttctcgagcgcaaggcttacgttcttttctacgagagggtggaggacgcaaacacgctgattggttaagagacgttgcagctcgtcggaatagcagcaacaagagacgctgattggttaagagtagctagcattctttgcaatggcattggttagactgttagggtagttgaccatattcaggattatatatatagcttcattcgatcctacagattgatgtttttggctcgcctagtcagggtgattggttatttaattgattggcaaattttggccatgaatgaaatggggacgcttggcttggtcggactggtgaatgtgaatttgtaaggttgtgctgatggtagtgttaattagatgctaaccatttagatgcgttgtggacaagtattgagaggac

SEQ ID NO: 216413 - DNA, 511 bp, Zea Mays
acaaggtgtggcctacctcggcggcgcggcaggagcagagcacgtggagtctagacctcgacgcggcagtacgtggtggtctggaacctgagcccgtgcgcgccgacagcgccgcggtagccggagccggcgccggagctgatgaagtaagccgggcaggtgacgaacatgtggtagtggcccgacacccagctgccgaccttccagcggaccctcccgtcgatcctgagctgcaggacgaggtaccccgcggcgaggtccttggcgagcgcgtcggcgaggaagggcgcgaaggggacggcggggccggccagcacgggcgaccagacgtcgacgtcgccgtggccctggtacaccgcgggcagcctggacgccagcgtcacctgctggtacttgtacgtggcgtagacgtcgaggcggtcgtagtagacgccgacgcggccgttggggttgcgggacgccacggtgacctgcgccgccgtggacagcagcggggccgagccgtggcggc

SEQ ID NO: 216414 - DNA, 2567 bp, Zea Mays
gcaagttccttgaaaacaaccaaacttaagaaagaatgcatttgattttaacgaaggtttagcataaggatttgaccaacctaatattgtattatatcgtttcacagctgaatctgatccataagcaattgaaggctgcacagtgatgcaactgcatgttccgacctgtacctgaacatttggcagccagctgcgcacggtgtaaagccaccacgtcacggatccatccagctcagctgctgcatagtccagtttgccaccaaccaaagggtagaaccgtcatttcgtacggtagttcatcaagggaaatgaccccatgccttaaacacatttctgctgcaaccttctttttttttatgcccggcactgcagcgaggcaggagggcgaccggaatttcccatctctccttctcatcattcctttcgggatttcccctcctggttcccatcgatcagagggcccggcgctgttgcctttcgcattcgattcctttcgggtcggatttgtggcggagctcttgatttgctccgtccctgccagaggaggagggcttgctggatcagggatcgagcaaggaagcagccatgagcggcggcggaagcttgagataatgaggcagagctcgtgttccatgcaactgaccaataagactgaccattatgtagcattcaaggtcaaaacaaccaacccaaagcagtactgtgtgcgtcctaatattggtgttgtattacctggctcaacttgcaatgttacagtgacaatgcaagcacagaaggcttcaccacctgacatgcagtgcaaggacaagttcctagttcaaagcgttgtggccgagaatggtgtgacagctcaagatattaatgcagcaatgttcaataaggagccagggaaagttgtcgatgaattcaagctgcgtgtggtttatgtgccaacaactatgcccaacccaatccctgaagaatctgaactagggagttccactccctcattttcacaagaaaacgggatcgatcattccatgacgccactatctgtatctagatcgtctgctgaaacagcaaaggagaagccctctgaggtagccctttatggttgtctcattagacatcagcgctattgaattaaaaagcagaaatcttgctggatcgatatatcttttttcttatgtttagatctctcacatgattatggtttggtctcaaataatccagcactggcatggtaactttttagctgaatgttactatcacatctatttatgactagaatggatttgtggttttctgagagttttgatctgattcactatccattttaaatatttgacaaatattaatgcctctttatcactaaactctgtacttttaggaagagaggcaaactaaatgtaacgtaagtaggtcagggaacacatccattgtcagttttctatacctgacgccttcatgatttctcattcacacgcaccatcttgctcatatagcttagacatgaatactcatcctatgagtagtaacacattggaatgatctctgcagtttttgcttcttcatgtctgatcttttgagtccttgacagcagaaagccacatgtttgtgtataacttgtaacatactttatgaagtttcacgttttttttgactaattcactggtttatgactgctaggcaacttctgtgatctccaagctaactgaggagaaaatgtctgctgttcagcagaaccagaaattacgccaagagctggagcttctacggaaagagagcagcaaaaccggcggcggtttctccatcaccttcttgtttgtcgtgggcctcctgggcatcgtcgttggctacatcctcaagagaacatagtggaacggtgtctccagcagatctctactactcccattaaaggacacccacccaccccacaggtggggtggtatgcctctctctccccatgtgttttcgctcctaatcggagcgccctgttctaacgtgtaacaacagcagcactcctagaggctagaggccttcggtttgtgtacatcattatggtggtccatacttattttttttcttccagaattcatttcggagttggtagacttgttttaacgggaatgtttgaactgttgccagtctgatgaatttgccagatattttgcatcgtttcacctgaagtactcgaaccgagagatgcatgacgtgcgcgctatgtaatcaccgagcattcagagcaactagtaaaatagcatcaggttcgatcaactgctctgcaatcaagaagttaaggaatacagcatgcagtcagtcattcaggtcggcaccgtgcacgttgccatcggcgtgtcgtggcgcaccaggaagagcgctgcggcggccgcgccggcgagaaaccctagcagcaggtacccggacctcgccgcggcgagccttatcgttgaggatgggccgtccacgactcttcctccaccgccgcagtgacgctgctgcccacctccgtcacggcggaggcgctctggacgctgtcgtcgatcgctgcgtcctccattgacctcgtacgtaaattttttgacagt

SEQ ID NO: 216415 - DNA, 3576 bp, Zea Mays
atgaccagggccgccgcccttgttgcttcccgcctaaacaaaaccaaacacaagccaagcctgaagcctgagcgcaaggagccaggaggaaggaagcatggtggcgagaaggagacggttaggccaaccgtttgtatcctccagcttcacgcacctctccccccactctactcttggcgccaaagcaaagccgttagattattggtcaccatctcgaacccaacccgcgccgcgctctcggtccctccccaccatttatccttcccgaagaaaacaatcgcgccatgccaatgcgcctcgccgcgccgcgccgcaccgccctccccccacgtccggcattgcgtctcagcgatgcggccgccttcctcctcctcctcctcttcgtcgtctccagccgcggttccggagcccggcggccggatgtccgcgctcacgatgcgcgcggtggcgcggatgtcgagggcgcggtggttcgtcttcctgcgccgggtgtaccagtaccagaacggcccgaggtctgacctgggctccaacccgttcaactcgcccggctggctcgcgctcgagctcggcgtgatcgtcgcgcaggtggtcctgaccaccgccgtcgtcgcaacatccgccgcggagcgacccgcgtggccgctccggctgtgggtcgcggcctacaacgtcggcaacgtgctcagcctacccctcctatactggcggcaccgccattcctcctcctcctcctccgccggcggcggccggggcgacctcgagatgcacggcgccaatgacgctccggggaacaggtcgtatctgatgaacaaggcgcgggcgttcctggagctcttcttcgcgatgtggttcgtgatgggcaacgtgtgggtgttcgacgcgcggctggggtcgttccagcgcgcgccgaggctgtacgcgctctgcgtcagcctgctggcctggaacgccgtcgtctactcgctcccgttcctcctcttcctcctgctctgctgcttcgtgcccgcggtcggctacgcgctcggctacaacatgaactcggcctccgtcggccgcggcgcctccgacgagcagctcgccgcgctgccgcggtggcggttcaaggagcccgacgtggcaagggaccgggagcgcgatgaccaggcgagtaacttgaatccgtttctgttgcgtatgcagttatgcacagacacgctgcacgcacaaattaatgatcacagcaactattaaactaccgcatcaattatattagcagaaaatattaaaaaaacagttagaaaaaagggaggccaggaagaaattcggcaaagaacaaatgattggtggactcaagtaccgcaggccggaataggggtagcgcgaaagtggaaacgtgcgagtacgaaactagaacgtgctacctttttttggatggtacactaaatataacaagtccaaactgtgctttttttgataccatgatcgctgtcatgttgaaactgtgatctgaactgcttgaaatcacgcagctagcatagcagtcttgtaaaacccatgtctgaaactgcaactgtaggagtgctgcatctgccttgcgcagtacggggagaaggaggaggttcggcagctgccgtgcacgcacgtgttccacctcaagtgcgtggacaggtggctcaggatcatctcctcttgccctctctgcaagcaagagctcaagtgactgatgcctactccgctcctacagagagatgtgggtgtattctccctcccttactctgactgcgcctgccgatcagccacacctactacatatataccacgacgaccgccggacgatgcgtgcgtcgcacctctcgcgaggatctctcggcgggcccgtgctgacctctagtagacgctgacaaatgatgtgcagcaggcggcaggatatactcagcagcaggggcggacccacaggggggtccgggtgggccctggcacaccctaagccaggcccatcggagaccccacccgttcatctgccgagcgctgaaggccgtttcaacttcccgatccttcagcttccagttcccagaatcacgagtgcggctgttcctggcgactggcgactggcgacctcaacctggctggcgagcgcgcgttgcgcggttggacggctgtctgcaggtggcctggctttctgttcctgacgagcacctggcttcctgttcctgacgagcgcgcggctgtagtgctgtggcgagcggccgagcgggtgcctgctctgctcttcgattgctgctgtgataaaatatgaagaagcaaggagatattgcctctctttttcgtaatcatgctgcaaaaaaacagaagtttattgcttcttcattatctccggatgttactcaagcgtcgacacctcaagaacaagagaaagaaagaataaatgaagaaattgtgaatccaatgccatctgcaccgccaccgccaacactttatgatgtcagtcgtcttccacatgatccaggtgaaagacaacctattgcaagttaccatgctaatgatcatgatgcaattcgaagagcatatattcttagaggtccatttcaaccatatgcacatgaattcccaaataggaaaattggagatagagatcgccattttaattttgtgtggtttcaaaattttccttggattgaatatagtgtcaagaaagatgctgcattttgctttatgtgctacttattcaaaagtaaagcaaataagggcaaaggtacttctgcatttacttcagatggttggaataattggaataaagggtctgaagcacttctaaaacatgtgggttctatgtcacataagatagccgaagagaaatatcttggctttataaatcctaatgcagcaattgataacaaaattgagaagtggagtgatgatgatcgcaatctttataagataaggttgacatattcacctcgatgtttgaagtttcttttgcatcaaggattgtcatttcgtggacatgatgaaggtgaagagtctagcaacagaggaaactttattgaaatcttgaaatttcttgctgtaaatagtgaagaggtcaacaagtatgttcttaacaacgctccaggtaattgcactttgactagcccaaagatacaaaagcagattattcagtgttgcgctatagaaactagaaagaaaataattgaagagcttggggaagagccatttgcaattttagcagatgagtctagtgacatatcacacaaagaacaactagctctttgcttgcgttatgttgatgcattgggaaggccatgtgagcactttattggagttgttcatgtagatgatactagctctttatcacttaaggatgcaattgaagctttacttgttagtcatggcttgactttgacacaaattcgtggacaaggttatgatggggctagcaacatgagaggtgatattaaaggattgaaaacattgatcatgcaagagtcaccttctgcttattatatccattgttttgcacatcagctccaactagttcttgttgttgttgccaagggaaataatgattgtgtgtggttttttgatcaagtaact

SEQ ID NO: 216416 - DNA, 3048 bp, Zea Mays
ccacatcgacgccggcgtggagaggagatggagctataaaatgcgatcacccatcatccccctccagtccaggcctccatgcagaaaggcaccgagaagaagagtccccggtcgctgctatagctacaagcctacgacacacgagagtgtcctccatggcgacggcggcgaggaaagggagcagcagcaggagtgccgcggcggcggccgcgactgtggccgtgttgttcctcacagtagtatcggccgccggcggtgctgcggctactccgcggcggctcctggtggacacggacatggacaccgacgacttgctcgggcttctctacctcctcaagcagaaccggtccgagatcgacgtcaaggccattaccatcagcgccaacgcgtggagcgacgccgggcacgccgtcaaccatctctacgacatgctctacatgatgggccgcgacgacatccccgtcggcgtgggcggcgacggcgggatatcctacgccggcgacgtgcaacgcgacgtcggtggctacctaccactgatcgaccagggcatgtcgacggacggcggctgccggtaccggcaggccatcccgctctcgggccggctggacgtcgacacgaactccggggtccggaagggcttcctcccgcggggctcccgggcgtaccggccgctccggcagcccacggcgcagcgggtgatggcggacgcgctgtccgccggcccgacctcggtgctcctcctgggcacgcacaccaacctcgcgctcctcctgatgtcgcgcccgcgcctgaggcggaacgtggagcgcgtctacgtctccggcggcgccgtgagggcggcgggcaacctgttcacggccgccgccgccaacccggtcgccgagttcaacgtcttcggcgaccccttcgccgcctacctggtgctccactccggcgtcccgatcactatgatccctctcgacgccaccaacaccatccccgtgacggaggcgttctactccgagttccagcggcgccagaggacgtacgaggcacagtactgtctcctgtcgctggacggggctctggcgcggcagaggaggcggtccgacagccatgacaacacgggcttctacttgtgggatcccttcgccgtcggggtggccatctccagcatgcgccatggcgatggcgaaaccagcaacgagtttgccgagcttgagtacatgaacgtcaccgtggtaacgtccaacaaaccttacggtgcgcgtgacgacggctctaacccctttttcgatggacgaactactcccaagtttgggctgcgagagggtggagttcacagcggccatgttgagaccgggataagagaccccttctgcctggtgcccggaagcaaccgaggcagatgccaagatgggtacactaaagaagtggccggtccagaagcagtgcagatgcttgtggcaacgagggcgaggccgaacaccaacaaaagtagcccactggacaagaaatttatggagaccttcctagaggttctaaatctcccccaaaacactggacgtttcaacataagcacacagtttccgtactatagagaggttctctacaagccggattccatcatgaacgtgacccgcaggggcgggaagccaaagccagtcgtttttgacatggacatgagccctggggacttcgtgtcgctcatatgcctcctgaaagaacccagacacgagatcgatctgaaggctgttttggtcaacgggaacggctgggctaacagcgctagcattgacatcgtgtacgacgtcctgcatatgatgggccgtgacgacatcccagtcggccttggcaatgccactgcgctgggcagcccgacgcttgggtgcaacaattcctacgcgatcccgcaagggagtggtgggtttgtagattcagacacgctgtatggactggctcggtcgttgccgaggagtcctcgaaggttcatctctgatgatctagaccatcccgagcgccggcacccgagcgctttcgatgtttggcggtcagttaggaagcagctcggtccaggccagaagatcacggctcttaccagcggacctctcaccaatctagccagcattatttcactgtctgacatggacgccggctctgtcatagagagagtttatgttgtcggtggagtggttagagatggaggtgatgacaggggaaacgtgttcaccgttccctccaacagatacgcggagttcaacatgttcctggatccgctggccgcaaagacggtgctagaatctggtctaaatatcacgctcattcctctcaacgtgcagcggaaggtttcttcatttgagggcgtcctcggagctctgaagcaacacacccagcatactcccgagtcaaagcttgtgcgccgtttgctgttgctgctccagcagctccagagggaacaacggaaattctatcaccacatggacatatttcttggagaagttcttggcgcagtttacatggtccaaggatctaacttggagccctctgtggaagtgaagtcaatatgcattgttgccaacacaaccgaaagcataaatgggcttattttggtcaagaagagcgcaaagccagtggatgtattgtatagtttgaatactggagcatattacgaccacctggcaaattctttggttaaccataagcaatctgctcctattggcagctttggagagcaaaaggcaatttggagcaggccacaaaaacatttagggacggacatagcaaaggatagaaaataagcaatctatttgtacaatattgctggaaaaggattagagattagattccaaaagaaaaacagtttacatcatacttcactatcttatagcgtagtacaaaattaaaggagatactcaacacagttacagttgtatgaaagggcttcagtaagcaataaaatttatcttgaatggatttcacatactctgctggacgtgaaacttttgttctacacttgtttcacatttctagtctattatttatgttcaagaaatatcagacaacatttgt

SEQ ID NO: 216417 - DNA, 2946 bp, Zea Mays
ccccctccagtccaggcctccatgcagaaaggcaccgagaagaagagtccccggtcgctgctatagctacaagcctacgacacacgagagtgtcctccatggcgacggcggcgaggaaagggagcagcagcaggagtgccgcggcggcggccgcgactgtggccgtgttgttcctcacagtagtatcggccgccggcggtgctgcggctactccgcggcggctcctggtggacacggacatggacaccgacgacttgctcgggcttctctacctcctcaagcagaaccggtccgagatcgacgtcaaggccattaccatcagcgccaacgcgtggagcgacgccgggcacgccgtcaaccatctctacgacatgctctacatgatgggccgcgacgacatccccgtcggcgtgggcggcgacggcgggatatcctacgccggcgacgtgcaacgcgacgtcggtggctacctaccactgatcgaccagggcatgtcgacggacggcggctgccggtaccggcaggccatcccgctctcgggccggctggacgtcgacacgaactccggggtccggaagggcttcctcccgcggggctcccgggcgtaccggccgctccggcagcccacggcgcagcgggtgatggcggacgcgctgtccgccggcccgacctcggtgctcctcctgggcacgcacaccaacctcgcgctcctcctgatgtcgcgcccgcgcctgaggcggaacgtggagcgcgtctacgtctccggcggcgccgtgagggcggcgggcaacctgttcacggccgccgccgccaacccggtcgccgagttcaacgtcttcggcgaccccttcgccgcctacctggtgctccactccggcgtcccgatcactatgatccctctcgacgccaccaacaccatccccgtgacggaggcgttctactccgagttccagcggcgccagaggacgtacgaggcacagtactgtctcctgtcgctggacgggggcttctacttgtgggatcccttcgccgtcggggtggccatctccagcatgcgccatggcgatggcgaaaccagcaacgagtttgccgagcttgagtacatgaacgtcaccgtggtaacgtccaacaaaccttacggtgcgcgtgacgacggctctaacccctttttcgatggacgaactactcccaagtttgggctgcgagagggtggagttcacagcggccatgttgagaccgggataagagaccccttctgcctggtgcccggaagcaaccgaggcagatgccaagatgggtacactaaagaagtggccggtccagaagcagtgcagatgcttgtggcaacgagggcgaggccgaacaccaacaaaagtagcccactggacaagaaatttatggagaccttcctagaggttctaaatctcccccaaaacactggacgtttcaacataagcacacagtttccgtactatagagaggttctctacaagccggattccatcatgaacgtgacccgcaggggcgggaagccaaagccagtcgtttttgacatggacatgagccctggggacttcgtgtcgctcatatgcctcctgaaagaacccagacacgagatcgatctgaaggctgttttggtcaacgggaacggctgggctaacagcgctagcattgacatcgtgtacgacgtcctgcatatgatgggccgtgacgacatcccagtcggccttggcaatgccactgcgctgggcagcccgacgcttgggtgcaacaattcctacgcgatcccgcaagggagtggtgggtttgtagattcagacacgctgtatggactggctcggtcgttgccgaggagtcctcgaaggttcatctctgatgatctagaccatcccgagcgccggcacccgagcgctttcgatgtttggcggtcagttaggaagcagctcggtccaggccagaagatcacggctcttaccagcggacctctcaccaatctagccagcattatttcactgtctgacatggacgccggctctgtcatagagagagtttatgttgtcggtggagtggttagagatggaggtgatgacaggggaaacgtgttcaccgttccctccaacagatacgcggagttcaacatgttcctggatccgctggccgcaaagacggtgctagaatctggtctaaatatcacgctcattcctctcaacgtgcagcggaaggtttcttcatttgagggcgtcctcggagctctgaagcaacacacccagcatactcccgagtcaaagcttgtgcgccgtttgctgttgctgctccagcagctccagagggaacaacggaaattctatcaccacatggacatatttcttggagaagttcttggcgcagtttacatggtccaaggatctaacttggagccctctgtggaagtgaagtcaatatgcattgttgccaacacaaccgaaagcataaatgggcttattttggtcaagaagagcgcaaagccagtggatgtattgtatagtttgaatactggagcatattacgaccacctggcaaattctttggttaaccataagcaatctgctcctattggcagctttggagagcaaaaggcaatttggagcaggccacaaaaacatttagggacggacatagcaaaggatagaaaataagcaatctatttgtacaatattgctggaaaaggattagagattagattccaaaagaaaaacagtttacatcatacttcactatcttatagcgtagtacaaaattaaaggagatactcaacacagttacagttgtatgaaagggcttcagtaagcaataaaatttatcttgaatggatttcacatactctgctggacgtgaaacttttgttctacacttgtttcacatttctagtctattatttatgttcaagaaatatcagacaacatttgt

SEQ ID NO: 216418 - DNA, 6317 bp, Zea Mays
cttgtctcgcctccccacccaccaacacctttagttccctccaaatttcccccggccttctcgccctcgtcgccctgcctctcaaattcgctctgcgacccattccattccgccttcgccgcaccggcactaaacctaaaacccgaccgtgtttcctgtcgctgcttgtcgtcgcctgatcatagatcgaattgaagcggggatatatgtacaggaaccagtttaggtcggatcgattgaacgaccacgccaccactgcgcggaggcccggccgcgggagcggcagtagctcgcattgggtcgtctccggcggccgtggaagcaccgctccggctacgcggctgcgatcgccgccctaccggagcgggaggcccgggagcgtgcagcagcagtacaggccgagatcgccggcgagtgtcccgatccaggggaatgccattggctgcgctcctccttgtgggagtggtgcctctgctgagcacacgggaccagtgaaccaagagactttcggatcactggataatgtgaaaccttccaattttcctgctcagagtgatggtttgagttgtgtctctgctgaagaaacctggccagcagattccccaaccccaacactacagacaaaaggatattcatccccttcatttactcttcagtttggaacttttaactcaggagttattaacaaacaggaaactacttcctgcacatcctcagcccctcctgatctgaatgggagcaaacatgaaaaggcctgccatggattacattattgcaagcccaatacagcttcctcacctcctatacaagagctgcaaaagcaggaagcaagagatgatttagttattggtggagaagcagacttaattggtgtgcacagattcacgcaaggtgttgctcagaactatgtcttccccaactcaacaaaagtgtgaaaatcaagaagaaacaaaaaacactatcagtgttaaccagactgacaccgcatacaaatatcctacaaccaagcccaagatcagtgttcaaattccagcttcctatactcccaacatggcaccaccccaatttatgcttccagtaccagggagatcaatgcctgtggcatttcaacagaaacaacctcaagtgcccattgaattcaggggcccaggttttcaaatgcactctattggctctgtatctagttccttgcccgtgaagatggctgtccctctgggtaatgcacctcacatacaaccgatgtttgttcatggtgctcagcctcatgcattccatcagcaatcctttattcaccatggacaaggctttggatgtgctcctccatctaattgttaccttcctcagtttggcaacatgagaaatgtgcaagaattatctcagcagtatcctagaagcggtgatgaacataagagaactatcaagataacacatccagagacacacgaagaactgatgctagatagacatgggcattcctttataaatgttcctgcttctgggcagatgcctttaaacaatataaaccagctacctcactctgttcaaacattttctccacttcagaaagtgtattatcctagaccaggaacgtacaattcagcacatgtctatcttcccaactccactgatgtccctcttgcaagtaggcaattttcctccaaaattcaaccttcgatgcatggttttgattccactaatagcaaccagccatttacttccatcagacctcctatgccgatatctcggcttgatgctacttccgggccattaacaaatttgcatactgcttccgaaatctcaaatttcaaagggatgtttccatcaagcctacctgctccagttcatgttgagctaaagccgcctattacactccctgctgaaatgaatagtgaatctaccatatcaaatcaacaaaattattgcaaaattgggctagaaatgtcccttgaacctgtaaatttagtttatgaaggaaataacaaagattctgttgcaacttgtgacataagttgtaatttaatacctcaaccagtttcaaccccgcagacacagactcggccaacttcagttgatcatgccacaccagttgtagaccctcaaactatcttaaccagtagcctgcctctggaatctactacatgttgtaaatcttcagttaaagcaaaacctattgaggtggaacaatcattagtggttccaacaactttatcatcccatacaaaactcgagtcatcgcatgcaactactagtgtcattttgactgcaacttcattagtttccaagattgatgggacgccaccgactaacaggaactatagatattatggcaatagcattttggggaaacctccgttaatttatgcacaagaaatattgccatcaaagtttgtggggtctaatacatcaccagaaggtcttggaaaggcaaaggtgaatccagttctcttccaagaaaagtttccttctgaacttaatggttcagttccattgcgaaagcatgacttcatgatagaagaacatgttccaaacgaaaaagggatgtgctcagagtcaaagaccgaacaagtagatgtgaccatgccaagtactgcctttggattggaggatgacactagtgttgctaaatctggaagatttcatgcatatcaccagccagttgatttgcatccttccatatacattggtgatatccagacatcagatgacagtcagcaaccttcaccagatttagaaatcataacatctcaatcagagaacaagcagaataacagtagagtagactctgcaagggatgtcaagaatgcagcccctatttctacttcagctatctcccaggggaaaacagaacaagagaggattggtttagaaatatctaatccttgctctataactgctgctttagtggcacaaccaaaaaaagttgttttggagtcaacaaaggccaaaagtaccaatggacgaagaaagaaacgaaaagagacacttcctaagggtagtggacacaagtattatgatcttgatagtgcacacagttctctcaatgagaatgtcgagagttttgttacttcagaggatgttcagtgttccttggcaactgatttaaagctgaattttacatgcgaggctgcaaaggacaattcaactggtgggaatgattgccagaacagaagtgacttgttcagctgggaaaatacaacggaaaactctgcggacaagttgaaactttttgggggtacccattctaaaagtggagcagaagtaaacaaggataaatctgagtttgaccataaaaggtattcccgggattttcttttaacgtttgcacaaagttgcatcgaacttcctgcaggtttcatgattggattcgatatttctgaagcagtaatgagtgtacatgttggtgctccatttatagacaatactcaacttaattcaaaccatgcaaggataaaagatcgaggttcccgaggtagtcgtcatatgactggtaaatttgatgatgataagtggagaaaacagtttttttctactgtttctggacgtaacctgctttctgacaatttttatcaacctgccttttctaatcgggatgcagtacaacatgttgggaacggatctgtaagaagtttatcacaaagtcagccattaagtcaatatagtggcgaggtgctctccggagctatgaaagtagtatctcggcgcagcatgtcacgtggatctgttgatgagagatggcaacatagaactaatgttcagggtatttcatcgccttctcaggtatctatgccaattatgcacaaagctgagaaaaaatatgaaataggtaaggggattgatgaggaagggtcaaaacaaaggcagttgaaagctattctgaataagttaaccccccaaaatttcgaaaaactttttgcgcagttcaaggagttgaatattgataacgtggtcacacttactggtgtcatatctcagatatttgacaaagctttgatggaacccactttttgtgagatgtatgctagtttctgtttccgattagctggtgacctaccaaactttgtcaaagatgatgagaaaatcactttcaaacgactgcttttaaataaatgccaagaagaatttgaaagaggagaaagagagcaggctgaagcaaataaagcagaagaagagggtggagctaaacaatctgaaggcgagagagaggaaaaacggattcgagcacggagacgcatgctaggaaatattcggttaattggtgaattgtacaaaaagaaaatgctgaccgagagaataatgcatgaatgcataaataaactgctaggtgagtatcaaaacccagatgaggaagacctagaggctttgtgcaaattaatgagcacgatcggggagatgatagatcatcccaggacaaaggtccatatggatttttattttggccttatacataagctatcagaaaatgtgaagttatcatcgcgtataagatttatgctagaagatgtgattgaccttagaaaaaacaagtggaggcagagaaggaaagtagaagggccaaaaaagatagaggaggtccgcagggatgcagtaaaacataagtttggccaatcaacaaggtttggctcttctcctaattataattcatctgttacttgcattagctctggattgagaccagggcctccagatgctagatatcagtcttcaaatagagtcttgcatgttccactccatcaaaggcgtgctcataaatccattcgccttggtcctcaaggtgacttaggaagaggaatctcgatttgtgggaagcaacacgtttcaaatgatattttgccagaagttactttgaatagtcatcatggtcaaacatcagaaaactcaagagacagttcatttacaggagtgacaagtaatccaacaggcttcaaagccggtaatacatcttggggaatggtggatctttcttcaccagtaccgtcaactataggtcaaacacatacatcctccacagtcagaaaggagatgtgtgctgaagcgcatacattccctgaagaggttcttcaagagaaatcgatactaaccataaaagaattttacagtgctaaggatgagaaggaggtcgctctgtgcatgaaagaactgaatgctcccggcttctatccttctcttgtgtcactttggatcactgactcgtttgaaagaaaagacctggaaagggaactcttggccaagcttttggtgtacttgtgcacagctcaagagcacttgctgagccagaggcagctactccaggggttccaacatgttctatctaccttggaggatgccgtgaccgatgcgccgaaagcgaccaagttcctgggccaaatatttgccagagtcgtactggaagacgggatctcgctgacggaggtaggagggctgctgcaggagtgggatggcagggaagagccagcaggacagcatgccctggaggacagcctcgcatccgaggttctagggagcatgctagagtccatcagagtagagaggggcgacaacgccgtggacgaaatccgcgcaaaatccaacctgcagaggcgtggggtacttatcatgtttccatcgttttcacggcgagcgtcatgcaagaagcaagaagatccggattcttttgaatgggccaagaaatttctgttgtctggtgctctttctgctttcgttgagcccaacatggaaactgtccccatcaagattccctctaaatgtatgctccctcctagtcaggaattgcatgaggaacctcagtcccctttgcctgcagaagcggtcaacagaaagaaacagtcaatcttgatcgacactgaagtaaggagtgccaggctcaaggagaaggctagaggttttaagacttgctctggaataaggaagaattgctcgtgctgtgctaggacatcgccaccctctatctctcacaagattattaagaagctaggagctgaattctgcaaagttaatccctccaagttatgccctaatgcattaaacaactccaggtccttcagctctgccatccagaggccacgtgcttcatccagtagcagggccgagctacgagcaacgtccgaagatcagagggatgaatcagaagatgaagatgatgcggggtctcgcccctcggctgggatgtaaggctttgccttcttccttgggtcagccagtttttactgtgcttctgttggcgataacttttggtgttattatgtataccaacaaaacttctctttctggtgatgggcttgtcgtgccctttttgtctgcctcaacaaacttggttcgag

SEQ ID NO: 216419 - DNA, 6699 bp, Zea Mays
ccaacacctttagttccctccaaatttcccccggccttctcgccctcgtcgccctgcctctcaaattcgctctgcgacccattccattccgccttcgccgcaccggcactaaacctaaaacccgaccgtgtttcctgtcgctgcttgtcgtcgcctgatcatagatcgaattgaagcggggatatatgtacaggaaccagtttaggtcggatcgattgaacgaccacgccaccactgcgcggaggcccggccgcgggagcggcagtagctcgcattgggtcgtctccggcggccgtggaagcaccgctccggctacgcggctgcgatcgccgccctaccggagcgggaggcccgggagcgtgcagcagcagtacaggccgagatcgccggcgagtgtcccgatccaggggaatgccattggctgcgctcctccttgtgggagtggtgcctctgctgagcacacgggaccagtgaaccaagagactttcggatcactggataatgtgaaaccttccaattttcctgctcagagtgatggtttgagttgtgtctctgctgaagaaacctggccagcagattccccaaccccaacactacagacaaaaggatattcatccccttcatttactcttcagtttggaacttttaactcaggagttattaacaaacaggaaactacttcctgcacatcctcagcccctcctgatctgaatgggagcaaacatgaaaaggcctgccatggattacattattgcaagcccaatacagcttcctcacctcctatacaagagctgcaaaagcaggaagcaagagatgatttagttattggtggagaagcagacttaattggtaaatatgaggttcatgttcctgaattgcatgaaacacacacaatgctgaattctgtttctccatctagcaaagtgtgcacagattcacgcaaggtgttgctcagaactatgtcttccccaactcaacaaaagtgtgaaaatcaagaagaaacaaaaaacactatcagtgttaaccagactgacaccgcatacaaatatcctacaaccaagcccaagatcagtgttcaaattccagcttcctatactcccaacatggcaccaccccaatttatgcttccagtaccagggagatcaatgcctgtggcatttcaacagaaacaacctcaagtgcccattgaattcaggggcccaggttttcaaatgcactctattggctctgtatctagttccttgcccgtgaagatggctgtccctctgggtaatgcacctcacatacaaccgatgtttgttcatggtgctcagcctcatgcattccatcagcaatcctttattcaccatggacaaggctttggatgtgctcctccatctaattgttaccttcctcagtttggcaacatgagaaatgtgcaagaattatctcagcagtatcctagaagcggtgatgaacataagagaactatcaagataacacatccagagacacacgaagaactgatgctagatagacatgggcattcctttataaatgttcctgcttctgggcagatgcctttaaacaatataaaccagctacctcactctgttcaaacattttctccacttcagaaagtgtattatcctagaccaggaacgtacaattcagcacatgtctatcttcccaactccactgatgtccctcttgcaagtaggcaattttcctccaaaattcaaccttcgatgcatggttttgattccactaatagcaaccagccatttacttccatcagacctcctatgccgatatctcggcttgatgctacttccgggccattaacaaatttgcatactgcttccgaaatctcaaatttcaaagggatgtttccatcaagcctacctgctccagttcatgttgagctaaagccgcctattacactccctgctgaaatgaatagtgaatctaccatatcaaatcaacaaaattattgcaaaattgggctagaaatgtcccttgaacctgtaaatttagtttatgaaggaaataacaaagattctgttgcaacttgtgacataagttgtaatttaatacctcaaccagtttcaaccccgcagacacagactcggccaacttcagttgatcatgccacaccagttgtagaccctcaaactatcttaaccagtagcctgcctctggaatctactacatgttgtaaatcttcagttaaagcaaaacctattgaggtggaacaatcattagtggttccaacaactttatcatcccatacaaaactcgagtcatcgcatgcaactactagtgtcattttgactgcaacttcattagtttccaagattgatgggacgccaccgactaacaggaactatagatattatggcaatagcattttggggaaacctccgttaatttatgcacaagaaatattgccatcaaagtttgtggggtctaatacatcaccagaaggtcttggaaaggcaaaggtgaatccagttctcttccaagaaaagtttccttctgaacttaatggttcagttccattgcgaaagcatgacttcatgatagaagaacatgttccaaacgaaaaagggatgtgctcagagtcaaagaccgaacaagtagatgtgaccatgccaagtactgcctttggattggaggatgacactagtgttgctaaatctggaagatttcatgcatatcaccagccagttgatttgcatccttccatatacattggtgatatccagacatcagatgacagtcagcaaccttcaccagatttagaaatcataacatctcaatcagagaacaagcagaataacagtagagtagactctgcaagggatgtcaagaatgcagcccctatttctacttcagctatctcccaggggaaaacagaacaagagaggattggtttagaaatatctaatccttgctctataactgctgctttagtggcacaaccaaaaaaagttgttttggagtcaacaaaggccaaaagtaccaatggacgaagaaagaaacgaaaagagacacttcctaagggtagtggacacaagtattatgatcttgatagtgcacacagttctctcaatgagaatgtcgagagttttgttacttcagaggatgttcagtgttccttggcaactgatttaaagctgaattttacatgcgaggctgcaaaggacaattcaactggtgggaatgattgccagaacagaagtgacttgttcagctgggaaaatacaacggaaaactctgcggacaagttgaaactttttgggggtacccattctaaaagtggagcagaagtaaacaaggataaatctgagtttgaccataaaaggtattcccgggattttcttttaacgtttgcacaaagttgcatcgaacttcctgcaggtttcatgattggattcgatatttctgaagcagtaatgagtgtacatgttggtgctccatttatagacaatactcaacttaattcaaaccatgcaaggataaaagatcgaggttcccgaggtagtcgtcatatgactggtaaatttgatgatgataagtggagaaaacagtttttttctactgtttctggacgtaacctgctttctgacaatttttatcaacctgccttttctaatcgggatgcagtacaacatgttgggaacggatctgtaagaagtttatcacaaagtcagccattaagtcaatatagtggcgaggtgctctccggagctatgaaagtagtatctcggcgcagcatgtcacgtggatctgttgatgagagatggcaacatagaactaatgttcagggtatttcatcgccttctcaggtatctatgccaattatgcacaaagctgagaaaaaatatgaaataggtaaggggattgatgaggaagggtcaaaacaaaggcagttgaaagctattctgaataagttaaccccccaaaatttcgaaaaactttttgcgcagttcaaggagttgaatattgataacgtggtcacacttactggtgtcatatctcagatatttgacaaagctttgatggaacccactttttgtgagatgtatgctagtttctgtttccgattagctggtgacctaccaaactttgtcaaagatgatgagaaaatcactttcaaacgactgcttttaaataaatgccaagaagaatttgaaagaggagaaagagagcaggctgaagcaaataaagcagaagaagagggtggagctaaacaatctgaaggcgagagagaggaaaaacggattcgagcacggagacgcatgctaggaaatattcggttaattggtgaattgtacaaaaagaaaatgctgaccgagagaataatgcatgaatgcataaataaactgctaggtgagtatcaaaacccagatgaggaagacctagaggctttgtgcaaattaatgagcacgatcggggagatgatagatcatcccaggacaaaggtccatatggatttttattttggccttatacataagctatcagaaaatgtgaagttatcatcgcgtataagatttatgctagaagatgtgattgaccttagaaaaaacaagtggaggcagagaaggaaagtagaagggccaaaaaagatagaggaggtccgcagggatgcagtaaaacataagtttggccaatcaacaaggtttggctcttctcctaattataattcatctgttacttgcattagctctggattgagaccagggcctccagatgctagatatcagtcttcaaatagagtcttgcatgttccactccatcaaaggcgtgctcataaatccattcgccttggtcctcaaggtgacttaggaagaggaatctcgatttgtgggaagcaacacgtttcaaatgatattttgccagaagttactttgaatagtcatcatggtcaaacatcagaaaactcaagagacagttcatttacaggagtgacaagtaatccaacaggcttcaaagccggtaatacatcttggggaatggtggatctttcttcaccagtaccgtcaactataggtcaaacacatacatcctccacagtcagaaaggagatgtgtgctgaagcgcatacattccctgaagaggttcttcaagagaaatcgatactaaccataaaagaattttacagtgctaaggatgagaaggaggtcgctctgtgcatgaaagaactgaatgctcccggcttctatccttctcttgtgtcactttggatcactgactcgtttgaaagaaaagacctggaaagggaactcttggccaagcttttggtgtacttgtgcacagctcaagagcacttgctgagccagaggcagctactccaggggttccaacatgttctatctaccttggaggatgccgtgaccgatgcgccgaaagcgaccaagttcctgggccaaatatttgccagagtcgtactggaagacgggatctcgctgacggaggtaggagggctgctgcaggagtgggatggcagggaagagccagcaggacagcatgccctggaggacagcctcgcatccgaggttctagggagcatgctagagtccatcagagtagagaggggcgacaacgccgtggacgaaatccgcgcaaaatccaacctgcagaggcgtggggtgtgtgcctgacgcctgatgcaggaagcagggtgcttagattgcaattttgttaggttgtcgggatcctaaccttagaaataaaggttagataagattttgctggtcttttgttttccttgtgttaccactacttttgcagaagaacttgttgagttttctgtgctggttcgtggctggcttttaaacataactcatgatggtttcgaatctcatgatgatttgtaccatctttgttcctatgaagcatcagtttctctggtttccactgccgtccttttttttaaaaaaaagtttttatacttatttctaacctatcttgtggttcaagacttatcatgtttccatcgttttcacggcgagcgtcatgcaagaagcaagaagatccggattcttttgaatgggccaagaaatttctgttgtctggtgctctttctgctttcgttgagcccaacatggaaactgtccccatcaagattccctctaaatgtatgctccctcctagtcaggaattgcatgaggaacctcagtcccctttgcctgcagaagcggtcaacagaaagaaacagtcaatcttgatcgacactgaagtaaggagtgccaggctcaaggagaaggctagaggttttaagacttgctctggaataaggaagaattgctcgtgctgtgctaggacatcgccaccctctatctctcacaagattattaagaagctaggagctgaattctgcaaagttaatccctccaagttatgccctaatgcattaaacaactccaggtccttcagctctgccatccagaggccacgtgcttcatccagtagcagggccgagctacgagcaacgtccgaagatcagagggatgaatcagaagatgaagatgatgcggggtctcgcccctcggctgggatgtaaggctttgccttcttccttgggtcagccagtttttactgtgcttctgttggcgataacttttggtgttattatgtataccaacaaaacttctctttctggtgatgggcttgtcgtgccctttttgtctgcctcaacaaacttggttcgag

SEQ ID NO: 216420 - DNA, 6537 bp, Zea Mays
ctcaaattcgctctgcgacccattccattccgccttcgccgcaccggcactaaacctaaaacccgaccgtgtttcctgtcgctgcttgtcgtcgcctgatcatgtacgactctctggggttttttttccccgctcgttgggctccatatttcctgcaatttggttaatcttagtcgcattctaaaaataaattcatggcgccgatcctttcaccgcaaggattttttttcgttttttcttttcctcaatatattttaaatttttttggtggtggcttcgctgcaatgtatttagagagaaatctcaaagtagtattaagcgagattttccatgcacttttcaatcttctgtatggttatagcttaacgccttaaaccaattgttgatccgaacccattgtgggtacgagcttcaaactttttttcccggtgtcgcagagatcgaattgaagcggggatatatgtacaggaaccagtttaggtcggatcgattgaacgaccacgccaccactgcgcggaggcccggccgcgggagcggcagtagctcgcattgggtcgtctccggcggccgtggaagcaccgctccggctacgcggctgcgatcgccgccctaccggagcgggaggcccgggagcgtgcagcagcagtacaggccgagatcgccggcgagtgtcccgatccaggggaatgccattggctgcgctcctccttgtgggagtggtgcctctgctgagcacacgggaccagtgaaccaagagactttcggatcactggataatgtgaaaccttccaattttcctgctcagagtgatggtttgagttgtgtctctgctgaagaaacctggccagcagattccccaaccccaacactacagacaaaaggatattcatccccttcatttactcttcagtttggaacttttaactcaggagttattaacaaacaggaaactacttcctgcacatcctcagcccctcctgatctgaatgggagcaaacatgaaaaggcctgccatggattacattattgcaagcccaatacagcttcctcacctcctatacaagagctgcaaaagcaggaagcaagagatgatttagttattggtggagaagcagacttaattggtaaatatgaggttcatgttcctgaattgcatgaaacacacacaatgctgaattctgtttctccatctagcaaagtgtgcacagattcacgcaaggtgttgctcagaactatgtcttccccaactcaacaaaagtgtgaaaatcaagaagaaacaaaaaacactatcagtgttaaccagactgacaccgcatacaaatatcctacaaccaagcccaagatcagtgttcaaattccagcttcctatactcccaacatggcaccaccccaatttatgcttccagtaccagggagatcaatgcctgtggcatttcaacagaaacaacctcaagtgcccattgaattcaggggcccaggttttcaaatgcactctattggctctgtatctagttccttgcccgtgaagatggctgtccctctgggtaatgcacctcacatacaaccgatgtttgttcatggtgctcagcctcatgcattccatcagcaatcctttattcaccatggacaaggctttggatgtgctcctccatctaattgttaccttcctcagtttggcaacatgagaaatgtgcaagaattatctcagcagtatcctagaagcggtgatgaacataagagaactatcaagataacacatccagagacacacgaagaactgatgctagatagacatgggcattcctttataaatgttcctgcttctgggcagatgcctttaaacaatataaaccagctacctcactctgttcaaacattttctccacttcagaaagtgtattatcctagaccaggaacgtacaattcagcacatgtctatcttcccaactccactgatgtccctcttgcaagtaggcaattttcctccaaaattcaaccttcgatgcatggttttgattccactaatagcaaccagccatttacttccatcagacctcctatgccgatatctcggcttgatgctacttccgggccattaacaaatttgcatactgcttccgaaatctcaaatttcaaagggatgtttccatcaagcctacctgctccagttcatgttgagctaaagccgcctattacactccctgctgaaatgaatagtgaatctaccatatcaaatcaacaaaattattgcaaaattgggctagaaatgtcccttgaacctgtaaatttagtttatgaaggaaataacaaagattctgttgcaacttgtgacataagttgtaatttaatacctcaaccagtttcaaccccgcagacacagactcggccaacttcagttgatcatgccacaccagttgtagaccctcaaactatcttaaccagtagcctgcctctggaatctactacatgttgtaaatcttcagttaaagcaaaacctattgaggtggaacaatcattagtggttccaacaactttatcatcccatacaaaactcgagtcatcgcatgcaactactagtgtcattttgactgcaacttcattagtttccaagattgatgggacgccaccgactaacaggaactatagatattatggcaatagcattttggggaaacctccgttaatttatgcacaagaaatattgccatcaaagtttgtggggtctaatacatcaccagaaggtcttggaaaggcaaaggtgaatccagttctcttccaagaaaagtttccttctgaacttaatggttcagttccattgcgaaagcatgacttcatgatagaagaacatgttccaaacgaaaaagggatgtgctcagagtcaaagaccgaacaagtagatgtgaccatgccaagtactgcctttggattggaggatgacactagtgttgctaaatctggaagatttcatgcatatcaccagccagttgatttgcatccttccatatacattggtgatatccagacatcagatgacagtcagcaaccttcaccagatttagaaatcataacatctcaatcagagaacaagcagaataacagtagagtagactctgcaagggatgtcaagaatgcagcccctatttctacttcagctatctcccaggggaaaacagaacaagagaggattggtttagaaatatctaatccttgctctataactgctgctttagtggcacaaccaaaaaaagttgttttggagtcaacaaaggccaaaagtaccaatggacgaagaaagaaacgaaaagagacacttcctaagggtagtggacacaagtattatgatcttgatagtgcacacagttctctcaatgagaatgtcgagagttttgttacttcagaggatgttcagtgttccttggcaactgatttaaagctgaattttacatgcgaggctgcaaaggacaattcaactggtgggaatgattgccagaacagaagtgacttgttcagctgggaaaatacaacggaaaactctgcggacaagttgaaactttttgggggtacccattctaaaagtggagcagaagtaaacaaggataaatctgagtttgaccataaaaggtattcccgggattttcttttaacgtttgcacaaagttgcatcgaacttcctgcaggtttcatgattggattcgatatttctgaagcagtaatgagtgtacatgttggtgctccatttatagacaatactcaacttaattcaaaccatgcaaggataaaagatcgaggttcccgaggtagtcgtcatatgactgtacaacatgttgggaacggatctgtaagaagtttatcacaaagtcagccattaagtcaatatagtggcgaggtgctctccggagctatgaaagtagtatctcggcgcagcatgtcacgtggatctgttgatgagagatggcaacatagaactaatgttcagggtatttcatcgccttctcaggtatctatgccaattatgcacaaagctgagaaaaaatatgaaataggtaaggggattgatgaggaagggtcaaaacaaaggcagttgaaagctattctgaataagttaaccccccaaaatttcgaaaaactttttgcgcagttcaaggagttgaatattgataacgtggtcacacttactggtgtcatatctcagatatttgacaaagctttgatggaacccactttttgtgagatgtatgctagtttctgtttccgattagctggtgacctaccaaactttgtcaaagatgatgagaaaatcactttcaaacgactgcttttaaataaatgccaagaagaatttgaaagaggagaaagagagcaggctgaagcaaataaagcagaagaagagggtggagctaaacaatctgaaggcgagagagaggaaaaacggattcgagcacggagacgcatgctaggaaatattcggttaattggtgaattgtacaaaaagaaaatgctgaccgagagaataatgcatgaatgcataaataaactgctaggtgagtatcaaaacccagatgaggaagacctagaggctttgtgcaaattaatgagcacgatcggggagatgatagatcatcccaggacaaaggtccatatggatttttattttggccttatacataagctatcagaaaatgtgaagttatcatcgcgtataagatttatgctagaagatgtgattgaccttagaaaaaacaagtggaggcagagaaggaaagtagaagggccaaaaaagatagaggaggtccgcagggatgcagtaaaacataagtttggccaatcaacaaggtttggctcttctcctaattataattcatctgttacttgcattagctctggattgagaccagggcctccagatgctagatatcagtcttcaaatagagtcttgcatgttccactccatcaaaggcgtgctcataaatccattcgccttggtcctcaaggtgacttaggaagaggaatctcgatttgtgggaagcaacacgtttcaaatgatattttgccagaagttactttgaatagtcatcatggtcaaacatcagaaaactcaagagacagttcatttacaggagtgacaagtaatccaacaggcttcaaagccggtaatacatcttggggaatggtggatctttcttcaccagtaccgtcaactataggtcaaacacatacatcctccacagtcagaaaggagatgtgtgctgaagcgcatacattccctgaagaggttcttcaagagaaatcgatactaaccataaaagaattttacagtgctaaggatgagaaggaggtcgctctgtgcatgaaagaactgaatgctcccggcttctatccttctcttgtgtcactttggatcactgactcgtttgaaagaaaagacctggaaagggaactcttggccaagcttttggtgtacttgtgcacagctcaagagcacttgctgagccagaggcagctactccaggggttccaacatgttctatctaccttggaggatgccgtgaccgatgcgccgaaagcgaccaagttcctgggccaaatatttgccagagtcgtactggaagacgggatctcgctgacggaggtaggagggctgctgcaggagtgggatggcagggaagagccagcaggacagcatgccctggaggacagcctcgcatccgaggttctagggagcatgctagagtccatcagagtagagaggggcgacaacgccgtggacgaaatccgcgcaaaatccaacctgcagaggcgtggggtacttatcatgtttccatcgttttcacggcgagcgtcatgcaagaagcaagaagatccggattcttttgaatgggccaagaaatttctgttgtctggtgctctttctgctttcgttgagcccaacatggaaactgtccccatcaagattccctctaaatgtatgctccctcctagtcaggaattgcatgaggaacctcagtcccctttgcctgcagaagcggtcaacagaaagaaacagtcaatcttgatcgacactgaagtaaggagtgccaggctcaaggagaaggctagaggttttaagacttgctctggaataaggaagaattgctcgtgctgtgctaggacatcgccaccctctatctctcacaagattattaagaagctaggagctgaattctgcaaagttaatccctccaagttatgccctaatgcattaaacaactccaggtccttcagctctgccatccagaggccacgtgcttcatccagtagcagggccgagctacgagcaacgtccgaagatcagagggatgaatcagaagatgaagatgatgcggggtctcgcccctcggctgggatgtaaggctttgccttcttccttgggtcagccagtttttactgtgcttctgttggcgataacttttggtgttattatgtataccaacaaaacttctctttctggtgatgggcttgtcgtgccctttttgtctgcctcaacaaacttggttcgag

SEQ ID NO: 216421 - DNA, 6214 bp, Zea Mays
ctgatcatgaaccagtttaggtcggatcgattgaacgaccacgccaccactgcgcggaggcccggccgcgggagcggcagtagctcgcattgggtcgtctccggcggccgtggaagcaccgctccggctacgcggctgcgatcgccgccctaccggagcgggaggcccgggagcgtgcagcagcagtacaggccgagatcgccggcgagtgtcccgatccaggggaatgccattggctgcgctcctccttgtgggagtggtgcctctgctgagcacacgggaccagtgaaccaagagtgatggtttgagttgtgtctctgctgaagaaacctggccagcagattccccaaccccaacactacagacaaaaggatattcatccccttcatttactcttcagtttggaacttttaactcaggagttattaacaaacaggcatgggatccttgttcaactatttttctgttggcttttcggtttgctacccgctaatgccatgctgatatttttgcaggaaactacttcctgcacatcctcagcccctcctgatctgaatgggagcaaacatgaaaaggcctgccatggattacattattgcaagcccaatacagcttcctcacctcctatacaagagctgcaaaagcaggaagcaagagatgatttagttattggtggagaagcagacttaattggtaaatatgaggttcatgttcctgaattgcatgaaacacacacaatgctgaattctgtttctccatctagcaaagtgtgcacagattcacgcaaggtgttgctcagaactatgtcttccccaactcaacaaaagtgtgaaaatcaagaagaaacaaaaaacactatcagtgttaaccagactgacaccgcatacaaatatcctacaaccaagcccaagatcagtgttcaaattccagcttcctatactcccaacatggcaccaccccaatttatgcttccagtaccagggagatcaatgcctgtggcatttcaacagaaacaacctcaagtgcccattgaattcaggggcccaggttttcaaatgcactctattggctctgtatctagttccttgcccgtgaagatggctgtccctctgggtaatgcacctcacatacaaccgatgtttgttcatggtgctcagcctcatgcattccatcagcaatcctttattcaccatggacaaggctttggatgtgctcctccatctaattgttaccttcctcagtttggcaacatgagaaatgtgcaagaattatctcagcagtatcctagaagcggtgatgaacataagagaactatcaagataacacatccagagacacacgaagaactgatgctagatagacatgggcattcctttataaatgttcctgcttctgggcagatgcctttaaacaatataaaccagctacctcactctgttcaaacattttctccacttcagaaagtgtattatcctagaccaggaacgtacaattcagcacatgtctatcttcccaactccactgatgtccctcttgcaagtaggcaattttcctccaaaattcaaccttcgatgcatggttttgattccactaatagcaaccagccatttacttccatcagacctcctatgccgatatctcggcttgatgctacttccgggccattaacaaatttgcatactgcttccgaaatctcaaatttcaaagggatgtttccatcaagcctacctgctccagttcatgttgagctaaagccgcctattacactccctgctgaaatgaatagtgaatctaccatatcaaatcaacaaaattattgcaaaattgggctagaaatgtcccttgaacctgtaaatttagtttatgaaggaaataacaaagattctgttgcaacttgtgacataagttgtaatttaatacctcaaccagtttcaaccccgcagacacagactcggccaacttcagttgatcatgccacaccagttgtagaccctcaaactatcttaaccagtagcctgcctctggaatctactacatgttgtaaatcttcagttaaagcaaaacctattgaggtggaacaatcattagtggttccaacaactttatcatcccatacaaaactcgagtcatcgcatgcaactactagtgtcattttgactgcaacttcattagtttccaagattgatgggacgccaccgactaacaggaactatagatattatggcaatagcattttggggaaacctccgttaatttatgcacaagaaatattgccatcaaagtttgtggggtctaatacatcaccagaaggtcttggaaaggcaaaggtgaatccagttctcttccaagaaaagtttccttctgaacttaatggttcagttccattgcgaaagcatgacttcatgatagaagaacatgttccaaacgaaaaagggatgtgctcagagtcaaagaccgaacaagtagatgtgaccatgccaagtactgcctttggattggaggatgacactagtgttgctaaatctggaagatttcatgcatatcaccagccagttgatttgcatccttccatatacattggtgatatccagacatcagatgacagtcagcaaccttcaccagatttagaaatcataacatctcaatcagagaacaagcagaataacagtagagtagactctgcaagggatgtcaagaatgcagcccctatttctacttcagctatctcccaggggaaaacagaacaagagaggattggtttagaaatatctaatccttgctctataactgctgctttagtggcacaaccaaaaaaagttgttttggagtcaacaaaggccaaaagtaccaatggacgaagaaagaaacgaaaagagacacttcctaagggtagtggacacaagtattatgatcttgatagtgcacacagttctctcaatgagaatgtcgagagttttgttacttcagaggatgttcagtgttccttggcaactgatttaaagctgaattttacatgcgaggctgcaaaggacaattcaactggtgggaatgattgccagaacagaagtgacttgttcagctgggaaaatacaacggaaaactctgcggacaagttgaaactttttgggggtacccattctaaaagtggagcagaagtaaacaaggataaatctgagtttgaccataaaaggtattcccgggattttcttttaacgtttgcacaaagttgcatcgaacttcctgcaggtttcatgattggattcgatatttctgaagcagtaatgagtgtacatgttggtgctccatttatagacaatactcaacttaattcaaaccatgcaaggataaaagatcgaggttcccgaggtagtcgtcatatgactggtaaatttgatgatgataagtggagaaaacagtttttttctactgtttctggacgtaacctgctttctgacaatttttatcaacctgccttttctaatcgggatgcagtacaacatgttgggaacggatctgtaagaagtttatcacaaagtcagccattaagtcaatatagtggcgaggtgctctccggagctatgaaagtagtatctcggcgcagcatgtcacgtggatctgttgatgagagatggcaacatagaactaatgttcagggtatttcatcgccttctcaggtatctatgccaattatgcacaaagctgagaaaaaatatgaaataggtaaggggattgatgaggaagggtcaaaacaaaggcagttgaaagctattctgaataagttaaccccccaaaatttcgaaaaactttttgcgcagttcaaggagttgaatattgataacgtggtcacacttactggtgtcatatctcagatatttgacaaagctttgatggaacccactttttgtgagatgtatgctagtttctgtttccgattagctggtgacctaccaaactttgtcaaagatgatgagaaaatcactttcaaacgactgcttttaaataaatgccaagaagaatttgaaagaggagaaagagagcaggctgaagcaaataaagcagaagaagagggtggagctaaacaatctgaaggcgagagagaggaaaaacggattcgagcacggagacgcatgctaggaaatattcggttaattggtgaattgtacaaaaagaaaatgctgaccgagagaataatgcatgaatgcataaataaactgctaggtgagtatcaaaacccagatgaggaagacctagaggctttgtgcaaattaatgagcacgatcggggagatgatagatcatcccaggacaaaggtccatatggatttttattttggccttatacataagctatcagaaaatgtgaagttatcatcgcgtataagatttatgctagaagatgtgattgaccttagaaaaaacaagtggaggcagagaaggaaagtagaagggccaaaaaagatagaggaggtccgcagggatgcagtaaaacataagtttggccaatcaacaaggtttggctcttctcctaattataattcatctgttacttgcattagctctggattgagaccagggcctccagatgctagatatcagtcttcaaatagagtcttgcatgttccactccatcaaaggcgtgctcataaatccattcgccttggtcctcaaggtgacttaggaagaggaatctcgatttgtgggaagcaacacgtttcaaatgatattttgccagaagttactttgaatagtcatcatggtcaaacatcagaaaactcaagagacagttcatttacaggagtgacaagtaatccaacaggcttcaaagccggtaatacatcttggggaatggtggatctttcttcaccagtaccgtcaactataggtcaaacacatacatcctccacagtcagaaaggagatgtgtgctgaagcgcatacattccctgaagaggttcttcaagagaaatcgatactaaccataaaagaattttacagtgctaaggatgagaaggaggtcgctctgtgcatgaaagaactgaatgctcccggcttctatccttctcttgtgtcactttggatcactgactcgtttgaaagaaaagacctggaaagggaactcttggccaagcttttggtgtacttgtgcacagctcaagagcacttgctgagccagaggcagctactccaggggttccaacatgttctatctaccttggaggatgccgtgaccgatgcgccgaaagcgaccaagttcctgggccaaatatttgccagagtcgtactggaagacgggatctcgctgacggaggtaggagggctgctgcaggagtgggatggcagggaagagccagcaggacagcatgccctggaggacagcctcgcatccgaggttctagggagcatgctagagtccatcagagtagagaggggcgacaacgccgtggacgaaatccgcgcaaaatccaacctgcagaggcgtggggtacttatcatgtttccatcgttttcacggcgagcgtcatgcaagaagcaagaagatccggattcttttgaatgggccaagaaatttctgttgtctggtgctctttctgctttcgttgagcccaacatggaaactgtccccatcaagattccctctaaatgtatgctccctcctagtcaggaattgcatgaggaacctcagtcccctttgcctgcagaagcggtcaacagaaagaaacagtcaatcttgatcgacactgaagtaaggagtgccaggctcaaggagaaggctagaggttttaagacttgctctggaataaggaagaattgctcgtgctgtgctaggacatcgccaccctctatctctcacaagattattaagaagctaggagctgaattctgcaaagttaatccctccaagttatgccctaatgcattaaacaactccaggtccttcagctctgccatccagaggccacgtgcttcatccagtagcagggccgagctacgagcaacgtccgaagatcagagggatgaatcagaagatgaagatgatgcggggtctcgcccctcggctgggatgtaaggctttgccttcttccttgggtcagccagtttttactgtgcttctgttggcgataacttttggtgttattatgtataccaacaaaacttctctttctggtgatgggcttgtcgtgccctttttgtctgcctcaacaaacttggttcgag

SEQ ID NO: 216422 - DNA, 1802 bp, Zea Mays
cgtggtgcccatcccacatgcctgcttctcgccggcgcccgtctgtctgtacgagtacgactcgtccctcgtccgtgccaatggagaattggagccggccgaacagaaccaaatccgtgcccgtgcgaggaagatctcagcggctgctggcgcggggggtcgttggctcgttccaaactcgcctgactccgcccaccgtctcttggtcgccccacacgatctctccaccactccccacccggcgccggcgaggcgcgaggagggccagcaatgatggtctcctcccactcgcagtcgcaggcgggccgccggcggcgatggaggtgcttgctgccgctcctcgtaggcgccgccttcctcgccgagatcgccttcctcggccgcctcgacatggcgaagaacgccgaggtggtcgagagctggaccacctccttttaccgccgctcctcccattggggtgaatccgtgggccggggcgcggtcccgagggcagacggcgacggcgacggcgaggacgaagagatccggcggtgcgagcagcggctcgagagggaggacgccgtgccctacgaccgcgactttgacagggatcccgtgcttgtcggtggcgctgccaaggagagggtacaagattgtgatgacaaccagcctttcttcagatgtcccagttggctacttttcatgggctgaatatgatatcatggcacctgtgcctccaaagactgaagaagctcttgctgtagcctttatttctaactgtggtgcacggaacttccgtttgcaagcccttgagatgcttgaaaatttggatgtcaaaatagattcatatggtagttgtcatcgtaaccgtgatggcaaagtggacaaagtggacaccttgaagcgctacagattcagcttggcatttgagaattctaatgaggaggattacgtaacagaaaagttttttcagtcactggtagcaggttctattccagttgttgttggtgctccaaatattcaggagctttctcctggagaaggcgcaatattacacattaaggagcttgatgatgttgtttcagttgctaagacaatgaaaaatattgcttcaaatcctgacgccttcaatcaatctttgaggtggaagtatgatgggccatctgattctttcaaagctcttatcgacatggcagcggttcattcatcttgtcgtctttgtatacatattgctaccaagattcatttaaaggaggaaaggactccaaaatttacaaatcgtccttgtagctgttccagcaaaaaggggacagtttaccacttgtttatccgagagagagggcggtttaagtcagagagcatttatatgagatcgggccagttaacactgggagccttggaatctgcagtgctcggtaaatttaggtccctcaaccacgttcctgtatggaaggatgaaaggccaccgagtattagaggtggggatgacctgaaactatacagaatttacccagtcggtctaacgcaacgtcaggctttgtacggtttcagatttagagatgattctaaactcgagcaatacatcaaagaccatccctgtgcaaagcttgaagtgatttttgtgtaactatgctctaggcttacgttcgcccccgattcttactgaactccgtgtgcggagtttcagttatactgtaatgtatggtgtcttgtgtagcaaacaaactcatgctagtacagatcatctgccggatgaaaattttccttgacagcgaacatcagtgcattcagcaacaacagcaaaggaattgacacgtttctac

SEQ ID NO: 216423 - DNA, 2049 bp, Zea Mays
gtacttcaggaagaagctggaagaggagcggaggctcaaggaggaagagaaaaagaacaaggcggcggcggctgctgctgctagtggaaagcctcagaaggcatctgctgctgacgatgatgacatggatcccactcaatactacgagaataggctcaagactcttgattcactcaaggccgcaggtgtaaacccctatccacataagtttccggttggcatctctgtagtggaatacattgagaagtacaagaccttgaacaatggggagaagcttacagatgcgacagaatgtttagctgggaggatcatgaacaagagaacatcatcatctaagctattcttttatgatctttatggtggcggcatgaaggttcaagtgatggctgatgccaggacctcagagttggatgaagcagaattctctaagtaccactcgagtgtgaagcgaggtgatattgttggcatatgtggttatccaggaaaaagcaaccgtggggagcttagcctgttcccgaagaaatttgtcgtgctctctccatgtcttcatatgatgcctcgacagaaaggtgaaggaagttcggtgcctgtatcgtggactccaggaatgggtaggaatatcgaaaattatgttttgagggatcaggaaactcggtatcgtcagagatatcttgatataatggtaaaccatgaagtgaggcatatcttcaagacacgatctaaagttgtctcatttatccggaagtttcttgatgaccgcgaatttttggaggtggagactccgatgatgaacatgattgctggtggagcagctgcaaggccttttattacacaccacaatgaattaaacatgaggctttttatgcgcattgctcctgaattatatctgaaggaattggttgttggtggattggaccgtgtttatgaaattggaaaacaattcaggaatgaaggaattgatttaacacacaatcctgaattcacaacttgtgagttttatatggcttatgccgattataatgatttgatggagcttactgaaaccatgttgtcagggatggttaaggagctgacaggtggctataagataaaatatcatgcaaatggagttacgaactcaccaatagaaattgatttcacacctcccttcagaaggattgatatgattaaagatttggaggctatggccaatctcaatataccaaaagatctagcaagtgatgaagcgaatcgttacttgatagaagcatgtgctaagtatgatgtgaaatgtccacctccccaaacgacatcacggttgcttgacaagttagttgggcatttcttggaggagacatgtgtgaatccaacatttatcatcaatcatccagagataatgagtccattggcaaagtggcataggtctcgacctggattgactgagaggtttgagctatttgttaacaaacatgaggtgtgcaatgcatacacagagttaaacgatcctgttgtgcagagacaacggtttgaggagcaactaaaggatcgtcaatctggtgatgatgaagctatggccttggacgaaacattctgtgctgcccttgagtatggtctaccaccaacaggtggttggggcttgggaattgatcgcctcacgatgttgcttacagattctcagaacattaaggaagttcttctatttccggctatgaagcctcaagagtagctatccgcatagccaaaagcaacaaaatggcctcagccaaaggccacaaaaggttcaaagcaaacataggcgctggagggtatatcttagctcttggatctgtattgaacgatacatccttttgcccctgtgctcgggagctttccatttttttcattattttttgtaaactaccgcgtatttgctggcagcaggttattaaccagaaactgtaacgtcacagaaagttcagtttaacttcgaatggagttttttggaggttgcaaatactctgggtctgggtctatccaatgtgtacgctcaagcctcaaaggcccaccctaaattgttgaaaaagcatgtgc

SEQ ID NO: 216424 - DNA, 6458 bp, Zea Mays
gtctgattatgtgatccgacactcccgaaacccagcccaggccgccgccgccgccatggcctccgacgacggcgacaaggacatcctcctcctcgtccaccaggtcccactcgacatggaggatgtgccagcgccccgcctggcgcacctcctcgccccgctccaccgcgcgcctccaccgcccccgcctccccccttccgctcgccgcccccgccccaggccgccgcttccgccgagcaccgcctctcattccgcggctggctcggcatcccccgccactgggacgactgggtcgccaagctccggcccctccacgcccgcctctggcgccgcctcggcatccacgacgccgtccttgcctccaccctccgcttcaagcgcgacgcctccgccatcctccatctcgcctccttctggtcccctgccaccgccaccttcgccttcccctggggggaggccactgtcaccctccaggacgtcgccctcctcgccggcttccccgccctcggcgccccggccacggccccgctcccgccccagtggcgccccgacgaggccgccctcaatggcgtgcgcctcggcttcaaccgcagcgcctgcaagaaggcgcaccactccgcctgggtaaaacacttcctcaccgacgataacgcggacacagtcttcgagcacgccgccttcctcgcgctctggctcacgcgcttcgtcctcccgggtcatccggagtccaccatgcgccaggccgtcttccccatcgccgtccgcctcgcgcgcggggaccgcgttgccctcgcgcccgccgtccttgcctcgatctaccgggacctccgcgagatcaaggccttcctcatcgccacgggcgccgccgccaccaccggcaacgccgatatgatctcctccttatccgtctactcgccactctacattcttcagctctggatgtgggagcgcttccctgccctcaggccagcaaaggtgaacccactcgttgatggcgatccgcttgccgctcggtggcatgatctgagcaggaagctgaacccggcgcagatacgtgaggccctcagcacaggatgcaactttgtgtggcagccttatgtcagctccatggagcacactgggtgggttcacagcagtgatctagccgaggatgatgaactggcatcgctcgcacaatttttgcacccctgtgagctcgtagggatggattgcattgagcagtacctcccgcaccgtgttgccagacagtttggactggaccaagatgtgcctgcagatgttcaccgtgccaaccaggattgggcgattgcttggcagacctaccagctggaaggtaagaatgtggctttcttcatccctcactctgagcctgggatcacaacacggtatgcacagtggtggaggcagcaacttctgccttctggcattgatgctgctacagcaagtgctccagtagagtggaagacttccaagcgcaaggtgaaaaagacaccagcggccatggaagctgaagctgagaaggagcgtaagatgaagaaggcccgggtctctcctacttatactgataaaaagcgcaaacttgaagagttgtatgatgctaagttgtcggattggcttccaactgcaaggaatgagattagtgacaccactagtgatatggaatcggaggaggccttattgcctaatgttggaactacaaatgatgatattgtgctactcatgccaaggaagcagacaacgactgcacctgtaagggcattgatggataatgacatgatcctggctctaggagagagaggaaactttatggttgatgagcctccagacatccaaagtgaacctgaagctgttgtccctgcaacgctggatgaggaaatagttaaaattcctgaggttatttctcttgatattccagataagccagaagaaggagccactgcagtaatggaggagcagaaggaagctactagtgtatctgatagatctgaagaagctagtgctctggtcataggagaggtagaagaaaaggttgccatagagggagctatttgtgttacagggatgaatccatcgggaaacaactcagcaactgtaatggaggcagatgaaagaaatgcagttccaaaagaatttggaagggctgccaaggaagtaattgaagctgtgccccagagccaacatgaagttaatgcaggtgttataaacaattctcatgatgtggtggctttacctgaggaggcccatccagttcagcccacaaataattctggtggatgtcccgtggtatcttgcataatggaagacagtaaagttgctggagattcgggcaaaattgattatgaatatttttgtgattttgttgaggaacagagggagattccttgtgtacaagagatttctggagaaaacagtcgaatgggtgagaaagagagagaagaaacctcccatgaatctcctcaactagagattgtagaatgtgtgcaagacatcgttcttagggaaacagactatgatgttaatcaaaagatagtttatccagcagtggaggatgtagcaacttccgatagtatgagtacatctcttctgggtgttcctgaaccagaaaatgcagaactcaataaacatccttatctagcaattaaagatgaggaagatatacccatggaagctgcacgaggagaagtagcagaaatggaacaaattagtacttctgcaaagggaggtgccgaggagcatggggacttttctgaacttgatcacatgggccgagcagatgctaaattgcatttacacttaaattctgaagtgcctgagaaaattgatgaaatagagtgtaaagaagtcgctggcactatgagactaactgggagatattctgatcagaagcttggagatgtgcctgaagttgggtacacagaagatgaaaacattagggggctggtagtgaacacaagtgataggaaaccttcagaagtctctcaagtcgagcctgcaaaactggaacattctaaggatctggtgaaagaggaaacagacaaatccgaaaatattcctggattagaatgtataggattggaggaaactcgtggagatttgatggaagagtgtgcaaataccaagtctgataatgttcccgaattagaaaatacaggattaggaggaactcatgggccaatagaggatactgatggtagactgaaggaaattcatgatgtcaatgcagaactggataaacacaatgtgcatgagagcgatattgatagatccgaggacatcatgcaaatcgatccactaacacaggataaagctacgtggctggcgaaggaagaaactgaagataaaactacaaaagttcaagaagtaaagtatgaacaattaagaaatgagccaccgattcaagaggattccaaggaaaagccctgtgctgatagcaaggatctatcagagaatgttgtagttcagtccaaagaggtagataaattgaaacaagcaggagagggttgccaggcgttaatggagaaagacatggagaatgctagtggtgcttttgtactagaacagacagaagatggacacagaaaatcattgatagagacaagtataaataacgatagtgaaattactctagtcgagcagttggatggacaaagtgagagtcttacgaggacaggtactgtggaaattcatggagaaaccattaaagcacaagacaatgagttctataaggatgtggtagaagattcaaatgactcaaccaatgaaaaggatgtggtagaagattcaaacgaatcaatcaatgctaagatgccatgtagttcagctactgtacagttaaaagaagataagatggaagtttttcatgaaggcaagatggaggagccatgtgctcaggatgctgaactgagtaatcagagggaaccatcatctgatgcaactgctatggagattgaggcagtggctctggaacaggacagcagaatcatatgcaaaaacatggaggcaacaacagtggaaggcagccacacactggatagtggactaagttccgatctagccaaggttaatgaaactcatgctgcacgggaaattaaaaaccaggaagttttggatgtggacatgaaagtagcaatgagtgtttgtggtgaatatcaaattaactcaattggtatggaggatgtcaaatctaccaaaggatcacagaaccaagaatgtttggaccagaaagaagaccatataatggaggaaagagtggagtgtgaagtaagagaaggaagtggagtatcctatgaagaggcatgtgagctcggtggtggtagagtgaaagcctctggagttgcagtggatgttagtggtccagtgctaaacaaggaggcctgcaacacagaggagttgcaggcaagggaggataagaagcgtcatggagttgggcatgtgaatgagaagagggttttggaagaaactagtatgattgatactggtgaattgaaatctgattcgactgttatggagattagcatggctgggttaagacaaggaacactcaaccaatgtgcttcaagttcggagaaggaagaagcagtgcaggagaagcatgatcagggattggtagatgaaaacacaaacagaggttcagctgacaatgatgcacttgaatgtggtggagtgaatcctgatgtggccataacaatgtttcatgaaactattcttacaacagaagctgtcaatatagctgggtctaaaatttcgtctgagaaccagcaaaaggaagcaccctttgaagtacactctataacagaagtcgaaggttctgaatcaaatgaatcatcaagaaaggagcctgaaggagctcttgctcttccacaagagcctggcaacctggtaaaagttaaacaagaaagtttggagaatgaaaccgagatgtccatttttagggagaatgacaaagtttctggaaaagatcaggcatcagcagagtttataattgatccttcaaatacggatgaacggagggagaatgatattgggcggcccgatgaatcagcaaaaggctgtgaaaggttaacttctgattctataaacacagttcactccaaatttggcaagtctagtaatgaagaggataagagaacacagaacaccaggtctacggatccaaaagatataaaggaatcattgggtagaattcgtgccgaaccatcaaacagggtacacacaaccagtgttgggtattactctcagcatgcagctcatgatccgatttcatcttgtaaggagatcaaagtgcctttgcgagacggtgcaagggattctggaagggaccgtgcactggagttagtggttacaagtccacgagaagagactcctcgatggaggcaagaacagtacgcacttcagattttagaagacgttcaaaattcccgaattgctgagagatctaggatggagatggagatcagagtactgaaggcacaagtcagtagcatggagagacaagtgatgaacctggatcacttctctgaggtcaagtccagatctagtttgaaccaacaaatggttattccgaacctcctcccattatactgaatgattggatgcatgacggtgctagggcatgtctgggttatgcctgaatcctgatgacatgactaaactgcccaaggtgtcactagctcaaatcgatggtagttctgctgtctatcttttagattgacgataagctcggataatttggaacttctgtgcaccacatataaggaatcagttcatttcacagggaaatcggaaaaaaatatcagcattccaaaggggtctaggtcttggatggtcagccatttttattatgtacaaatgcagtagaagatgaggaacttcatagtatgtttatgaactcgcaactacttagaccgcatattagtgtgaagcgagtctcattttgtttctagaagtgaagttgaattccattagttgtcagcattcacctgttctataggagctgccgtccagactccaggacttgtgaaagaatataaggggtaagatcgtcaatgcacatggccatacaatggcagaagagcaatgaggacacaagattgaatttaaaatggggaactggcaacaaatcgaactactggccgtgtttttttatataaaaaactggctgttgagtgttgacggcaaacgggagaagcccaatgtttcgattggcagaacggcaaaattctggcctgctggctgatttcgacgcaccaaagccaacgttccttgcagtcttcctttcatgtagaaattctactctacctttttgaactaatctccttgtcctattttctttcttgaactctaaaaccatacattttagcctccaaattagggatggttcatgattttttattcagatgtaaaatttgtggtcttctttcttccattgtgaataaatatgatataaaagttgtcatgc

SEQ ID NO: 216425 - DNA, 6257 bp, Zea Mays
gtctgattatgtgatccgacactcccgaaacccagcccaggccgccgccgccgccatggcctccgacgacggcgacaaggacatcctcctcctcgtccaccaggtcccactcgacatggaggatgtgccagcgccccgcctggcgcacctcctcgccccgctccaccgcgcgcctccaccgcccccgcctccccccttccgctcgccgcccccgccccaggccgccgcttccgccgagcaccgcctctcattccgcggctggctcggcatcccccgccactgggacgactgggtcgccaagctccggcccctccacgcccgcctctggcgccgcctcggcatccacgacgccgtccttgcctccaccctccgcttcaagcgcgacgcctccgccatcctccatctcgcctccttctggtcccctgccaccgccaccttcgccttcccctggggggaggccactgtcaccctccaggacgtcgccctcctcgccggcttccccgccctcggcgccccggccacggccccgctcccgccccagtggcgccccgacgaggccgccctcaatggcgtgcgcctcggcttcaaccgcagcgcctgcaagaaggcgcaccactccgcctgggtaaaacacttcctcaccgacgataacgcggacacagtcttcgagcacgccgccttcctcgcgctctggctcacgcgcttcgtcctcccgggtcatccggagtccaccatgcgccaggccgtcttccccatcgccgtccgcctcgcgcgcggggaccgcgttgccctcgcgcccgccgtccttgcctcgatctaccgggacctccgcgagatcaaggccttcctcatcgccacgggcgccgccgccaccaccggcaacgccgatatgatctcctccttatccgtctactcgccactctacattcttcagctctggatgtgggagcgcttccctgccctcaggccagcaaaggtgaacccactcgttgatggcgatccgcttgccgctcggtggcatgatctgagcaggaagctgaacccggcgcagatacgtgaggccctcagcacaggatgcaactttgtgtggcagccttatgtcagctccatggagcacactgggtgggttcacagcagtgatctagccgaggatgatgaactggcatcgctcgcacaatttttgcacccctgtgagctcgtagggatggattgcattgagcagtacctcccgcaccgtgttgccagacagtttggactggaccaagatgtgcctgcagatgttcaccgtgccaaccaggattgggcgattgcttggcagacctaccagctggaaggtaagaatgtggctttcttcatccctcactctgagcctgggatcacaacacggtatgcacagtggtggaggcagcaacttctgccttctggcattgatgctgctacagcaagtgctccagtagagtggaagacttccaagcgcaaggtgaaaaagacaccagcggccatggaagctgaagctgagaaggagcgtaagatgaagaaggcccgggtctctcctacttatactgataaaaagcgcaaacttgaagagttgtatgatgctaagttgtcggattggcttccaactgcaaggaatgagattagtgacaccactagtgatatggaatcggaggaggccttattgcctaatgttggaactacaaatgatgatattgtgctactcatgccaaggaagcagacaacgactgcacctgtaagggcattgatggataatgacatgatcctggctctaggagagagaggaaactttatggttgatgagcctccagacatccaaagtgaacctgaagctgttgtccctgcaacgctggatgaggaaatagttaaaattcctgaggttatttctcttgatattccagataagccagaagaaggagccactgcagtaatggaggagcagaaggaagctactagtgtatctgatagatctgaagaagctagtgctctggtcataggagaggtagaagaaaaggttgccatagagggagctatttgtgttacagggatgaatccatcgggaaacaactcagcaactgtaatggaggcagatgaaagaaatgcagttccaaaagaatttggaagggctgccaaggaagtaattgaagctgtgccccagagccaacatgaagttaatgcaggtgttataaacaattctcatgatgtggtggctttacctgaggaggcccatccagttcagcccacaaataattctggtggatgtcccgtggtatcttgcataatggaagacagtaaagttgctggagattcgggcaaaattgattatgaatatttttgtgattttgttgaggaacagagggagattccttgtgtacaagagatttctggagaaaacagtcgaatgggtgagaaagagagagaagaaacctcccatgaatctcctcaactagagattgtagaatgtgtgcaagacatcgttcttagggaaacagactatgatgttaatcaaaagatagtttatccagcagtggaggatgtagcaacttccgatagtatgagtacatctcttctgggtgttcctgaaccagaaaatgcagaactcaataaacatccttatctagcaattaaagatgaggaagatatacccatggaagctgcacgaggagaagtagcagaaatggaacaaattagtacttctgcaaagggaggtgccgaggagcatggggacttttctgaacttgatcacatgggccgagcagatgctaaattgcatttacacttaaattctgaagtgcctgagaaaattgatgaaatagagtgtaaagaagtcgctggcactatgagactaactgggagatattctgatcagaagcttggagatgtgcctgaagttgggtacacagaagatgaaaacattagggggctggtagtgaacacaagtgataggaaaccttcagaagtctctcaagtcgagcctgcaaaactggaacattctaaggatctggtgaaagaggaaacagacaaatccgaaaatattcctggattagaatgtataggattggaggaaactcgtggagatttgatggaagagtgtgcaaataccaagtctgataatgttcccgaattagaaaatacaggattaggaggaactcatgggccaatagaggatactgatggtagactgaaggaaattcatgatgtcaatgcagaactggataaacacaatgtgcatgagagcgatattgatagatccgaggacatcatgcaaatcgatccactaacacaggataaagctacgtggctggcgaaggaagaaactgaagataaaactacaaaagttcaagaagtaaagtatgaacaattaagaaatgagccaccgattcaagaggattccaaggaaaagccctgtgctgatagcaaggatctatcagagaatgttgtagttcagtccaaagaggtagataaattgaaacaagcaggagagggttgccaggcgttaatggagaaagacatggagaatgctagtggtgcttttgtactagaacagacagaagatggacacagaaaatcattgatagagacaagtataaataacgatagtgaaattactctagtcgagcagttggatggacaaagtgagagtcttacgaggacaggtactgtggaaattcatggagaaaccattaaagcacaagacaatgagttctataaggatgtggtagaagattcaaatgactcaaccaatgaaaaggatgtggtagaagattcaaacgaatcaatcaatgctaagatgccatgtagttcagctactgtacagttaaaagaagataagatggaagtttttcatgaaggcaagatggaggagccatgtgctcaggatgctgaactgagtaatcagagggaaccatcatctgatgcaactgctatggagattgaggcagtggctctggaacaggacagcagaatcatatgcaaaaacatggaggcaacaacagtggaaggcagccacacactggatagtggactaagttccgatctagccaaggttaatgaaactcatgctgcacgggaaattaaaaaccaggaagttttggatgtggacatgaaagtagcaatgagtgtttgtggtgaatatcaaattaactcaattggtatggaggatgtcaaatctaccaaaggatcacagaaccaagaatgtttggaccagaaagaagaccatataatggaggaaagagtggagtgtgaagtaagagaaggaagtggagtatcctatgaagaggcatgtgagctcggtggtggtagagtgaaagcctctggagttgcagtggatgttagtggtccagtgctaaacaaggaggcctgcaacacagaggagttgcaggcaagggaggataagaagcgtcatggagttgggcatgtgaatgagaagagggttttggaagaaactagtatgattgatactggtgaattgaaatctgattcgactgttatggagattagcatggctgggttaagacaaggaacactcaaccaatgtgcttcaagttcggagaaggaagaagcagtgcaggagaagcatgatcagggattggtagatgaaaacacaaacagaggttcagctgacaatgatgcacttgaatgtggtggagtgaatcctgatgtggccataacaatgtttcatgaaactattcttacaacagaagctgtcaatatagctgggtctaaaatttcgtctgagaaccagcaaaaggaagcaccctttgaagtacactctataacagaagtcgaaggttctgaatcaaatgaatcatcaagaaaggagcctgaaggagctcttgctcttccacaagagcctggcaacctggtaaaagttaaacaagaaagtttggagaatgaaaccgagatgtccatttttagggagaatgacaaagtttctggaaaagatcaggcatcagcagagtttataattgatccttcaaatacggatgaacggagggagaatgatattgggcggcccgatgaatcagcaaaaggctgtgaaaggttaacttctgattctataaacacagttcactccaaatttggcaagtctagtaatgaagaggataagagaacacagaacaccaggtctacggatccaaaagatataaaggaatcattgggtagaattcgtgccgaaccatcaaacagggtacacacaaccagtgttgggtattactctcagcatgcagctcatgatccgatttcatcttgtaaggagatcaaagtgcctttgcgagacggtgcaagggattctggaagggaccgtgcactggagttagtggttacaagtccacgagaagagactcctcgatggaggcaagaacagtacgcacttcagattttagaagacgttcaaaattcccgaattgctgagagatctaggatggagatggagatcagagtactgaaggcacaagtcagtagcatggagagacaagtgatgaacctggatcacttctctgaggtcaagtccagatctagtttgaaccaacaaatggaatcagttcatttcacagggaaatcggaaaaaaatatcagcattccaaaggggtctaggtcttggatggtcagccatttttattatgtacaaatgcagtagaagatgaggaacttcatagtatgtttatgaactcgcaactacttagaccgcatattagtgtgaagcgagtctcattttgtttctagaagtgaagttgaattccattagttgtcagcattcacctgttctataggagctgccgtccagactccaggacttgtgaaagaatataaggggtaagatcgtcaatgcacatggccatacaatggcagaagagcaatgaggacacaagattgaatttaaaatggggaactggcaacaaatcgaactactggccgtgtttttttatataaaaaactggctgttgagtgttgacggcaaacgggagaagcccaatgtttcgattggcagaacggcaaaattctggcctgctggctgatttcgacgcaccaaagccaacgttccttgcagtcttcctttcatgtagaaattctactctacctttttgaactaatctccttgtcctattttctttcttgaactctaaaaccatacattttagcctccaaattagggatggttcatgattttttattcagatgtaaaatttgtggtcttctttcttccattgtgaataaatatgatataaaagttgtcatgc

SEQ ID NO: 216426 - DNA, 6389 bp, Zea Mays
gtctgattatgtgatccgacactcccgaaacccagcccaggccgccgccgccgccatggcctccgacgacggcgacaaggacatcctcctcctcgtccaccaggtcccactcgacatggaggatgtgccagcgccccgcctggcgcacctcctcgccccgctccaccgcgcgcctccaccgcccccgcctccccccttccgctcgccgcccccgccccaggccgccgcttccgccgagcaccgcctctcattccgcggctggctcggcatcccccgccactgggacgactgggtcgccaagctccggcccctccacgcccgcctctggcgccgcctcggcatccacgacgccgtccttgcctccaccctccgcttcaagcgcgacgcctccgccatcctccatctcgcctccttctggtcccctgccaccgccaccttcgccttcccctggggggaggccactgtcaccctccaggacgtcgccctcctcgccggcttccccgccctcggcgccccggccacggccccgctcccgccccagtggcgccccgacgaggccgccctcaatggcgtgcgcctcggcttcaaccgcagcgcctgcaagaaggcgcaccactccgcctgggtaaaacacttcctcaccgacgataacgcggacacagtcttcgagcacgccgccttcctcgcgctctggctcacgcgcttcgtcctcccgggtcatccggagtccaccatgcgccaggccgtcttccccatcgccgtccgcctcgcgcgcggggaccgcgttgccctcgcgcccgccgtccttgcctcgatctaccgggacctccgcgagatcaaggccttcctcatcgccacgggcgccgccgccaccaccggcaacgccgatatgatctcctccttatccgtctactcgccactctacattcttcagctctggatgtgggagcgcttccctgccctcaggccagcaaaggtgaacccactcgttgatggcgatccgcttgccgctcggtggcatgatctgagcaggaagctgaacccggcgcagatacgtgaggccctcagcacaggatgcaactttgtgtggcagccttatgtcagctccatggagcacactgggtgggttcacagcagtgatctagccgaggatgatgaactggcatcgctcgcacaatttttgcacccctgtgagctcgtagggatggattgcattgagcagtacctcccgcaccgtgttgccagacagtttggactggaccaagatgtgcctgcagatgttcaccgtgccaaccaggattgggcgattgcttggcagacctaccagctggaaggtaagaatgtggctttcttcatccctcactctgagcctgggatcacaacacggtatgcacagtggtggaggcagcaacttctgccttctggcattgatgctgctacagcaagtgctccagtagagtggaagacttccaagcgcaaggtgaaaaagacaccagcggccatggaagctgaagctgagaaggagcgtaagatgaagaaggcccgggtctctcctacttatactgataaaaagcgcaaacttgaagagttgtatgatgctaagttgtcggattggcttccaactgcaaggaatgagattagtgacaccactagtgatatggaatcggaggaggccttattgcctaatgttggaactacaaatgatgatattgtgctactcatgccaaggaagcagacaacgactgcacctgtaagggcattgatggataatgacatgatcctggctctaggagagagaggaaactttatggttgatgagcctccagacatccaaagtgaacctgaagctgttgtccctgcaacgctggatgaggaaatagttaaaattcctgaggttatttctcttgatattccagataagccagaagaaggagccactgcagtaatggaggagcagaaggaagctactagtgtatctgatagatctgaagaagctagtgctctggtcataggagaggtagaagaaaaggttgccatagagggagctatttgtgttacagggatgaatccatcgggaaacaactcagcaactgtaatggaggcagatgaaagaaatgcagttccaaaagaatttggaagggctgccaaggaagtaattgaagctgtgccccagagccaacatgaagttaatgcaggtgttataaacaattctcatgatgtggtggctttacctgaggaggcccatccagttcagcccacaaataattctggtggatgtcccgtggtatcttgcataatggaagacagtaaagttgctggagattcgggcaaaattgattatgaatatttttgtgattttgttgaggaacagagggagattccttgtgtacaagagatttctggagaaaacagtcgaatgggtgagaaagagagagaagaaacctcccatgaatctcctcaactagagattgtagaatgtgtgcaagacatcgttcttagggaaacagactatgatgttaatcaaaagatagtttatccagcagtggaggatgtagcaacttccgatagtatgagtacatctcttctgggtgttcctgaaccagaaaatgcagaactcaataaacatccttatctagcaattaaagatgaggaagatatacccatggaagctgcacgaggagaagtagcagaaatggaacaaattagtacttctgcaaagggaggtgccgaggagcatggggacttttctgaacttgatcacatgggccgagcagatgctaaattgcatttacacttaaattctgaagtgcctgagaaaattgatgaaatagagtgtaaagaagtcgctggcactatgagactaactgggagatattctgatcagaagcttggagatgtgcctgaagttgggtacacagaagatgaaaacattagggggctggtagtgaacacaagtgataggaaaccttcagaagtctctcaagtcgagcctgcaaaactggaacattctaaggatctggtgaaagaggaaacagacaaatccgaaaatattcctggattagaatgtataggattggaggaaactcgtggagatttgatggaagagtgtgcaaataccaagtctgataatgttcccgaattagaaaatacaggattaggaggaactcatgggccaatagaggatactgatggtagactgaaggaaattcatgatgtcaatgcagaactggataaacacaatgtgcatgagagcgatattgatagatccgaggacatcatgcaaatcgatccactaacacaggataaagctacgtggctggcgaaggaagaaactgaagataaaactacaaaagttcaagaagtaaagtatgaacaattaagaaatgagccaccgattcaagaggattccaaggaaaagccctgtgctgatagcaaggatctatcagagaatgttgtagttcagtccaaagaggtagataaattgaaacaagcaggagagggttgccaggcgttaatggagaaagacatggagaatgctagtggtgcttttgtactagaacagacagaagatggacacagaaaatcattgatagagacaagtataaataacgatagtgaaattactctagtcgagcagttggatggacaaagtgagagtcttacgaggacaggtactgtggaaattcatggagaaaccattaaagcacaagacaatgagttctataaggatgtggtagaagattcaaatgactcaaccaatgaaaaggatgtggtagaagattcaaacgaatcaatcaatgctaagatgccatgtagttcagctactgtacagttaaaagaagataagatggaagtttttcatgaaggcaagatggaggagccatgtgctcaggatgctgaactgagtaatcagagggaaccatcatctgatgcaactgctatggagattgaggcagtggctctggaacaggacagcagaatcatatgcaaaaacatggaggcaacaacagtggaaggcagccacacactggatagtggactaagttccgatctagccaaggttaatgaaactcatgctgcacgggaaattaaaaaccaggaagttttggatgtggacatgaaagtagcaatgagtgtttgtggtgaatatcaaattaactcaattggtatggaggatgtcaaatctaccaaaggatcacagaaccaagaatgtttggaccagaaagaagaccatataatggaggaaagagtggagtgtgaagtaagagaaggaagtggagtatcctatgaagaggcatgtgagctcggtggtggtagagtgaaagcctctggagttgcagtggatgttagtggtccagtgctaaacaaggaggcctgcaacacagaggagttgcaggcaagggaggataagaagcgtcatggagttgggcatgtgaatgagaagagggttttggaagaaactagtatgattgatactggtgaattgaaatctgattcgactgttatggagattagcatggctgggttaagacaaggaacactcaaccaatgtgcttcaagttcggagaaggaagaagcagtgcaggagaagcatgatcagggattggtagatgaaaacacaaacagaggttcagctgacaatgatgcacttgaatgtggtggagtgaatcctgatgtggccataacaatgtttcatgaaactattcttacaacagaagctgtcaatatagctgggtctaaaatttcgtctgagaaccagcaaaaggaagcaccctttgaagtacactctataacagaagtcgaaggttctgaatcaaatgaatcatcaagaaaggagcctgaaggagctcttgctcttccacaagagcctggcaacctggtaaaagttaaacaagaaagtttggagaatgaaaccgagatgtccatttttagggagaatgacaaagtttctggaaaagatcaggcatcagcagagtttataattgatccttcaaatacggatgaacggagggagaatgatattgggcggcccgatgaatcagcaaaaggctgtgaaaggttaacttctgattctataaacacagttcactccaaatttggcaagtctagtaatgaagaggataagagaacacagaacaccaggtctacggatccaaaagatataaaggaatcattgggtagaattcgtgccgaaccatcaaacagggtacacacaaccagtgttgggtattactctcagcatgcagctcatgatccgatttcatcttgtaaggagatcaaagtgcctttgcgagacggtgcaagggattctggaagggaccgtgcactggagttagtggttacaagtccacgagaagagactcctcgatggaggcaagaacagtacgcacttcagattttagaagacgttcaaaattcccgaattgctgagagatctaggatggagatggagatcagagtactgaaggcacaagtcagtagcatggagagacaagtgatgaacctggatcacttctctgaggtcaagtccagatctagtttgaaccaacaaatggtacatttgcacaaaccatacttctgaaactgtaatgggtttaaattttttgaaataaacacaaatccatgcaagttctctgtcccatcatcgactacctacctcctggaagtcggattgttttactcttaggaatcagttcatttcacagggaaatcggaaaaaaatatcagcattccaaaggggtctaggtcttggatggtcagccatttttattatgtacaaatgcagtagaagatgaggaacttcatagtatgtttatgaactcgcaactacttagaccgcatattagtgtgaagcgagtctcattttgtttctagaagtgaagttgaattccattagttgtcagcattcacctgttctataggagctgccgtccagactccaggacttgtgaaagaatataaggggtaagatcgtcaatgcacatggccatacaatggcagaagagcaatgaggacacaagattgaatttaaaatggggaactggcaacaaatcgaactactggccgtgtttttttatataaaaaactggctgttgagtgttgacggcaaacgggagaagcccaatgtttcgattggcagaacggcaaaattctggcctgctggctgatttcgacgcaccaaagccaacgttccttgcagtcttcctttcatgtagaaattctactctacctttttgaactaatctccttgtcctattttctttcttgaactctaaaaccatacattttagcctccaaattagggatggttcatgattttttattcagatgtaaaatttgtggtcttctttcttccattgtgaataaatatgatataaaagttgtcatgc

SEQ ID NO: 216427 - DNA, 6437 bp, Zea Mays
ccgacactcccgaaacccagcccaggccgccgccgccgccatggcctccgacgacggcgacaaggacatcctcctcctcgtccaccaggtcccactcgacatggaggatgtgccagcgccccgcctggcgcacctcctcgccccgctccaccgcgcgcctccaccgcccccgcctccccccttccgctcgccgcccccgccccaggccgccgcttccgccgagcaccgcctctcattccgcggctggctcggcatcccccgccactgggacgactgggtcgccaagctccggcccctccacgcccgcctctggcgccgcctcggcatccacgacgccgtccttgcctccaccctccgcttcaagcgcgacgcctccgccatcctccatctcgcctccttctggtcccctgccaccgccaccttcgccttcccctggggggaggccactgtcaccctccaggacgtcgccctcctcgccggcttccccgccctcggcgccccggccacggccccgctcccgccccagtggcgccccgacgaggccgccctcaatggcgtgcgcctcggcttcaaccgcagcgcctgcaagaaggcgcaccactccgcctgggtaaaacacttcctcaccgacgataacgcggacacagtcttcgagcacgccgccttcctcgcgctctggctcacgcgcttcgtcctcccgggtcatccggagtccaccatgcgccaggccgtcttccccatcgccgtccgcctcgcgcgcggggaccgcgttgccctcgcgcccgccgtccttgcctcgatctaccgggacctccgcgagatcaaggccttcctcatcgccacgggcgccgccgccaccaccggcaacgccgatatgatctcctccttatccgtctactcgccactctacattcttcagctctggatgtgggagcgcttccctgccctcaggccagcaaaggtgaacccactcgttgatggcgatccgcttgccgctcggtggcatgatctgagcaggaagctgaacccggcgcagatacgtgaggccctcagcacaggatgcaactttgtgtggcagccttatgtcagctccatggagcacactgggtgggttcacagcagtgatctagccgaggatgatgaactggcatcgctcgcacaatttttgcacccctgtgagctcgtagggatggattgcattgagcagtacctcccgcaccgtgttgccagacagtttggactggaccaagatgtgcctgcagatgttcaccgtgccaaccaggattgggcgattgcttggcagacctaccagctggaaggtaagaatgtggctttcttcatccctcactctgagcctgggatcacaacacggtatgcacagtggtggaggcagcaacttctgccttctggcattgatgctgctacagcaagtgctccagtagagtggaagacttccaagcgcaaggtgaaaaagacaccagcggccatggaagctgaagctgagaaggagcgtaagatgaagaaggcccgggtctctcctacttatactgataaaaagcgcaaacttgaagagttgtatgatgctaagttgtcggattggcttccaactgcaaggaatgagattagtgacaccactagtgatatggaatcggaggaggccttattgcctaatgttggaactacaaatgatgatattgtgctactcatgccaaggaagcagacaacgactgcacctgtaagggcattgatggataatgacatgatcctggctctaggagagagaggaaactttatggttgatgagcctccagacatccaaagtgaacctgaagctgttgtccctgcaacgctggatgaggaaatagttaaaattcctgaggttatttctcttgatattccagataagccagaagaaggagccactgcagtaatggaggagcagaaggaagctactagtgtatctgatagatctgaagaagctagtgctctggtcataggagaggtagaagaaaaggttgccatagagggagctatttgtgttacagggatgaatccatcgggaaacaactcagcaactgtaatggaggcagatgaaagaaatgcagttccaaaagaatttggaagggctgccaaggaagtaattgaagctgtgccccagagccaacatgaagttaatgcaggtgttataaacaattctcatgatgtggtggctttacctgaggaggcccatccagttcagcccacaaataattctggtggatgtcccgtggtatcttgcataatggaagacagtaaagttgctggagattcgggcaaaattgattatgaatatttttgtgattttgttgaggaacagagggagattccttgtgtacaagagatttctggagaaaacagtcgaatgggtgagaaagagagagaagaaacctcccatgaatctcctcaactagagattgtagaatgtgtgcaagacatcgttcttagggaaacagactatgatgttaatcaaaagatagtttatccagcagtggaggatgtagcaacttccgatagtatgagtacatctcttctgggtgttcctgaaccagaaaatgcagaactcaataaacatccttatctagcaattaaagatgaggaagatatacccatggaagctgcacgaggagaagtagcagaaatggaacaaattagtacttctgcaaagggaggtgccgaggagcatggggacttttctgaacttgatcacatgggccgagcagatgctaaattgcatttacacttaaattctgaagtgcctgagaaaattgatgaaatagagtgtaaagaagtcgctggcactatgagactaactgggagatattctgatcagaagcttggagatgtgcctgaagttgggtacacagaagatgaaaacattagggggctggtagtgaacacaagtgataggaaaccttcagaagtctctcaagtcgagcctgcaaaactggaacattctaaggatctggtgaaagaggaaacagacaaatccgaaaatattcctggattagaatgtataggattggaggaaactcgtggagatttgatggaagagtgtgcaaataccaagtctgataatgttcccgaattagaaaatacaggattaggaggaactcatgggccaatagaggatactgatggtagactgaaggaaattcatgatgtcaatgcagaactggataaacacaatgtgcatgagagcgatattgatagatccgaggacatcatgcaaatcgatccactaacacaggataaagctacgtggctggcgaaggaagaaactgaagataaaactacaaaagttcaagaagtaaagtatgaacaattaagaaatgagccaccgattcaagaggattccaaggaaaagccctgtgctgatagcaaggatctatcagagaatgttgtagttcagtccaaagaggtagataaattgaaacaagcaggagagggttgccaggcgttaatggagaaagacatggagaatgctagtggtgcttttgtactagaacagacagaagatggacacagaaaatcattgatagagacaagtataaataacgatagtgaaattactctagtcgagcagttggatggacaaagtgagagtcttacgaggacaggtactgtggaaattcatggagaaaccattaaagcacaagacaatgagttctataaggatgtggtagaagattcaaatgactcaaccaatgaaaaggatgtggtagaagattcaaacgaatcaatcaatgctaagatgccatgtagttcagctactgtacagttaaaagaagataagatggaagtttttcatgaaggcaagatggaggagccatgtgctcaggatgctgaactgagtaatcagagggaaccatcatctgatgcaactgctatggagattgaggcagtggctctggaacaggacagcagaatcatatgcaaaaacatggaggcaacaacagtggaaggcagccacacactggatagtggactaagttccgatctagccaaggttaatgaaactcatgctgcacgggaaattaaaaaccaggaagttttggatgtggacatgaaagtagcaatgagtgtttgtggtgaatatcaaattaactcaattggtatggaggatgtcaaatctaccaaaggatcacagaaccaagaatgtttggaccagaaagaagaccatataatggaggaaagagtggagtgtgaagtaagagaaggaagtggagtatcctatgaagaggcatgtgagctcggtggtggtagagtgaaagcctctggagttgcagtggatgttagtggtccagtgctaaacaaggaggcctgcaacacagaggaggcaagggaggataagaagcgtcatggagttgggcatgtgaatgagaagagggttttggaagaaactagtatgattgatactggtgaattgaaatctgattcgactgttatggagattagcatggctgggttaagacaaggaacactcaaccaatgtgcttcaagttcggagaaggaagaagcagtgcaggagaagcatgatcagggattggtagatgaaaacacaaacagaggttcagctgacaatgatgcacttgaatgtggtggagtgaatcctgatgtggccataacaatgtttcatgaaactattcttacaacagaagctgtcaatatagctgggtctaaaatttcgtctgagaaccagcaaaaggaagcaccctttgaagtacactctataacagaagtcgaaggttctgaatcaaatgaatcatcaagaaaggagcctgaaggagctcttgctcttccacaagagcctggcaacctggtaaaagttaaacaagaaagtttggagaatgaaaccgagatgtccatttttagggagaatgacaaagtttctggaaaagatcaggcatcagcagagtttataattgatccttcaaatacggatgaacggagggagaatgatattgggcggcccgatgaatcagcaaaaggctgtgaaaggttaacttctgattctataaacacagttcactccaaatttggcaagtctagtaatgaagaggataagagaacacagaacaccaggtctacggatccaaaagatataaaggaatcattgggtagaattcgtgccgaaccatcaaacagggtacacacaaccagtgttgggtattactctcagcatgcagctcatgatccgatttcatcttgtaaggagatcaaagtgcctttgcgagacggtgcaagggattctggaagggaccgtgcactggagttagtggttacaagtccacgagaagagactcctcgatggaggcaagaacagtacgcacttcagattttagaagacgttcaaaattcccgaattgctgagagatctaggatggagatggagatcagagtactgaaggcacaagtcagtagcatggagagacaagtgatgaacctggatcacttctctgaggtcaagtccagatctagtttgaaccaacaaatggttattccgaacctcctcccattatactgaatgattggatgcatgacggtgctagggcatgtctgggttatgcctgaatcctgatgacatgactaaactgcccaaggtgtcactagctcaaatcgatggtagttctgctgtctatcttttagattgacgataagctcggataatttggaacttctgtgcaccacatataaggaatcagttcatttcacagggaaatcggaaaaaaatatcagcattccaaaggggtctaggtcttggatggtcagccatttttattatgtacaaatgcagtagaagatgaggaacttcatagtatgtttatgaactcgcaactacttagaccgcatattagtgtgaagcgagtctcattttgtttctagaagtgaagttgaattccattagttgtcagcattcacctgttctataggagctgccgtccagactccaggacttgtgaaagaatataaggggtaagatcgtcaatgcacatggccatacaatggcagaagagcaatgaggacacaagattgaatttaaaatggggaactggcaacaaatcgaactactggccgtgtttttttatataaaaaactggctgttgagtgttgacggcaaacgggagaagcccaatgtttcgattggcagaacggcaaaattctggcctgctggctgatttcgacgcaccaaagccaacgttccttgcagtcttcctttcatgtagaaattctactctacctttttgaactaatctccttgtcctattttctttcttgaactctaaaaccatacattttagcctccaaattagggatggttcatgattttttattcagatgtaaaatttgtggtcttctttcttccattgtgaataaatatgatataaaagttgtcatgc

SEQ ID NO: 216428 - DNA, 6688 bp, Zea Mays
gccgccgccgccgccatggcctccgacgacggcgacaaggacatcctcctcctcgtccaccaggtcccactcgacatggaggatgtgccagcgccccgcctggcgcacctcctcgccccgctccaccgcgcgcctccaccgcccccgcctccccccttccgctcgccgcccccgccccaggccgccgcttccgccgagcaccgcctctcattccgcggctggctcggcatcccccgccactgggacgactgggtcgccaagctccggcccctccacgcccgcctctggcgccgcctcggcatccacgacgccgtccttgcctccaccctccgcttcaagcgcgacgcctccgccatcctccatctcgcctccttctggtcccctgccaccgccaccttcgccttcccctggggggaggccactgtcaccctccaggacgtcgccctcctcgccggcttccccgccctcggcgccccggccacggccccgctcccgccccagtggcgccccgacgaggccgccctcaatggcgtgcgcctcggcttcaaccgcagcgcctgcaagaaggcgcaccactccgcctgggtaaaacacttcctcaccgacgataacgcggacacagtcttcgagcacgccgccttcctcgcgctctggctcacgcgcttcgtcctcccgggtcatccggagtccaccatgcgccaggccgtcttccccatcgccgtccgcctcgcgcgcggggaccgcgttgccctcgcgcccgccgtccttgcctcgatctaccgggacctccgcgagatcaaggccttcctcatcgccacgggcgccgccgccaccaccggcaacgccgatatgatctcctccttatccgtctactcgccactctacattcttcagctctggatgtgggagcgcttccctgccctcaggccagcaaaggtgaacccactcgttgatggcgatccgcttgccgctcggtggcatgatctgagcaggaagctgaacccggcgcagatacgtgaggccctcagcacaggatgcaactttgtgtggcagccttatgtcagctccatggagcacactgggtgggttcacagcagtgatctagccgaggatgatgaactggcatcgctcgcacaatttttgcacccctgtgagctcgtagggatggattgcattgagcagtacctcccgcaccgtgttgccagacagtttggactggaccaagatgtgcctgcagatgttcaccgtgccaaccaggattgggcgattgcttggcagacctaccagctggaaggtaagaatgtggctttcttcatccctcactctgagcctgggatcacaacacggtatgcacagtggtggaggcagcaacttctgccttctggcattgatgctgctacagcaagtgctccagtagagtggaagacttccaagcgcaaggtgaaaaagacaccagcggccatggaagctgaagctgagaaggagcgtaagatgaagaaggcccgggtctctcctacttatactgataaaaagcgcaaacttgaagagttgtatgatgctaagttgtcggattggcttccaactgcaaggaatgagattagtgacaccactagtgatatggaatcggaggaggccttattgcctaatgttggaactacaaatgatgatattgtgctactcatgccaaggaagcagacaacgactgcacctgtaagggcattgatggataatgacatgatcctggctctaggagagagaggaaactttatggttgatgagcctccagacatccaaagtgaacctgaagctgttgtccctgcaacgctggatgaggaaatagttaaaattcctgaggttatttctcttgatattccagataagccagaagaaggagccactgcagtaatggaggagcagaaggaagctactagtgtatctgatagatctgaagaagctagtgctctggtcataggagaggtagaagaaaaggttgccatagagggagctatttgtgttacagggatgaatccatcgggaaacaactcagcaactgtaatggaggcagatgaaagaaatgcagttccaaaagaatttggaagggctgccaaggaagtaattgaagctgtgccccagagccaacatgaagttaatgcaggtgttataaacaattctcatgatgtggtggctttacctgaggaggcccatccagttcagcccacaaataattctggtggatgtcccgtggtatcttgcataatggaagacagtaaagttgctggagattcgggcaaaattgattatgaatatttttgtgattttgttgaggaacagagggagattccttgtgtacaagagatttctggagaaaacagtcgaatgggtgagaaagagagagaagaaacctcccatgaatctcctcaactagagattgtagaatgtgtgcaagacatcgttcttagggaaacagactatgatgttaatcaaaagatagtttatccagcagtggaggatgtagcaacttccgatagtatgagtacatctcttctgggtgttcctgaaccagaaaatgcagaactcaataaacatccttatctagcaattaaagatgaggaagatatacccatggaagctgcacgaggagaagtagcagaaatggaacaaattagtacttctgcaaagggaggtgccgaggagcatggggacttttctgaacttgatcacatgggccgagcagatgctaaattgcatttacacttaaattctgaagtgcctgagaaaattgatgaaatagagtgtaaagaagtcgctggcactatgagactaactgggagatattctgatcagaagcttggagatgtgcctgaagttgggtacacagaagatgaaaacattagggggctggtagtgaacacaagtgataggaaaccttcagaagtctctcaagtcgagcctgcaaaactggaacattctaaggatctggtgaaagaggaaacagacaaatccgaaaatattcctggattagaatgtataggattggaggaaactcgtggagatttgatggaagagtgtgcaaataccaagtctgataatgttcccgaattagaaaatacaggattaggaggaactcatgggccaatagaggatactgatggtagactgaaggaaattcatgatgtcaatgcagaactggataaacacaatgtgcatgagagcgatattgatagatccgaggacatcatgcaaatcgatccactaacacaggataaagctacgtggctggcgaaggaagaaactgaagataaaactacaaaagttcaagaagtaaagtatgaacaattaagaaatgagccaccgattcaagaggattccaaggaaaagccctgtgctgatagcaaggatctatcagagaatgttgtagttcagtccaaagaggtagataaattgaaacaagcaggagagggttgccaggcgttaatggagaaagacatggagaatgctagtggtgcttttgtactagaacagacagaagatggacacagaaaatcattgatagagacaagtataaataacgatagtgaaattactctagtcgagcagttggatggacaaagtgagagtcttacgaggacaggtactgtggaaattcatggagaaaccattaaagcacaagacaatgagttctataaggatgtggtagaagattcaaatgactcaaccaatgaaaaggatgtggtagaagattcaaacgaatcaatcaatgctaagatgccatgtagttcagctactgtacagttaaaagaagataagatggaagtttttcatgaaggcaagatggaggagccatgtgctcaggatgctgaactgagtaatcagagggaaccatcatctgatgcaactgctatggagattgagtggctctggaacaggacagcagaatcatatgcaaaaacatggaggcaacaacagtggaaggcagccacacactggatagtggactaagttccgatctagccaaggttaatgaaactcatgctgcacgggaaattaaaaaccaggaagttttggatgtggacatgaaagtagcaatgagtgtttgtggtgaatatcaaattaactcaattggtatggaggatgtcaaatctaccaaaggatcacagaaccaagaatgtttggaccagaaagaagaccatataatggaggaaagagtggagtgtgaagtaagagaaggaagtggagtatcctatgaagaggcatgtgagctcggtggtggtagagtgaaagcctctggagttgcagtggatgttagtggtccagtgctaaacaaggaggcctgcaacacagaggaggcaagggaggataagaagcgtcatggagttgggcatgtgaatgagaagagggttttggaagaaactagtatgattgatactggtgaattgaaatctgattcgactgttatggagattagcatggctgggttaagacaaggaacactcaaccaatgtgcttcaagttcggagaaggaagaagcagtgcaggagaagcatgatcagggattggtagatgaaaacacaaacagaggttcagctgacaatgatgcacttgaatgtggtggagtgaatcctgatgtggccataacaatgtttcatgaaactattcttacaacagaagctgtcaatatagctgggtctaaaatttcgtctgagaaccagcaaaaggaagcaccctttgaagtacactctataacagaagtcgaaggttctgaatcaaatgaatcatcaagaaaggagcctgaaggagctcttgctcttccacaagagcctggcaacctggtaaaagttaaacaagaaagtttggagaatgaaaccgagatgtccatttttagggagaatgacaaagtttctggaaaagatcaggcatcagcagagtttataattgatccttcaaatacggatgaacggagggagaatgatattgggcggcccgatgaatcagcaaaaggctgtgaaaggttaacttctgattctataaacacagttcactccaaatttggcaagtctagtaatgaagaggataagagaacacagaacaccaggtctacggatccaaaagatataaaggaatcattgggtagaattcgtgccgaaccatcaaacagggtacacacaaccagtgttgggtattactctcagcatgcagctcatgatccgatttcatcttgtaaggagatcaaagtgcctttgcgagacggtgcaagggattctggaagggaccgtgcactggagttagtggttacaagtccacgagaagagactcctcgatggaggcaagaacagtacgcacttcagattttagaagacgttcaaaattcccgaattgctgagagatctaggatggagatggagatcagagtactgaaggcacaagtcagtagcatggagagacaagtgatgaacctggatcacttctctgaggtcaagtccagatctagtttgaaccaacaaatggtacatttgcacaaaccatacttctgaaactgtaatgggtttaaattttttgaaataaacacaaatccatgcaagttctctgtcccatcatcgactacctacctcctggaagtcggattgttttactcttaggtgagttccattttaaagtttaactctagcaaagaaaggtcctgcattctatcctaactcaaataatataagcgtcttgtttatgtgtaaagcaatccagtaggaagacggcatttttggtgaatttctgatgcaaatttcagtacaggttattccgaacctcctcccattatactgaatgattggatgcatgacggtgctagggcatgtctgggttatgcctgaatcctgatgacatgactaaactgcccaaggtgtcactagctcaaatcgatggtagttctgctgtctatcttttagattgacgataagctcggataatttggaacttctgtgcaccacatataaggaatcagttcatttcacagggaaatcggaaaaaaatatcagcattccaaaggggtctaggtcttggatggtcagccatttttattatgtacaaatgcagtagaagatgaggaacttcatagtatgtttatgaactcgcaactacttagaccgcatattagtgtgaagcgagtctcattttgtttctagaagtgaagttgaattccattagttgtcagcattcacctgttctataggagctgccgtccagactccaggacttgtgaaagaatataaggggtaagatcgtcaatgcacatggccatacaatggcagaagagcaatgaggacacaagattgaatttaaaatggggaactggcaacaaatcgaactactggccgtgtttttttatataaaaaactggctgttgagtgttgacggcaaacgggagaagcccaatgtttcgattggcagaacggcaaaattctggcctgctggctgatttcgacgcaccaaagccaacgttccttgcagtcttcctttcatgtagaaattctactctacctttttgaactaatctccttgtcctattttctttcttgaactctaaaaccatacattttagcctccaaattagggatggttcatgattttttattcagatgtaaaatttgtggtcttctttcttccattgtgaataaatatgatataaaagttgtcatgc

SEQ ID NO: 216429 - DNA, 3303 bp, Zea Mays
ccacctccactcgcagctcctccatttccgcgcgtccgctccaccacaacgccccgcgaacccgtccccttcaaagcggtcacctcttcctccgaccctcgctagcttcgcctcccttctcctgcgtgccctactgcccttcacctctcgtaccccccctcccccgcctttcccgcaattccggctcacatgaccgtccgggccgcggccgtgctggtggccgccgccgtgctcgttctcctcctcccgggatgggcggcggcggagtggaatctcacgaagaaaggcagcgtcgtcacctacgatgggcgctctctcatgatcgacggcaagcgggacctcttcttctccggcgccatccactaccccaggagcccgcctgaggtgtggccgaagctgatcgagcgggctaaggagggcggcctcaacacgatcgagacgtacatattctggaacgcgcacgaacctgagcctggcaagtacaattttgaaggccggttcgacttgatcaagtacctcaagatgatccaggagcatgacatgtatgcaattgtgcgcatcgggcccttcatccaggcagaatggaaccatggtggtctgccttattggcttagagagatcgaccacataatattccgggcaaacaatgatccctacaagaaagaaatggagaaattcgtgagattcatagtgcagaagttgaaggatgctgagttatttgcatctcaaggaggacccatcattctaacacagatcgagaatgaatatgggaacataaaaaaagatcatgcaacagacggtgacaagtacctcgaatgggcagctcaaatggcgctcagcacacaaacaggagttccatggataatgtgcaagcagtcttcagctcctggtgaagtgattcagagcatatggcgatcaagtagctatgcgttcagctgaggacattgcatatgctgtgttacggttttttgcaaagggtgggtcattggttaactactacatgtatcacggaggaacaaattttggaaggactggggcttcttatgtgctgactgggtactatgatgaagctcccatggatgaatatggtatgtacaaggagcccaaatttgggcatctcagggacttgcacaatgtaataaggtcatatcagaaagcattcctcttggggaagcattcgtctgagatattgggtcatgggtatgaggttgggagcaacttcttcaatcattttggttcctggaaacttgtgttctctgacctacaaatcaatcttctttggtgttgtgattaattttctatgttgcaggcacacatctttgagttgcctgaagaaaatctttgcctctctttcctttccaacaataacacgggcgaagatggaacagtaatcttccgaggggagaagcactacgtgcctagccgttcagtctccattcttgcagggtgcaagaacgtggtttacaataccaagagggtgtttgtacaacacaatgaaaggtcataccatacctcagaggtaacaagcaagaataaccaatgggagatgtactcagaaaaaatcccgaagtaccgtgatactaaagtcaggatgaaggaacccctggagcaatttaaccaaaccaaggacgctagtgattacttatggtacaccacaagctttcgcttggagtcagacgatttgccttttagaaatgacatccggcctgtgcttcaggtcaaaagtagtgcacactcaatgatgggatttgccaatgatgctttcgtaggatgcgcacgcggaagcaagcaggtgaagggtttcatgtttgaaaaacccgttgatctgaaagtaggtgtgaaccatgttgtattgttgtcgtcaactatgggaatgaaggcgaaaaaaatatggctgtattgacgcaagctacaaacactttattttggaaaggacagtggtggtgaacttgctgaagtaaagagtggcattcaggagtgcctaatccagggtctgaacactgggacgttggatttacaagtcaatggctggggccataaggctgcactggaaggtgaggacaaggagatctactcagaaaaaggtgtgggcaaagttcagtggaaacctgccgagaacggccgggcagccacttggtataaggtaagttgaaccaggaatacgagcactataggttttggaaacatcaaacatccatttcaattttggttgcaaccctggcccttggtgtcactatgttcactgccatgctagagatacttcgatgagccagatggagatgatcccgttgtacttgacatgagctcaatggacaaaggaatgatttttgtgaatggtgaaggcgtgggtagatactgggtctcataccgaactcttgctggaactccttctcaagcactataccatattccgcgtcctttcttgaaatccaaggacaaccttttggttgtcttcgaggaggagatgggcaagccggatggcatcctcgtgcagacggtgacgagagacgacatatgtctgttcatctcggagcacaacccgggacagataaagacgtgggatacggatggtgacaaaatcaaactcattgcagaggatcacagcaggcggggcaccttgatgtgcccccctgagaagacaatccaagaagtcgtctttgccagcttcggcaacccagagggcatgtgcggcaacttcactgtaggcacttgccacactcccaatgcaaagcagatcgttgagaaggaatgcctcggcaagccatcctgcatgctgccggtggatcacacggtgtacggcgcggacatcaactgccaatcaacgactgctacactgggggtgcaggtgagatgcggaggcggcaagaagggtgcctgagaataacaagatggatgctgctaattaatggacgtttcagcttgtttgtttgttcatcccttcggtttggcactgatgcttacattgttctgacattgcaattgaaatgtgattggaacattcttgatcgggaactaacatgaaatgagtggagggtagatgctgatcagaccaaagatgtgtatttcccccctctttccttctgtctcgtgttgtttcatgtaaccatcacaatatatatagatgttgaataatcatgaccagtagtatagatcttagagcatccctaacttttgaataaaagactcttggagattggagctggactaactgattgcttcttgcaacatgtatatgaacatttcattaaaaaacgagcgatgagcaaaacaatataccctactaattaagatgttgcaaatgag

SEQ ID NO: 216430 - DNA, 906 bp, Zea Mays
aatatcttttgctgaatggtggaaaaaggtgcataagagcaagaggaaaggcttcaatagcctcataattttgggggcgtggtgcttgtggcttcttcgaaacaaagctgtttttgatggagcttgcagagttagctaattctgagcttcggatgtctgtatggacggatgatgtctacagctttatgcgctcgcaaaagaggcgtcgaattcaaagttctgacatttctcaagattttgatgcaatgagaaagcagctagtatcagatgctgcaagagtatgtaggtcaaaagttccggagtcgctgatggaaaatcttattaaacgcctgagatcatactttgaggacaaatatccaccaaaagcgtagtttttcatgcagcagttctttagaagctacttaggtgtcaattggatcttggtggtggtcaactccctaactcctcgcgcggcttaattttgaggacatttttgtattctttgctgagacagagacgaggtgttctaaattgcatgtacaaatatacttttcgttgttatccctgatgttataggtaccacaccaccatccccaccacttttctgtagaatgtagatccctttttatcctggcagattaaagcatgagtttatggtgtttttgacacgtatttttgccccgaccagacccagttttagtcaatgtttttcttttcattcttttttgtcctgattttggtttctgtctggccttgctcagcatggccttcttgtaaatatctttgctttcttcctatataatgatacgcagtgctcttgcgggatcgaaaaaaaatgttttgttatgggggttgattcaataacaacattttttagtttttggagcgtaatctccggaagcaaattgacttgacagtatatttatt

SEQ ID NO: 216431 - DNA, 1345 bp, Zea Mays
  misc_feature (1)..(2): n is a, c, g, or t
nntatgttctaccaaaggtaatgtactgatgcccttgaagaatggcaagactgcatcaggtccacttatcaagccgattcactttaagaacagtgcagcagaaaaggttatgtcaaatggcaaagtaaacctcacttcaaaaaacaatccagaggttaatggaactgctaaatcatcagaatcaaacagatgcaagactggacaatttgtgggacccagtaaaaataatgctgataatactatttcttgtggagagagaggccaacagtcagaaagaatacatgatgcaaatggaaatggccagtcaattcatcattcacagtattttggtgagatcagtaacggcaatgctatgcctacatctgctcaacaagagaccagtcatggcaatgccacgcccgcccgacaggagaccaataatagcaatggcacgcccgctcaacaggagaccagtaatggcaaggcctcacatgctgaacattattctgagcggtcatctcaccaagaagagcatgcaaacttctcaggaaacaaacgccgacttgaagaagataagtttcaggaaatgcttgcagagttagctaattctgagcttcggatgtctgtatggacggatgatgtctacagctttatgcgctcgcaaaagaggcgtcgaattcaaagttctgacatttctcaagattttgatgcaatgagctagtatcagatgctgcaagagtatgtaggtcaaaagttccggagtcgctgatggaaaatcttattaaacgcctgagatcatactttgaggacaaatatccaccaaaagcgtagtttttcatgcagcagttctttagaagctacttaggtgtcaattggatcttggtggtggtcaactccctaactcctcgcgcggcttaattttgaggacatttttgtattctttgctgagacagagacgaggtgttctaaattgcatgtacaaatatacttttcgttgttatccctgatgttataggtaccacaccaccatccccaccacttttctgtagaatgtagatccctttttatcctggcagattaaagcatgagtttatggtgtttttgacacgtatttttgccccgaccagacccagttttagtcaatgtttttcttttcattcttttttgtcctgattttggtttctgtctggccttgctcagcatggccttcttgtaaatatctttgctttcttcctatataatgatacgcagtgctcttgcgggatcgaaaaaaaatgttttgttatgggggttgattcaataacaacattttttagtttttggagcgtaatctccggaagcaaattgacttgacagtatatttatt

SEQ ID NO: 216432 - DNA, 4372 bp, Zea Mays
ctcgacctcctcccccatgaccacgaccatgcgccgtttcaacctcggcacttctgcagaaccgtccacgccccgcatgcccgcatcctccacctcttcccgtccaactccgttcccacctggcctagaactgcagacggccaagactggcgatgcttctcagatccatgctcatcaccgctcgctcacctacctcccagtacctcctccttccgtaataacctggcgtgcagcgtggtgctcctcggcaccgccgccacctaccccaacagcgggcgctctgacaacggcgaccgtggcggtgcaggtgtaggggctggggagtttgtgccctgccggatccagttgatcgcagaggtttccctcgctaagctcttcgcagacttcgccagcccagtcgacacgtctgcgctgatgcagcagaactcgcctcccaccttgtccaagtcgcccgtgccggagagggagaccatcccgccgcaagagacgctaggcggcggcgacgacaacatagatcccgtcgatccacgtgagagtgttacaggctccgaggaacccggcttgccagaagctgccgttatgaggaaggacatggcggcggtttccaacaaggatggcttgcccaccaggaaggatgacgacgaggatgcaacgtccgagcccaccaccaagccatgtgactggcataacaaatcaataacttgagatacatttcacaagcttagtcccataggttgtaacagataatgtgctaatgtccagcatgatgagtttctatgagcactagctgtgctgagttcatgtatgaggggcaccctcctcgagatcggcatgtcctactctagggcctccagtgtgcagctccttggaaaggaggaatccaatgggaagcggtgcagatcgaccaagcgcggtggcacgaaggacaacccgagaatggtggaaagaagcaggggaaggacaacgcaacgaagcccccctagctgcccaaggactacatccatgtctgggcaaggcgtggcgagcaaggcatggcgaggcgatggactgtcacaacctcgtggagaggaccttgcaatggcgaatcaagggatagttacacatcgaggcttttcgaaatgctactcttctggctccctcctggctaagcagttgaagaatgtgaatgaacacaaatgtcaaatctatggtgacactgtcgggttcttagcaacaggcgatatttttgttgcgtgcaacgaatgtgccttccctgtgtgtcggtcacgctatgagtatgagcgcaaagaggggaatcaatgttgtcctcaatgcaaaactagatacaagaggcacaaagcactggttgcactgtacctttaccctttcttgaacactgtctacaaaacaagagagtatgagttcttgaggcttaccagcctgggtgtgatcgatgctcttgtgaaggtaagaaatttaagacaactaagaagggctatagatttctattggagtgtcgggaggtgtgtaggttatcaatttggaattttggatacatattccagtcttgctgattaaataatctaactgagattttaaatcctgtgcatccctatgtaaacatcaatagctgtttgaagatgtgacagtgatgtattttgatgaaggcttgaaattcatttgtttttcttttatagcagatatatttttaaaaataaagctcaacctttttcctgggaatatatatagttcgatgatcatgaagtcagttgtgtttctgctgagttatgaaatgattcctttgtgtctgtgtgctattaatatgagcaatgagctttcgaaatggtatttaccaacctactcgaccattaatgaaaacacaattaatcttttatgttttctctatgccgactactcaattagtgcgctcctttcttgttctattctccatatatcgtgattgctatttgagatatcaagctatttcagtgatcagaactggagatgatcaagtggtgagctattaacttgctctaatgtcatgattggagttagttattctcctatgattcctaagtcttaagcctctaatgatcctatctttatccttgtgcatcatattctgagcagcaatatactaaacaataggtgccattgtttctctttgaaaatctttatcctaatttatatgcttgagcttgggtcaggaattatagtggtcagtttagatatctatggatttttgacatctcccttcgtttttatttagatatcatatttgtcttagtgcacagacaaggatgagattaacgctgagttaatacttgttttttctgctccgtgcaattgatgctgcatcatactcagtactcacgctcgcatgctcacctgcatgcagatttaatttttcgtggaaggaacagagggagtattagtcaataaacagcaaatttatagacatttatattttcttggctcctggactagagttttaatgttgcatttagtttatggggtacctgctttttctctaactttaacctgattgtatgctaccttcctgaggtgtaagatattcacttaccatactgttgttttgcagccggttgttaggaagtgcaccgaaatgttgagtcgagcaatttgcatatctggcggcgatttttatgtacgcaggtttcataaggatggacctattgtttggaggttgttggctttatctccattccgacgtctgtcaaagatggatgaaaaagcaatcattttaccatatagggatacctcacttaactcagaggaacctatggctgagatctctagccaaaagattcagattgcagtcctggacatgatcgctgcaatatcttcgaacaagagaaatgttgttgcactagaaagcgtactaaagaagatgtgtactactcactaaaccaaagggaatctttacttcccgaccaagatctagccctggtatcagatcttttgccccctcaagtgtcttcgagagaatacctctttgtacagtatggaggtgagggtgtcaggtgtgatgtagacccctcatctgtttattatgtgttcagaaggatgcagggtgtgtgatcttgtgcgacctgaaaatcaggtagaatccacagctttccatctatattgacatgtttctctttcacatttcattacttaagaattctacttttttcaggttcctaatactgtgtatttgtaatcttgctgagtttttttggtcatgctagcaccctgtgtcacacattgaatataatatcacctgctacaaagaatggtaaactttttcatacgtgttctcgcactgaaaatcatcaaggttggtcacatgtctgaagaatgattatgacaagtctttaccactttgaccataattatattaaggtagaagtagtgtgctttcttcattccgcatatccactattaaccttatagatatctgtacattgtcgttgtaccatatgttttggtgaatctcgtctaacctcgagtacccttgaaatttttccagcaaacatcaggactcatgatgacaatgaaggatgtgatgagtttgtgtctgttaaccatataaggttgcacgttaagcatgcccctgacttgccggacgagcagcaagactttgggacctagattggctaaggcactaagaatagaatagcttttcaagaaaagagagacaacaactaacactgtactatgtaggggtgaaatagctagattaagataataaaatttatatatagctaggatcataaatggattacgaaacatttttatcttaacaatataacacatgtttatatataagttattatagtattatatatttccgttgcaacgcacgggcactcacctagtaagcaaagaattcaggggtgtgatcatttttggccgtggggacactccgaagcagcatgtggacctgctgcaccagcagctgcttcctcactcaggtatttcattccgtccacaacagtacagcacagtgcatcgatcttgaaatcaaaatccaacagcgacacaaaccgaatataatcgacaccaccgctcgctcacgacgccagggtggtgctggggcagttgtcgacgccgcaggccagaacgtcgcggtagtcgcgggagatggtgaagtggtcgtgcacgctgccatcccggctcttcttgtactccaacagcagcctcgtgtggttgaacgccgtcagcttcacgaacccaaagtcgcggtcccgcacgtggctccatcgcgcccgcgcggccgtgtagtcggcgaggctggcgccgccgccgcccaccacgacgtgcgtcgtcgccgtgaaggcgccggcgtagaggtcggaccccttggccacgcacgcgttctgcgttc

SEQ ID NO: 216433 - DNA, 3363 bp, Zea Mays
ctcgacctcctcccccatgaccacgaccatgcgccgtttcaacctcggcacttctgcagaaccgtccacgccccgcatgcccgcatcctccacctcttcccgtccaactccgttcccacctggcctagaactgcagacggccaagactggcgatgcttctcagatccatgctcatcaccgctcgctcacctacctcccagtacctcctccttccgtaataacctggcgtgcagcgtggtgctcctcggcaccgccgccacctaccccaacagcgggcgctctgacaacggcgaccgtggcggtgcaggtgtaggggctggggagtttgtgccctgccggatccagttgatcgcagaggtttccctcgctaagctcttcgcagacttcgccagcccagtcgacacgtctgcgctgatgcagcagaactcgcctcccaccttgtccaagtcgcccgtgccggagagggagaccatcccgccgcaagagacgctaggcggcggcgacgacaacatagatcccgtcgatccacgtgagagtgttacaggctccgaggaacccggcttgccagaagctgccgttatgaggaaggacatggcggcggtttccaacaaggatggcttgcccaccaggaaggatgacgacgaggatgcaacgtccgagcccaccaccaagccatgtgactggcataacaaatcaataacttgagatacatttcacaagcttagtcccataggttgtaacagataatgtgctaatgtccagcatgatgagtttctatgagcactagctgtgctgagttcatgtatgaggggcaccctcctcgagatcggcatgtcctactctagggcctccagtgtgcagctccttggaaaggaggaatccaatgggaagcggtgcagatcgaccaagcgcggtggcacgaaggacaacccgagaatggtggaaagaagcaggggaaggacaacgcaacgaagcccccctagctgcccaaggactacatccatgtctgggcaaggcgtggcgagcaaggcatggcgaggcgatggactgtcacaacctcgtggagaggggagaagattagctagcagatgaagccgctgcaggatctcgtgccgagttgcaacaaggtttgaattcagagtaaaatgtttctcattttgggtggtgggcaaggcagtgatgctcgatgaaatcataaactatgtgtagaccttgcaatggcgaatcaagggatagttacacatcgaggcttttcgaaatgctactcttctggctccctcctggctaagcagttgaagaatgtgaatgaacacaaatgtcaaatctatggtgacactgtcgggttcttagcaacaggcgatatttttgttgcgtgcaacgaatgtgccttccctgtgtgtcggtcacgctatgagtatgagcgcaaagaggggaatcaatgttgtcctcaatgcaaaactagatacaagaggcacaaaggaagccctcaagttcggggagatgaggaggatggagttgatttggacaatgaattaaactatacagtatacacaaggcaatgtccaagggcctgtgttgcagctgtggggataaggggagatgttgacatctcttcgtattctcgacatgaaccccatcactaaattccacgtctaacaactggacaacagcactggttgcactgtacctttaccctttcttgaacactgtctacaaaacaagagagtatgagttcttgaggcttaccagcctgggtgtgatcgatgctcttgtgaagccggttgttaggaagtgcaccgaaatgttgagtcgagcaatttgcatatctggcggcgatttttatgtacgcaggtttcataaggatggacctattgtttggaggttgttggctttatctccattccgacgtctgtcaaagatggatgaaaaagcaatcattttaccatatagggatacctcacttaactcagaggaacctatggctgagatctctagccaaaagattcagattgcagtcctggacatgatcgctgcaatatcttcgaacaagagaaatgttgttgcactagaaagcgtactaaagaagatgtgtactactcactaaaccaaagggaatctttacttcccgaccaagatctagccctggtatcagatcttttgccccctcaagtgtcttcgagagaatacctctttgtacagtatggaggtgagggtgtcaggtgtgatgtagacccctcatctgtttattatgtgttcagaaggatgcagggtgtgtgatcttgtgcgacctgaaaatcaggttcctaatactgtgtatttgtaatcttgctgagtttttttggtcatgctagcaccctgtgtcacacattgaatataatatcacctgctacaaagaatggtaaactttttcatacgtgttctcgcactgaaaatcatcaaggttggtcacatgtctgaagaatgattatgacaagtctttaccactttgaccataattatattaagcaaacatcaggactcatgatgacaatgaaggatgtgatgagtttgtgtctgttaaccatataaggttgcacgttaagcatgcccctgacttgccggacgagcagcaagactttgggacctagattggctaaggcactaagaatagaatagcttttcaagaaaagagagacaacaactaacactgtactatgtaggggtgaaatagctagattaagataataaaatttatatatagctaggatcataaatggattacgaaacatttttatcttaacaatataacacatgtttatatataagttattatagtattatatatttccgttgcaacgcacgggcactcacctagtaagcaaagaattcaggggtgtgatcatttttggccgtggggacactccgaagcagcatgtggacctgctgcaccagcagctgcttcctcactcaggtatttcattccgtccacaacagtacagcacagtgcatcgatcttgaaatcaaaatccaacagcgacacaaaccgaatataatcgacaccaccgctcgctcacgacgccagggtggtgctggggcagttgtcgacgccgcaggccagaacgtcgcggtagtcgcgggagatggtgaagtggtcgtgcacgctgccatcccggctcttcttgtactccaacagcagcctcgtgtggttgaacgccgtcagcttcacgaacccaaagtcgcggtcccgcacgtggctccatcgcgcccgcgcggccgtgtagtcggcgaggctggcgccgccgccgcccaccacgacgtgcgtcgtcgccgtgaaggcgccggcgtagaggtcggaccccttggccacgcacgcgttctgcgttc

SEQ ID NO: 216434 - DNA, 4331 bp, Zea Mays
ctcgacctcctcccccatgaccacgaccatgcgccgtttcaacctcggcacttctgcagaaccgtccacgccccgcatgcccgcatcctccacctcttcccgtccaactccgttcccacctggcctagaactgcagacggccaagactggcgatgcttctcagatccatgctcatcaccgctcgctcacctacctcccagtacctcctccttccgtaataacctggcgtgcagcgtggtgctcctcggcaccgccgccacctaccccaacagcgggcgctctgacaacggcgaccgtggcggtgcaggtgtaggggctggggagtttgtgccctgccggatccagttgatcgcagaggtttccctcgctaagctcttcgcagacttcgccagcccagtcgacacgtctgcgctgatgcagcagaactcgcctcccaccttgtccaagtcgcccgtgccggagagggagaccatcccgccgcaagagacgctaggcggcggcgacgacaacatagatcccgtcgatccacgtgagagtgttacaggctccgaggaacccggcttgccagaagctgccgttatgaggaaggacatggcggcggtttccaacaaggatggcttgcccaccaggaaggatgacgacgaggatgcaacgtccgagcccaccaccaagccatgtgactggcataacaaatcaataacttgagatacatttcacaagcttagtcccataggttgtaacagataatgtgctaatgtccagcatgatgagtttctatgagcactagctgtgctgagttcatgtatgaggggcaccctcctcgagatcggcatgtcctactctagggcctccagtgtgcagctccttggaaaggaggaatccaatgggaagcggtgcagatcgaccaagcgcggtggcacgaaggacaacccgagaatggtggaaagaagcaggggaaggacaacgcaacgaagcccccctagctgcccaaggactacatccatgtctgggcaaggcgtggcgagcaaggcatggcgaggcgatggactgtcacaacctcgtggagaggggagaagattagctagcagatgaagccgctgcaggatctcgtgccgagttgcaacaagaccttgcaatggcgaatcaagggatagttacacatcgaggcttttcgaaatgctactcttctggctccctcctggctaagcagttgaagaatgtgaatgaacacaaatgtcaaatctatggtgacactgtcgggttcttagcaacaggcgatatttttgttgcgtgcaacgaatgtgccttccctgtgtgtcggtcacgctatgagtatgagcgcaaagaggggaatcaatgttgtcctcaatgcaaaactagatacaagaggcacaaaggaagccctcaagttcggggagatgaggaggatggagttgatttggacaatgaattaaactatacagtatacacaaggcaatgtccaagggcctgtgttgcagctgtggggataaggggagatgttgacatctcttcgtattctcgacatgaaccccatcactaaattccacgtctaacaactggacaacagcactggttgcactgtacctttaccctttcttgaacactgtctacaaaacaagagagtatgagttcttgaggcttaccagcctgggtgtgatcgatgctcttgtgaaggtaagaaatttaagacaactaagaagggctatagatttctattggagtgtcgggaggtgtgtaggttatcaatttggaattttggatacatattccagtcttgctgattaaataatctaactgagattttaaatcctgtgcatccctatgtaaacatcaatagctgtttgaagatgtgacagtgatgtattttgatgaaggcttgaaattcatttgtttttcttttatagcagatatatttttaaaaataaagctcaacctttttcctgggaatatatatagttcgatgatcatgaagtcagttgtgtttctgctgagttatgaaatgattcctttgtgtctgtgtgctattaatatgagcaatgagctttcgaaatggtatttaccaacctactcgaccattaatgaaaacacaattaatcttttatgttttctctatgccgactactcaattagtgcgctcctttcttgttctattctccatatatcgtgattgctatttgagatatcaagctatttcagtgatcagaactggagatgatcaagtggtgagctattaacttgctctaatgtcatgattggagttagttattctcctatgattcctaagtcttaagcctctaatgatcctatctttatccttgtgcatcatattctgagcagcaatatactaaacaataggtgccattgtttctctttgaaaatctttatcctaatttatatgcttgagcttgggtcaggaattatagtggtcagtttagatatctatggatttttgacatctcccttcgtttttatttagatatcatatttgtcttagtgcacagacaaggatgagattaacgctgagttaatacttgttttttctgctccgtgcaattgatgctgcatcatactcagtactcacgctcgcatgctcacctgcatgcagatttaatttttcgtggaaggaacagagggagtattagtcaataaacagcaaatttatagacatttatattttcttggctcctggactagagttttaatgttgcatttagtttatggggtacctgctttttctctaactttaacctgattgtatgctaccttcctgaggtgtaagatattcacttaccatactgttgttttgcagccggttgttaggaagtgcaccgaaatgttgagtcgagcaatttgcatatctggcggcgatttttatgtacgcaggtttcataaggatggacctattgtttggaggttgttggctttatctccattccgacgtctgtcaaagatggatgaaaaagcaatcattttaccatatagggatacctcacttaactcagaggaacctatggctgagatctctagccaaaagattcagattgcagtcctggacatgatcgctgcaatatcttcgaacaagagaaatgttgttgcactagaaagcgtactaaagaaggtctgtggccttgtggtaggcattgcctacagtagtttgacaggtttgcaggaagctactataagggcattggcaggccttgcctgcatggatgctgatcttgtctggcttctccttgcagatgtgtactactcactaaaccaaagggaatctttacttcccgaccaagatctagccctggtatcagatcttttgccccctcaagtgtcttcgagagaatacctctttgtacagtatggaggtgagggtgtcaggtgtgatgtagacccctcatctgtttattatgtgttcagaaggatgcagggtgtgtgatcttgtgcgacctgaaaatcagcaaacatcaggactcatgatgacaatgaaggatgtgatgagtttgtgtctgttaaccatataaggttgcacgttaagcatgcccctgacttgccggacgagcagcaagactttgggacctagattggctaaggcactaagaatagaatagcttttcaagaaaagagagacaacaactaacactgtactatgtaggggtgaaatagctagattaagataataaaatttatatatagctaggatcataaatggattacgaaacatttttatcttaacaatataacacatgtttatatataagttattatagtattatatatttccgttgcaacgcacgggcactcacctagtaagcaaagaattcaggggtgtgatcatttttggccgtggggacactccgaagcagcatgtggacctgctgcaccagcagctgcttcctcactcaggtatttcattccgtccacaacagtacagcacagtgcatcgatcttgaaatcaaaatccaacagcgacacaaaccgaatataatcgacaccaccgctcgctcacgacgccagggtggtgctggggcagttgtcgacgccgcaggccagaacgtcgcggtagtcgcgggagatggtgaagtggtcgtgcacgctgccatcccggctcttcttgtactccaacagcagcctcgtgtggttgaacgccgtcagcttcacgaacccaaagtcgcggtcccgcacgtggctccatcgcgcccgcgcggccgtgtagtcggcgaggctggcgccgccgccgcccaccacgacgtgcgtcgtcgccgtgaaggcgccggcgtagaggtcggaccccttggccacgcacgcgttctgcgttc

SEQ ID NO: 216435 - DNA, 2163 bp, Zea Mays
cagatgaagccgctgcaggatctcgtgccgagttgcaacaagtgatgctcgatgaaatcataaactatgtgtagaccttgcaatggcgaatcaagggatagttacacatcgaggcttttcgaaatgctactcttctggctccctcctggctaagcagttgaagaatgtgaatgaacacaaatgtcaaatctatggtgacactgtcgggttcttagcaacaggcgatatttttgttgcgtgcaacgaatgtgccttccctgtgtgtcggtcacgctatgagtatgagcgcaaagaggggaatcaatgttgtcctcaatgcaaaactagatacaagaggcacaaaggaagccctcaagttcggggagatgaggaggatggagttgatttggacaatgaattaaactatacagtatacacaaggcaatgtccaagggcctgtgttgcagctgtggggataaggggagatgttgacatctcttcgtattctcgacatgaaccccatcactaaattccacgtctaacaactggacaacagcactggttgcactgtacctttaccctttcttgaacactgtctacaaaacaagagagtatgagttcttgaggcttaccagcctgggtgtgatcgatgctcttgtgaagccggttgttaggaagtgcaccgaaatgttgagtcgagcaatttgcatatctggcggcgatttttatgtacgcaggtttcataaggatggacctattgtttggaggttgttggctttatctccattccgacgtctgtcaaagatggatgaaaaagcaatcattttaccatatagggatacctcacttaactcagaggaacctatggctgagatctctagccaaaagattcagattgcagtcctggacatgatcgctgcaatatcttcgaacaagagaaatgttgttgcactagaaagcgtactaaagaagatgtgtactactcactaaaccaaagggaatctttacttcccgaccaagatctagccctggtatcagatcttttgccccctcaagtgtcttcgagagaatacctctttgtacagtatggaggtgagggtgtcaggtgtgatgtagacccctcatctgtttattatgtgttcagaaggatgcagggtgtgtgatcttgtgcgacctgaaaatcaggttcctaatactgtgtatttgtaatcttgctgagtttttttggtcatgctagcaccctgtgtcacacattgaatataatatcacctgctacaaagaatggtaaactttttcatacgtgttctcgcactgaaaatcatcaagcaaacatcaggactcatgatgacaatgaaggatgtgatgagtttgtgtctgttaaccatataaggttgcacgttaagcatgcccctgacttgccggacgagcagcaagactttgggacctagattggctaaggcactaagaatagaatagcttttcaagaaaagagagacaacaactaacactgtactatgtaggggtgaaatagctagattaagataataaaatttatatatagctaggatcataaatggattacgaaacatttttatcttaacaatataacacatgtttatatataagttattatagtattatatatttccgttgcaacgcacgggcactcacctagtaagcaaagaattcaggggtgtgatcatttttggccgtggggacactccgaagcagcatgtggacctgctgcaccagcagctgcttcctcactcaggtatttcattccgtccacaacagtacagcacagtgcatcgatcttgaaatcaaaatccaacagcgacacaaaccgaatataatcgacaccaccgctcgctcacgacgccagggtggtgctggggcagttgtcgacgccgcaggccagaacgtcgcggtagtcgcgggagatggtgaagtggtcgtgcacgctgccatcccggctcttcttgtactccaacagcagcctcgtgtggttgaacgccgtcagcttcacgaacccaaagtcgcggtcccgcacgtggctccatcgcgcccgcgcggccgtgtagtcggcgaggctggcgccgccgccgcccaccacgacgtgcgtcgtcgccgtgaaggcgccggcgtagaggtcggaccccttggccacgcacgcgttctgcgttc

SEQ ID NO: 216436 - DNA, 2498 bp, Zea Mays
cggggattgagcaagcatcgggtgctttccgttacgttcctccctcccgtcctgtcctgacctcctcgtctcatcatacttcagacttcacacatcgatccccactcccccacggaagcgaagcgtacgctacgcgcactgccctccggcgaccgccccgccgctggcgggtcggattgggtccgatccggatctggatcagcaccggcatcgccgcgacggagatgccgaccccgaggcagcggcatacctccacctccggcgggggcggaggagggaggcgcgccgcctccgggtcggccatgctgccccccgtggtggtcctcgtgttcctcttcgtggtcgcgccttcgctcttcttcgtcgtgcgcaatgacggtcgcgcccacgcccacgtccacgtagcctccgatcgcaagggtaagaatggcaatcaggaagcagcagcaatgaagaacctcaaatctattttgcctaaggaggtgtttgatgctataactgctagtcaacaagaatcaggcacattgagtgttgatttttttaggaatcatgcatctccctcttggaaaactgatgatctagtcaccgagaagagcatggatgtcaatgacaatgctaaagctgaaaatagtttgctagaacattctgtgccaacaaatagatcacccaaagatccagatgaacatcaagttgacaaagcagcaaaagtagctcgaaggaaacttagggagaaaaggcgtgagaagagagcaatggatttggttcataaagatgatgaagcacgtattaagctggaaaatgctgccattgagcgatcaaaagctgtcgattctgctgtgcttggaaaatacagcatatggcgaaaagagaatgagaatgagaattcagactctacagttaggctgatgagggaccaaattattatggctcgtgtctattctacgcttgctaaatcaaagaacaagaacgatctatatcaaaaactgcagactcgaatcagagaaagccagcgggctgttggagaggctaatgctgatgctgacctgcatcacagcgcaccagaaaaaatcagagcaatgggtcaagttttatcaaaggctagagaagaactttatgattgtacggcaatcactcagagaataagggctatgcttcagtcagctgatgaacaggtcaggagcttgaagaagcagagtacatttcttagccagttggctgcaaagacaattccaaacagcattcactgcttgtctatgcgtttaacaattgattactatatcctgccccttgaggaacggaaattcccaaggagtgaaaatttagaaaacccaaatctctatcactatgcacttttctctgataatgttttggcagcctctgttgttgtgaactcaaccataatgaatgctaaggaaccagagaaacatgttttccatcttgtgactgacaagttaaactttggagccatgaacatgtggtttctgctgaacccacctggcaaggccaccatccatgttgagaatgtggacgaatttaagtggttgaactcatcatactgtcctgtgttgcggcaacttgagtctgctgccatgaaagagtactatttcaaagctgatcgtcccaccactctctcagcaggttcttcgaacctaaagtatcggaaccccaagtacctctctatgctgaaccacttgaggttctatctcccagaggtctatccaaagttggataagatactcttcctcgacgatgacatagttgtgcagaaagatttaacagggctgtgggatgttgatcttaatggaaaggtcaatggtgctgtggaaacctgtggggagagttttcaccgttttgacaaatatcttaatttttcaaatccacacattgctcggaactttgatccaaatgcatgtggctgggcttatgggatgaacatctttgatctgagggagtggaagaagaaagatattactgggatctaccacaaatggcaaaatatgaatgaagacagggtcctttggaagcttgggacacttccgcctggcctcttgaccttctataagttgacgcacccactggacaagtcatggcatgttcttggattaggatacaacccaagcattgaccgttcagagatagacaatgctgctgtggttcattacaatgggaacatgaagccatggctggagctagcaatgaccaagtaccgaccatattggaccaagtatatcaagtatgatcacccttacatccgtggatgcaacttgagtgagtagatagtcgtgctgaaaaactgacagatgaggaagagcttattggacagaagtgttccactaccatgtccttgcggtgcgttattcgactcagcaaagtggtgtggagcacgaggacagtggtcgacgactaatgtgaaggtcatgcgggcttgtgctgatggattgggagcggtgaagagcgaatgctgggtcttgactgatggaccggggcagctttgtgac

SEQ ID NO: 216437 - DNA, 2129 bp, Zea Mays
gaagaaacttagggagaaaaggcgtgagaagagagcaatggatttggttcataaagatgatgaagcacgtattaagctggaaaatgctgccattgagcgatcaaaagctgtcgattctgctgtgcttggaaaatacagcatatggcgaaaagagaatgagaatgagaattcagactctacagttaggctgatgagggaccaaattattatggctcgtgtctattctacgcttgctaaatcaaagaacaagaacgatctatatcaaaaactgcagactcgaatcagagaaagccagcgggctgttggagaggctaatgctgatgctgacctgcatcacagcgcaccagaaaaaatcagagcaatgggtcaagttttatcaaaggctagagaagaactttatgattgtacggcaatcactcagagaataagggctatgcttcagtcagctgatgaacaggtcaggagcttgaagaagcagagtacatttcttagccagttggctgcaaagacaattccaaacagcattcactgcttgtctatgcgtttaacaattgattactatatcctgccccttgaggaacggaaattcccaaggagtgaaaatttagaaaacccaaatctctatcactatgcacttttctctgataatgttttggcagcctctgttgttgtgaactcaaccataatgaatgctaaggaaccagagaaacatgttttccatcttgtgactgacaagttaaactttggagccatgaacatgtggtttctgctgaacccacctggcaaggccaccatccatgttgagaatgtggacgaatttaagtggttgaactcatcatactgtcctgtgttgcggcaacttgagtctgctgccatgaaagagtactatttcaaagctgatcgtcccaccactctctcagcaggttcttcgaacctaaagtatcggaaccccaagtacctctctatgctgaaccacttgaggttctatctcccagaggtctatccaaagttggataagatactcttcctcgacgatgacatagttgtgcagaaagatttaacagggctgtgggatgttgatcttaatggaaaggtcaatggtgctgtggaaacctgtggggagagttttcaccgttttgacaaatatcttaatttttcaaatccacacattgctcggaactttgatccaaatgcatgtggctgggcttatgggatgaacatctttgatctgagggagtggaagaagaaagatattactgggatctaccacaaatggcaaaatatgaatgaagacagggtcctttggaagcttgggacacttccgcctggcctcttgaccttctataagttgacgcacccactggacaagtcatggcatgttcttggattaggatacaacccaagcattgaccgttcagagatagacaatgctgctgtggttcattacaatgggaacatgaagccatggctggagctagcaatgaccaagtaccgaccatattggaccaagtatatcaagtatgatcacccttacatccgtggatgcaacttgagtgagtagatagtcgtgctgaaaaactgacagatgaggaagagcttattggacagaagtgttccactaccatgtccttgcggtgcgttattcgactcagcaaagtggtactacctcaagctcttgattgctttcctcccctcctctcccaagaaaaattcaccggtggctgttctgacgagtgatgtattattatagcgatgcgttttttaattcaattattagtaatatgcatttatattttccgtcaaaattagcaggagaaaaacttataaaatggatttgtggggctggtgtcgcgtgctgcttagaggtatgcctagagaatcgagtgttgccggaattggatcctttttttgtatcagacgataaagtgggagtacaagccaaagcggaaggcatgaatcgaatggattacaggtttaaccctgagtcctgaccaatgtgaaactattttacctacagtatcaagaaatgctggtgtccgttttatgataactgatctcgtagctaatcttgtgtttctcggtcacgtgttacatggtgctagcgcctgagagattggattagtcaattt

SEQ ID NO: 216438 - DNA, 2368 bp, Zea Mays
gttgcttgattttttcgtttggatggaaactgtgtcggtggaacattggtgctctaaggaaacgaacctagtcactctcgggattgcaggaattattatcccctggcgctcagatcgcaagggtaagaatggcaatcaggaagcagcagcaatgaagaacctcaaatctattttgcctaaggaggtgtttgatgctataactgctagtcaacaagaatcaggcacattgagtgttgatttttttaggaatcatgcatctccctcttggaaaactgatgatctagtcaccgagaagagcatggatgtcaatgacaatgctaaagctgaaaatagtttgctagaacattctgtgccaacaaatagatcacccaaagatccagatgaacatcaagttgacaaagcagcaaaagtagctcgaaggaaacttagggagaaaaggcgtgagaagagagcaatggatttggttcataaagatgatgaagcacgtattaagctggaaaatgctgccattgagcgatcaaaagctgtcgattctgctgtgcttggaaaatacagcatatggcgaaaagagaatgagaatgagaattcagactctacagttaggctgatgagggaccaaattattatggctcgtgtctattctacgcttgctaaatcaaagaacaagaacgatctatatcaaaaactgcagactcgaatcagagaaagccagcgggctgttggagaggctaatgctgatgctgacctgcatcacagcgcaccagaaaaaatcagagcaatgggtcaagttttatcaaaggctagagaagaactttatgattgtacggcaatcactcagagaataagggctatgcttcagtcagctgatgaacaggtcaggagcttgaagaagcagagtacatttcttagccagttggctgcaaagacaattccaaacagcattcactgcttgtctatgcgtttaacaattgattactatatcctgccccttgaggaacggaaattcccaaggagtgaaaatttagaaaacccaaatctctatcactatgcacttttctctgataatgttttggcagcctctgttgttgtgaactcaaccataatgaatgctaaggaaccagagaaacatgttttccatcttgtgactgacaagttaaactttggagccatgaacatgtggtttctgctgaacccacctggcaaggccaccatccatgttgagaatgtggacgaatttaagtggttgaactcatcatactgtcctgtgttgcggcaacttgagtctgctgccatgaaagagtactatttcaaagctgatcgtcccaccactctctcagcaggttcttcgaacctaaagtatcggaaccccaagtacctctctatgctgaaccacttgaggttctatctcccagaggtctatccaaagttggataagatactcttcctcgacgatgacatagttgtgcagaaagatttaacagggctgtgggatgttgatcttaatggaaaggtcaatggtgctgtggaaacctgtggggagagttttcaccgttttgacaaatatcttaatttttcaaatccacacattgctcggaactttgatccaaatgcatgtggctgggcttatgggatgaacatctttgatctgagggagtggaagaagaaagatattactgggatctaccacaaatggcaaaatatgaatgaagacagggtcctttggaagcttgggacacttccgcctggcctcttgaccttctataagttgacgcacccactggacaagtcatggcatgttcttggattaggatacaacccaagcattgaccgttcagagatagacaatgctgctgtggttcattacaatgggaacatgaagccatggctggagctagcaatgaccaagtaccgaccatattggaccaagtatatcaagtatgatcacccttacatccgtggatgcaacttgagtgagtagatagtcgtgctgaaaaactgacagatgaggaagagcttattggacagaagtgttccactaccatgtccttgcggagaaaaacttataaaatggatttgtggggctggtgtcgcgtgctgcttagaggtatgcctagagaatcgagtgttgccggaattggatcctttttttgtatcagacgataaagtgggagtacaagccaaagcggaaggcatgaatcgaatggattacaggtttaaccctgagtcctgaccaatgtgaaactattttacctacagtatcaagaaatgctggtgtccgttttatgataactgatctcgtagctaatcttgtgtttctcggtcacgtgttacatggtgctagcgcctgagagattggattagtcaattt

SEQ ID NO: 216439 - DNA, 2658 bp, Zea Mays
ctcgtctcatcatacttcagacttcacacatcgatccccactcccccacggaagcgaagcgtacgctacgcgcactgccctccggcgaccgccccgccgctggcgggtcggattgggtccgatccggatctggatcagcaccggcatcgccgcgacggagatgccgaccccgaggcagcggcatacctccacctccggcgggggcggaggagggaggcgcgccgcctccgggtcggccatgctgccccccgtggtggtcctcgtgttcctcttcgtggtcgcgccttcgctcttcttcgtcgtgcgcaatgacggtcgcgcccacgcccacgtccacgtagcctccggtaagcattgacatattctgtttgcctgcagatcgcaagggtaagaatggcaatcaggaagcagcagcaatgaagaacctcaaatctattttgcctaaggaggtgtttgatgctataactgctagtcaacaagaatcaggcacattgagtgttgatttttttaggaatcatgcatctccctcttggaaaactgatgatctagtcaccgagaagagcatggatgtcaatgacaatgctaaagctgaaaatagtttgctagaacattctgtgccaacaaatagatcacccaaagatccagatgaacatcaagttgacaaagcagcaaaagtagctcgaaggaaacttagggagaaaaggcgtgagaagagagcaatggatttggttcataaagatgatgaagcacgtattaagctggaaaatgctgccattgagcgatcaaaagctgtcgattctgctgtgcttggaaaatacagcatatggcgaaaagagaatgagaatgagaattcagactctacagttaggctgatgagggaccaaattattatggctcgtgtctattctacgcttgctaaatcaaagaacaagaacgatctatatcaaaaactgcagactcgaatcagagaaagccagcgggctgttggagaggctaatgctgatgctgacctgcatcacagcgcaccagaaaaaatcagagcaatgggtcaagttttatcaaaggctagagaagaactttatgattgtacggcaatcactcagagaataagggctatgcttcagtcagctgatgaacaggtcaggagcttgaagaagcagagtacatttcttagccagttggctgcaaagacaattccaaacagcattcactgcttgtctatgcgtttaacaattgattactatatcctgccccttgaggaacggaaattcccaaggagtgaaaatttagaaaacccaaatctctatcactatgcacttttctctgataatgttttggcagcctctgttgttgtgaactcaaccataatgaatgctaaggaaccagagaaacatgttttccatcttgtgactgacaagttaaactttggagccatgaacatgtggtttctgctgaacccacctggcaaggccaccatccatgttgagaatgtggacgaatttaagtggttgaactcatcatactgtcctgtgttgcggcaacttgagtctgctgccatgaaagagtactatttcaaagctgatcgtcccaccactctctcagcaggttcttcgaacctaaagtatcggaaccccaagtacctctctatgctgaaccacttgaggttctatctcccagaggtctatccaaagttggataagatactcttcctcgacgatgacatagttgtgcagaaagatttaacagggctgtgggatgttgatcttaatggaaaggtcaatggtgctgtggaaacctgtggggagagttttcaccgttttgacaaatatcttaatttttcaaatccacacattgctcggaactttgatccaaatgcatgtggctgggcttatgggatgaacatctttgatctgagggagtggaagaagaaagatattactgggatctaccacaaatggcaaaatatgaatgaagacagggtcctttggaagcttgggacacttccgcctggcctcttgaccttctataagttgacgcacccactggacaagtcatggcatgttcttggattaggatacaacccaagcattgaccgttcagagatagacaatgctgctgtggttcattacaatgggaacatgaagccatggctggagctagcaatgaccaagtaccgaccatattggaccaagtatatcaagtatgatcacccttacatccgtggatgcaacttgagtgagtagatagtcgtgctgaaaaactgacagatgaggaagagcttattggacagaagtgttccactaccatgtccttgcggtgcgttattcgactcagcaaagtggagaaaaacttataaaatggatttgtggggctggtgtcgcgtgctgcttagaggtatgcctagagaatcgagtgttgccggaattggatcctttttttgtatcagacgataaagtgggagtacaagccaaagcggaaggcatgaatcgaatggattacaggtttaaccctgagtcctgaccaatgtgaaactattttacctacagtatcaagaaatgctggtgtccgttttatgataactgatctcgtagctaatcttgtgtttctcggtcacgtgttacatggtgctagcgcctgagagattggattagtcaattt

SEQ ID NO: 216440 - DNA, 3719 bp, Zea Mays
gcatggctggaagttcaaaccgtttcccaccaaccgtggagtccgaaatttgacgggaaatctgacgagcccatttttttcataaaggtccggaacctacacaaaaaagttctgcgtcgtcccggtcctctcagaaaacgcgttgcatgagataaccaaaaccacatacagccggaaccgagggggtgatatggaataacagcgctaaaattgaactaaccatagttagctggggacgcctctcccgcggggctgacaccaaaccgtggttcctcggacgcaacgcgagcacaaccagaccacaacacctcgaggctcgagcatccctgcatccctcccccccttccccatcccacctcctgctacaaccgcttcgtttcctcccctcccaaatcccccaaccccaaatcgagctccgagtcgacggcccttgccgaaccgctctccagttcccaaatccccctcccccgaaattcaccgccggactggcccggccgatggagtgacccagctagggttccgaagccggcaatggaggcgcagtggctcgcggagtatccgcaccagggggccgacaagcggccgcgcaaacgggcccggctcgcctgggatgtcgcgcccacgctgttccagccccccaaggcaattccgatgctatattgtgggcaggaactaattaatggtaatttcacgactgcatttcttccaccaccatcaatttattacaccgggccgccacggaatatttcgcctccttggagaccagatgacaaggatggacactatgtttttgcggttggagagaatctcacaccaagatataggatacttaacaagatgggtgaagggacatttggtcaagttttggagtgctgggacttggaaaaccaagaagcagtggctatcaagattgtacgctcccttcagaaataccgagaggctgctatgatagaaattgatgtgctccagagacttgggaagcatgactttactggcagccgttgtgtgcaaatacggaactggtttgactatcgtaatcatatttgtatagtatttgagaagcttgggccaagcctatatgactttctgcgaaagaatagctaccgttcatttcctattgaccttgtccgagaatttgccagacaaatattagagtctgttgcatttatgcatgacttgcgacttattcacacggatctgaagccagaaaacattctccttgtttcatcagagtctatcagggtgcctgattataaggtttctatacgaccaccaaaggatggttctttctttaagaaccttccaaaatctagtgctatcaagctgattgattttgggagtacaactttcgagagccaagaccacaattatgtggtgtcgacaagacattatcgtgcaccagaagttatccttggtcttgggtggaactatccatgcgacttgtggagtgtgggttgcattttagttgagctttgttcgggggaagctctctttcaaacacatgaaaacttggagcatttggctatgatggagaaggtcttagggcctctcccaaagcatatgattgtcagagctgatcggcgtgctgaaaagtacttcaagcgcggagtaaggttggactggccagagggagcggcctcacgagagagcatgaaggcagtctggaaattgcctcgtctgcagaaccttgtgatgcaacatgttgatcattctgctggagatctaattgatcttcttcaaggacttcttcggtatgatcctaatgagcgcctgaaagcacatgaagctctacaacaccctttctttaccagatgcatcagaagatgtggtttctgaggctacactgagattgaaaatgtcaatgctgtatttcttcattttgatgtgtaagaactacaaaaaagtggagatgttctacgaaaaatgaaatatgctaacttgcattctgttcaatgatttgaaaggtagcatgcagaaatccctaaccaggtggtgtcaattgaggataaatgggattaagtggtttcatggaagattggaacactatttaatggtggcatacagtgatctcgggtcaacagaatggcggcggcggcgaacggcggagacggggaggagctcctcctgctctcggccgtggaggctggccgcggcggcggcgtacccaccgaggtggaggattcgtggcggctcaacttcgaggggttccgcccgccggaggcgcaccaggagaggccgccgaacggtccgcttcaccactgcctcggcgtgctagctcaaggtcctgaggatgttgttgctgaatactatcaacagcaagtggagatgcttgagggttttagtgagatggacacacttacagatcgtggtttccttcctggaatgtccaaggaagaacgagaaaaggttgccaggagtgaaacattagccatacggttgtctaactttgcaaatatggttctctttgctgcaaaagtgtatgcttcagtaaggagtggctcacttgctatcatcgcatcaactttggattctcttctagacttgttgtcaggatttatcttgtggtttactgccttttcaatgcaaacaccaaatccatacagatacccaattgggaaaaagcggatgcagccactgggaatacttgtttttgcttctgttatggcaacccttggccttcagataattctagaatcagtacgttcattggtgtctgatggagatgaattcagcttaacaagtgatcaagaaaagtggcttgtggacatcatgctctccgtgacattggtaaaacttgccctggttatatattgccgctccttcaccaacgaaattgtcaaagcatatgcacaagatcactttttcgatgtcatcacaaatgtaattggcctggttgctgcactacttgccaattacattgagggctggatcgatccgcttggtgcaatcgttctggcgatctacacgatcaggacatggtcgatgacggtgctggagaacgtgcactccctggtggggcagtcggcctcgccggagtacctccagaaactgacttacctgtgctggaaccaccacaaggccgtgcggcacatcgacacagtccgcgcctacacgttcggttcccactacttcgtggaggtggacatcgtgctgccgtcgaacatgcccctgcgggaggctcacgacatcggcgaggccctgcaggagaagctggagcgcctgccagagatcgagcgcgcgtttgtccacctcgactacgaattcacccaccgccccgagcacgccttgtcccacgagaaatagcatgctaggaccgaactgatgcagcaggcggaaggacacggcttcgtaatcgtaactgaaacaattttacttgtagccgcagaaagcttcttctgagacctgatgctcatctcgtcagtcgtcgcagcaaaccagttgggtacatgcgatgagactgaacgtaaaggagtgcttgctctctgcgatggtgtccttgtagcatcatggactacagaatctgattcctcctccaccaccaccacgacgacgacctattttatactggtcttcagctcattagtctaggtttgtttcgttatctttttgcatggagagaccgatgattgaggtatgtatttctgtaagataaattcatatcttgcttcaaaaagtcaaaactttttaaaatttgccagtacgtcgaaaatagttttgat

SEQ ID NO: 216441 - DNA, 1632 bp, Zea Mays
cttttttttctcggctagaatatgcaattccgatgctatattgtgggcaggaactaattaatggtaatttcacgactgcatttcttccaccaccatcaatttattacaccgggccgccacggaatatttcgcctccttggagaccagatgacaaggatggacactatgtttttgcggttggagagaatctcacaccaagatataggatacttaacaagatgggtgaagggacatttggtcaagttttggagtgctgggacttggaaaaccaagaagcagtggctatcaagattgtacgctcccttcagaaataccgagaggctgctatgatagaaattgatgtgctccagagacttgggaagcatgactttactggcagccgttgtgtgcaaatacggaactggtttgactatcgtaatcatatttgtatagtatttgagaagcttgggccaagcctatatgactttctgcgaaagaatagctaccgttcatttcctattgaccttgtccgagaatttgccagacaaatattagagtctgttgcatttatgcatgacttgcgacttattcacacggatctgaagccagaaaacattctccttgtttcatcagagtctatcagggtgcctgattataaggtttctatacgaccaccaaaggatggttctttctttaagaaccttccaaaatctagtgctatcaagctgattgattttgggagtacaactttcgagagccaagaccacaattatgtggtgtcgacaagacattatcgtgcaccagaagttatccttggtcttgggtggaactatccatgcgacttgtggagtgtgggttgcattttagttgagctttgttcgggggaagctctctttcaaacacatgaaaacttggagcatttggctatgatggagaaggtcttagggcctctcccaaagcatatgattgtcagagctgatcggcgtgctgaaaagtacttcaagcgcggagtaaggttggactggccagagggagcggcctcacgagagagcatgaaggcagtctggaaattgcctcgtctgcagaaccttgtgatgcaacatgttgatcattctgctggagatctaattgatcttcttcaaggacttcttcggtatgatcctaatgagcgcctgaaagcacatgaagctctacaacaccctttctttaccagatgcatcagaagatgtggtttctgaggctacactgagattgaaaatgtcaatgctgtatttcttcattttgatgtgtaagaactacaaaaaagtggagatgttctacgaaaaatgaaatatgctaacttgcattctgttcaatgatttgaaaggtaattggtgtatataagcagagttctctgacactcgatccattttaactggatgtcattttccaattgatacaaattcctgtcttccccattcgtatactaattttgccagactcttcagtactagcaggtagcatgcagaaatccctaaccaggtggtgtcaattgaggataaatgggattaagtggtttcatggaagattggaacactatttaatggtggcatacagtgatctcgggtcaacagcaaaagtgcacgacacaagcacggcacacgtatcttgcag

SEQ ID NO: 216442 - DNA, 2300 bp, Zea Mays
ttttttttctcggctagaatatgcaattccgatgctatattgtgggcaggaactaattaatggtaatttcacgactgcatttcttccaccaccatcaatttattacaccgggccgccacggaatatttcgcctccttggagaccagatgacaaggatggacactatgtttttgcggttggagagaatctcacaccaagatataggatacttaacaagatgggtgaagggacatttggtcaagttttggagtgctgggacttggaaaaccaagaagcagtggctatcaagattgtacgctcccttcagaaataccgagaggctgctatgatagaaattgatgtgctccagagacttgggaagcatgactttactggcagccgttgtgtgcaaatacggaactggtttgactatcgtaatcatatttgtatagtatttgagaagcttgggccaagcctatatgactttctgcgaaagaatagctaccgttcatttcctattgaccttgtccgagaatttgccagacaaatattagagtctgttgcatttatgcatgacttgcgacttattcacacggatctgaagccagaaaacattctccttgtttcatcagagtctatcagggtgcctgattataaggtttctatacgaccaccaaaggatggttctttctttaagaaccttccaaaatctagtgctatcaagctgattgattttgggagtacaactttcgagagccaagaccacaattatgtggtgtcgacaagacattatcgtgcaccagaagttatccttggtcttgggtggaactatccatgcgacttgtggagtgtgggttgcattttagttgagctttgttcgggggaagctctctttcaaacacatgaaaacttggagcatttggctatgatggagaaggtcttagggcctctcccaaagcatatgattgtcagagctgatcggcgtgctgaaaagtacttcaagcgcggagtaaggttggactggccagagggagcggcctcacgagagagcatgaaggcagtctggaaattgcctcgtctgcagaaccttgtgatgcaacatgttgatcattctgctggagatctaattgatcttcttcaaggacttcttcggtatgatcctaatgagcgcctgaaagcacatgaagctctacaacaccctttctttaccagatgcatcagaagatgtggtttctgaggctacactgagattgaaaatgtcaatgctgtatttcttcattttgatgtgtaagaactacaaaaaagtggagatgttctacgaaaaatgaaatatgctaacttgcattctgttcaatgatttgaaaggtaattggtgtatataagcagagttctctgacactcgatccattttaactggatgtcattttccaattgatacaaattcctgtcttccccattcgtatactaattttgccagactcttcagtactagcaggtagcatgcagaaatccctaaccaggtggtgtcaattgaggataaatgggattaagtggtttcatggaagattggaacactatttaatggtggcatacagtgatctcgggtcaacaggtaatcattttgcatgcatttagaatttgagtatttctcgtgcaagttggcaatgatattttttgccatggcacttttggtttggtggtgtttttcttttcctcttgaatttctgattctttcaagaaataaaacaagtacgtcaacttgttttgtatggcaaatattgcttgagatttgtctttatatcttataataagtctcacggtcaagcttggttttcactgagcttgagtttaccacttgactagacaaattgttgatataaaagctatccccactctcacaaaggtatcattatcacttcttgaggaatcaatattttttattggaccaaatatataaagggattgttatttttaagtataattagattagtcattgactgtattttaaaaatgagcttatttggagatacaaatgttgctaatatgttctaaaacctagtcaaacttcagaaagttttacatggacaaaacttaggtgacttttggataccatatttatgttttttttctaaagtttcttttttcgcaaaaaagatgatgtgctgctttcaaaaaatatttcctccatcctgaattgtaagttgttttgacctttttttaagtgcatagcaaagctatgtatttagatatgtacaccacgtctacacgcacagatgcgcaagcatgcagatgtatgcgtgtgtagatagatagatagattg

SEQ ID NO: 216443 - DNA, 15747 bp, Zea Mays
gcatgggaagcccgttcgtgcttacagctactttaagaaagagttacgaggtagctttgatggcagttggccagaagtggcctgtacttctctatgggcctgttggtgcaggaaaatctgcacttattaacaagttggcacacatagttggaaatcgagtactttttatccacatggatgagcaaatggatggcaggaccttattaggaagttacgtttgcacagagaaacctggtgaattcaagtgggctcctggttcgcttacacaggctattgtcaaagggttttggattgtgtttgaagacatagacaaagcacctagcgatgtgcgttcaattttagtgcctttattggagggttcaaataccttttcagttggccatgcagaggccgtggaagttgctgagagttttcgcttctttgcaaccgtcactacatcaaagaacgatgtttcccatgatctgccagggagactcacatttagtgcattgtggagaaaagtgatggtgggagaacctaatcagagtgacatggttaatataattaaagggtgctacccaagcttggagcccatctcctccaaactcatagatacctttgaaaaggtcaactctcttggatcttatcagtttggtagtctcaacttggcagggggtttatctgatggtgttctgcacagattttcattaagggacctgctaaaatggtgcaagagaatattagggactgacctcaactttgaggacctcagatttgcatctagtggatgcaaattaatctatcatgagacattaatccagaaagggccttttgctgatattcggcgtgcattagaaattcttgaaagggttgcatgttctataaaattcaatgagcccattcttcttgttggtgaaactggtactgggaagaccactactgtgcagaatcttgctgcctggcttaaacaaccgttgactgtggtgaacttaagccagcaaagtgacatttctgatctccttgggggatttaagcctacagatgctcgatcgatatgttttcctctttatatggagttcaaggatcttttttctcgaagtttttctgcaaaggacaatgaagctatgatacgttattgtgatgagtttgtaatgaacaagaattggaaaaaactactaaccactttggaaagatatgttgcgaaggctcagaagctaattgaagggtctaagtcttcaagtggttcaaagaggaaacgacctttgccagcccatgttgtttctgattgggacaccttctcttccagactgaatatggcttgtagtcaaattggttcagcaactggcatgtcatttcagtttgtggagggtgcttttatttcagctttaaggaaaggccattggattttgcttgatgaggttaaccttgcacctccagagacacttcaaagaattggtgctgtactggatggagagaggggcacactttgcctagcagagaggggagacgtggattatgttgaacgtcatccttgcttcaggatatttgcctgcatgaatccagcaactgatgctgggaaaagggaactgccgtacacttttaggaaccgctttactgaatactttgttgatgatcttatggatgacgatgatctacgtctttttgtcaggaaatatctggatggtctgaatgctgcaaatggagttatagatagtattgtgcgattttataaagtggcaaaaaaggagtgtgaggagagactgcaggatggagctaatcagaagcctcaatttagtttgagatctctatctcgtgctttaggatatataaaaaacgcagagaaaaaatttggcttcaggaaagccatttatgatggtttctgtatgttctttcttacattgttggatcctcctagtggaaaaatcatgaagaacttaatagtttcacttctgttagatggaagagtgccacctaacatttcttttgttgactacttcactgataagcctttgcaattaggtggctgtgaatcggatgattttttgcagagctatgttttaactcaaagtgttactgagcacataatcaaccttgcccgtgctgtttacattagaagataccctgttcttctacaagggccaacatcaagtggcaaaactagccttgtgaggtatcttgctgcaaaaactggacatgagtttgtccgaatcaacaaccatgagcatactgatctccaagaatatctgggtacttatgtgacagatagtcaagggaagcttcagtttcaggagggtgctttggtgaaggctgtgcgggaggggcactggattgttttggatgagctaaatcttgcaccgtctgatgtcctggaagctttaaataggctgttagatgacaacagggaacttttcattccagagctgcaagagactataccagcacaccctaattttatgctcttcgctacacaaaacccacctatgctttatggggggcgtaaaatgctgtcccgggcgttccgcaatcgttttgttgaagtgcatgttgatgaaataccagaagatgagctagccacaattttggagcagcgatgtagaattgctcccagttatgcgaaaaggatggttgaggttatgaaagaattgcaaacacatagacaaaatagtagagtgtttgctggcaaacatggtttcataacacctagggatctatttcgttgggccaatcggtacaggacatttgaagggaagtcatacgaagatctggcgaaagatggttatttactgctggcagagagattaagggatgtcaatgagaaagttgttgttaaagaagctttggagcgtcacctacgtgtaaaactcaatatagctgatttgtataactcggaagtcacccgtgaagataatttattcattgatgttatcaaactaagagtacaagattgcgttgggaatatcacttggacaaaaagtatgtggaggctatacttccttattgagcgttgctacagatcacgcgaacctgtcctccttgttggcgaaactggtggtgggaaaacaactgtttgccagattctaagtgctgtccttgggttgaagttacatattttgaactgccatcagtatacagagacatcagacttcattgggggattctgccctatacgtgatagatcaagaatagcaattgagttcaaagatcttgttgcaaaaatcaaacagatgaaaatgtttttttatgttgcagggaatgttccgcttgaaactgatgtatctggagctgatagtgtcatcagtcatctggatgaaatacttgacagatacagaaagaaaaaatatctgtttcctgaggtgtctgctcaagatcttggtgccatggagcaaatcaagttggatttgatgcatctccacaagaggtggcaagcaattttcctgtggcaggatggaccgcttgttcaagcaatgaagaatggtgatcttttcctcattgatgaaatttctttagctgatgacagtgtgcttgaacgcttgaacagtgttctagaacctgaaagaaaattgtcattggctgagaaaggtggttctgtgttagagaagattgtagcacatccaaacttcttcatccttgcaacgatgaaccctggtggtgactatggaaaaaaagagctttctcctgcattaagaaatcgatttactgaaatttgggttcctgctgttattgatgttgatgaacttaggagcataacttttgggaggttcaccaaaactgacttctcttgccttggagattgcattgttaacttctggaagtggttcaaccaattgcacatcgggagaacattgacgatacgggacctgctgtcatggatttcatttataaacgtgactgaacaaaatcttgggcccgagcaagctttgatacatggcctgtttcttattttgcttgatgggctctcattaggtctaaatgtttctaaaactgaggctactgagatgaggaatacttgcttgtccttccttctagaagaattgcagaaagttgggggcacggcagtagattcatacttgaatgatctaaataattatggctggggtgacaatatgaaaaaaaaagatatagatcatggttgtttggaagatcatttcggcattgcaccattctatattcctaaaggccattttccttgtaagcaacaggactttgaaataatggcgcccacgaccagtaagaatgtcttgcgagttttgcgtggtatgcaactacctaaacctctccttctggaaggtagtcctggagttggaaaaacaagtttaattgtagcattagctggattttctggtcatgatgttgtacggataaatctatctgaacagacagatatgatggatcttctaggttcagacctgccagctcaagggggaaatggaatggaattttcctggtctgatggtattcttctccaggctttaaagaatggaagctgggttcttttggatgagctcaatcttgctccacaatctgtcttagagggcctgaatgccattctggaccaccgtgctgaggtcttcatacctgagcttggtcaaacttacaaatgctcatcgtcttttcgggtctttgcatgccagaatccttcatcgcagggtggtggacggaaaggccttcccaagtcctttctgaaccgcttcaccaaagtttatgttgatgagctatcagaggaagattatctattcatctgtaaatcacgatatggttcattgatttctgaaagtttcatccgaaatcttattcactttaatagcagactgtatatggataccatggtatataggaagtatggccaacaaggttctccctgggaatttaatctacgtgatattatcagatcttgtgagatgatagcaggttccccaaatcctatgatggatgattcttttttaaatactgtttatctgcaaagaatgcgcacattggttgatcgccatgaagttgtcaagctttatgaggatgtctttaagaaaaagatcagcattcaccaaccaaaaatgctccatgttaatccacattgcttggttgttggaagtgcctctattagaagaaataacatccaatcatataaagtgcaaaacaatcaactcaacatatttccaggtgtccttaatagtcttgaagcagccatgcactgtatccagcaaggttggttgtgcattcttattggacaaaattcagctggtaaaacatcattaatccgcttgctggctcagctttctggaaatacgttgaatgagttaaatctgtcgtctgcaactgatgtgtccgaattgttgggatgctttgagcagtataacttctttaggcactacaaaactgttttatcagaagttgagcattatgttgatgtgtatttcagcctgagtattgatacgaaccagaagaattttgttgcagaaagaaggggtttgtttaccaaatggtttgaatttgtggctgcaaaagggcactcctcaattaagacttcgaaattaatgagtgggaatgcatctttgccttcattaagcttgcttgctgaaatagttgagcagatgaaatgtgatctggaaatgtttgacttctctataccattgacaaaagatgatcttagtgaaacactgaagtccatcaacaacttgcagcaaaatggagctgcacaccaaccagttagattcaaatgggttgcgggagatttgattagagccattgagcgtggtgaatggattgttttagataatgcaaatttttgtaaccctactgtacttgataggataaactccttggttgagcaagaaaggtctattatggtcaatgagtgtggtcttgttgatggaaatcctgtagttatcaaagcccaccctaagtttcgaatgtttttgacagtaaattcaaactatggtgaagtttcaagagccatgcgaaacagaggagtggagatctttctgatggaccaaagttggaatctgaaaggatttagcaatgtacctggggacagtgaacggaaggatgtgataagatttttaatttcttgcggaatacccagaatggaactggtctcgtcaatgtgtgaagcacacatgtacgcaaaaggtgaaggttcacgtgttggtgtgaacattacccttcttgaaatcacgcgctgggttcagttgttccaacaactgattgttaaaggaaatcagttcctttggagcctgcatttgagctgggaacacacatatctaccatgtttgggtgaaattaatggatctggcattgtggaggaaggaaaaaataagtttttgactaattttgacagatctgaaattttggctagaaactttagttttttgactgtttttgatggttgttcaactagtttgcattctggattatctttgtccttgccgggtggttggccaattgagcaaaaactaagggatctcatttggtattcaaaagaaacttgtgtcatgaggaattgcatgtttctacagtcattgggtgcccaatacgctgcttatcagataagcagtttgaatgataattcattattgttgggtcagattagtctcatccacccatctattcttcctgctgcaagcttacgcgaattacagtttcctacggttaatggtcagcctgtcaaaatttgtgtcactggggcattcaattcatacttagctgatcagatgcttttctttgctgcaaactgggtaatggagcaatgtactaaaaacgatcttgaactatatggcaaatggtttaattggtataactctctggtccagccttattgcaacttctttgagagctattggtatattctggagcaagaaagtgagcatcctatttggcataacatccttgaatattacagggaaatagttgcctatcacaatattgatattgttactcagcatattccattactctcgaagaagttgctggatatggctggttgtgatagcctgaaagcatgccaaaaccggctgcatcgttcttttaaggctttgggcttgttgcggcttactctgcagcaatggcaaattgagacaaaatgtcctgatctttctgtcctggaatgtactttgttgccagcattgaagtccctcagatgcttagagggcgaggtacttaaaacgattgcgaaatcttggaagcggctcaaaatatactctctccttcttgattaccacagatcaatatggaaaatgatgattgcatctcagttagaggggctaccaattgtttggaatcttttgaggaaagaaatactgaagttgcagcagaagttcccggttgaagttgacgtctttttgatggaatgtgtgaatctcaacaatataaatgataccaattttcaatatggtaaaccaactttgtgggattatggtggtcatcctcatctgccatcatctagcgagatatttgacaaaatgcaagaacttttgtccttcacaacagatgtgtggccaaggaagaatcttttgaatatagagcttgatgataggaaacagttgactgatgctatgctgtcagccaacaaggatcttagacaccttgcaatggaaggtgtctctatggcttgcattgctacaatgaaaactgaggaagatgttttagctgttgtcccccaattggatgaagttcacaagcggcttgtaggaaaggttaactctgtgagggataatcttggattattgtccaagacatcagtgcctgaatttaagttctgttgctcagtgtcctctgagattctatgtaacatttatggtttcaatggctggctagcaagtcttcctttgctcaacttgaagagcttaaacttggatacccttttacttcaacagctatgcaagtgcacacaaaaagattcttctgaaactcatgagattcttgttaattctgagtacctgctgaagtatgctatggattactcactgggttcatcttcaagatctcctctggactatattcaacatcagatcatttggtggatttgtcatgactgggccaaagttgacaatgcacatttaaaagttgctagttgtattcttgaaatgtggtacaactatcactcttccttgtggacttattgctcaggaagcccaaagtgtctattctcagtcacacatgatgattcctgtgacttggcacacctgacaaaaatggacgccatcaatactattatccagcaggatttacatgtggtggattatctgaagagtggtgtaatgcttaaagttgcatctagaaacctctgggaaggtgtttcgtgtttgggaaactttgtttctagtctgcactctgctgctgattccctctttaagcagattatatttgtccataagaagcatttcgaggaagagaactataaccagttagagtctctcctgttccaacaatcgagacgtttgatagagaaagaagatctggacactgtttgtgctctgttatcatcttcaagctgtagagtattggcttcgctctcagagtcagataaactcgtagaatccttgcttatggacttgtattcatcctactcccgtgactctttgttgcataccggagctgcttgggtccgtattggagagttacgcttccggttattgttgagctcatacagtccagatcctacatttaagtctagatacaagcattcacatattttggaaaaaattacacttgtgaagcttgaggaaaaggttcgtcatgattgtgaggaattagctggttctaactcccctgaagatagccatgacaacgagttattgcaattgctggaaattaaagagaaagacacccgtgcaaaggttgtatttcgtcctcgacaatctaagcataagagtctcattgctgcatgccttgagtttgaggaccgcctgtctgagtgcaaggacttgttagctagcttaacttgcgaaggacttgggcaactagaggttgaccgagtgtgcaattggcagataatatccatgaactttatcaagaggctgacagaagattatagggaatatgttgatttgatccagccaattcaagttgctgtatatgaaatgaaacttggcttagcaattgctctatctggttctcttcagagggagtatttgaagaagattaaagaagatgatattaatagagttcttggagcaatttatgcttttatgcagtttccctctggatcttttactgaaagggttgtaactgacgtgactgatgatcttacaaattatacaatcactggccaactaggaaccctaaacagttgttctggagatgtagatatgttgaagaagcttgctgctatgtcaagtcagttgaatgtttgtaaagttgctggcaaagtgaagtccctgtccgagatgcttgcttcagtgcatcatatttttttagtaagaacagctgattgtgtcagctgttcccttgtcatggataagtcatcttatgcgtcattgaaggatacctttgatcattttacaagcatgtggatcaacatgaaataccgtttgaaggctaaagaaagcgatgattctcagtacttcaagttcaaatcgcgaatgatcagtatagacgacatctttaaagatgtgccgttgctttctgatatggaatcagaagacagcattttagataatgaagaaaaactagagcatgaatttttcaaaattacggaaagtattgatgacgataatggtgttgttgaagacaactgggatttgataccagagtctgctcttaaatgtattgtgaccatacatgaccaattgtttggttcgcccgatctttttgagaagcgccgcaaatgtcaagttagtgatgcacagaaagtccagtctttcatagaatcatatgagctgggaacaagaatacttaaagacctcccggaattaacatgttctatgtttgatgaaaagctcatgcctgagcacctatttcgtgtttgtcttgaataccaacgatcctgtgcaaaaacacatcaagattgtagtggttataatgcttacaaggatccaaatcctcctgtcttgtttaaaatggttgagtcactaactacacttcaggagagagttaatagctatctggatgaatggcctgatcatcctggtctcttgaaaatactggacctaatcgcttcccttttagcgatgcccctaagcacgccaatttcgaaggtcttgcttggattgcaattgctggctgggaaagctcaaacattgcaggaaaatgactccaagttctttgtaaaagatcatcttgcatcgatatttttgcttgtgtattcatggcaaaggctcgagttagattgttggcctatactgcttgaggaggtccagacaaagtatgagttgaatgctgcaaagctgtggtttccattgcgagccttacttactcaaacttctggtattccagtggatgatgatttgtctattatcagaagtgttgaggaatttgttcaaacatcaagtcttggagaatacaagagacgattgcatatcctctttgccttccatggtgagatttctgctggtgctagcttgggtagttattcaagtaatgcggtgaagaaaatccagaatattctgtacagtgtgtttggttactatatgcagtttttgtcactcgttcatgggaaaattgaagaaggtaaaaaaaacattgagaaggagttgaaagatcacgtcaagctttacagctgggagcaagcaccatatagcagcgcttctattgaaaattttaaaaggactaggcaaaagatttttaagcttctgcaacggttcaatgatattttgaaaagtcctgtcatctttctactgaatgaagaagccacatcaaggaagattccatgctggcttgatcctcagaggcctgaatcacaccttcctgttgactctgaaaaatttaacaaaaggtttctgtggtaccacaagtgggcaagtgagacgtctttatcattacaaacattgcagcaatcaaatggtagtactgttggagttcctactgccaaagatatggtatatgatgtgaagcactggcagaatgaaattgagctcaatgacagattgcagttcttctggatctcacttgagagaatatgtggggcagctaattttggtagtacagtgaagcatgggaaaaagaatcagaagaaaacagctctatccaatctgttcaagactcttgaggaatgtggactatctaagcacaggccaatgagtcatgagtggggagatgagctggcagcaccaagtccattgttcttggagcagtcatatgattctgcacatttattacagcaaataaactctcagaaaatgctggaagatgttagcatcaatcattccacactattgaacacagataactggaagcatgcaaatcagcaatacttcaaatgtttagcaatgatgcaacaacttcgacaggtttctttgaagtttaacaaagatctaggtttggaagaggttaacaaggctatgtcatttatgagtcatctgttgactgtgttgtctgaacaacgacatcttgcttataatctatttgatcaacggaaccaattcaagcatgctattttcttattaggttctggaggaaagagtaaatctctatcatcaagccaaaatgtgctgctgagttccatgtggcagcaaaagaaattgtttgatgctgtaatcactttgataacagactccaacttattgctcagaagcttcaaggattgccattataactcttgtaacaactttatagaagttgaagggatctcatctctccttggaaagttcatcttgaatttttctgaatccaaggagttgttagatgaatgcttgcttggatccactaatatatttgctggtgcatataagagcatgcctcattctgcaacagagatggaacaactttttactgataattgccagcatatagattcattgttggatggatacttgcctggatccaataatatatttccagatgcatataagagtattcctcttgctacaacagagatggagcaactttttgctgataattgccagcttatagattcattgagagaagatatgaaggttctatgccacagggatctttcagtgggatctgttaagaaagttcttatctctcgtttggaagaattgttggagaagggcaagatggcaatggagaaccgaagacatgttgaagaaaatcataagctatgcttaaagcttgaagcttcgtatatagaaattttgaaggaaactttcatgttagttgttggtgctgtcagaaagctcactgatcatgaagtatgcagtaatggaactgaaaaatcgccagttggtaatgttgcatcatggaaagatactttgcagacatgcattatgaatcttaaattggatgatatttgtgttgctggtgaaaagattcgtattctagtgaggttgctggttgactataaacctgatatacgtactagtatagagctgcacctaatgcatcttcatgcttggctgagtgtgatcctatcatcagcagaagggatactttccgaacttttagaagcacacataacaacttctgaaatgactcttgcacttggggacctttttattcatttatttacggatgggtttggttccactgaagatacagccgaagatgcagatgaactacagcaagatgctgttggaagtggaactggaatgggtgagggggatggtcaaaagagtgtaagctctgatatagatgatgaatcacaacttggtgacagtaaggacttgacatgtaaggcagatcccgctcctaagaacgatgataaagctgttgaaatgcaagacggttttaatgcacaattatctgatgtttctgaggatcttgaaggcaaagactcgggtggcgaagatgaggataccttggataatcagatgggtgatactggtgatgcaagtgaagtggttggcaagaaatcatgggataaggatgaagatgatgatcctaagacatctattgagaaatatgagtcaggctcatcagccaagggaacacaacaggatgatagggaaatgagagctaaggatgatggttctattgaggaggaagatccgatggaaatggattctgaggaaggaaagaataataatcttgaacatgatcctagtacccatgatgaaaccgaactgaatactgatgaagtcatggacaaagctgatgcatatgatgaccggactggacctgaactccctgaaccagagaatgattccattgatgttgacatggtggaacaagaacaaacggatgaaataaatgctgacaatgaagatataggtacagaagaagctgaacaagcagatcagaggttagatgcttcagatgatatggaggaaggagatatggcacaacatagcgatggtgtggtagataatgaaggggagcatgttgaagatgcaaatacagacgcaggtgagatggattcacaccaattggacaaggcggattcacttatgcctctgtcacaaggcctacagcctgacaatatgcaaataaattctaatggagaatctgaagcgaacttggccaacagcagtgatatgcatggcgctgttgctccttcagtaaatttttcaggaaatgaagtgcccaatatggaaatatctatgcccaatactggtaacgattcaatactatcgtctaactccaagccagatatgcaaaatgatgctcagcagcacatcaagcagacaaatcctttcagaagcatcggagatgcattggaggactggaaagaacgggccagagtctcagctgatactcaggatcatcaaccagaaactggaaaagatagtagtgagaacactactgaatttcgttatgtgcctgagggtgaggagagcacctctcaggcattgggtgctgcaacagctgaccagatcaattatgacaatcagattaatcaatctttcttggaagatgaaagctgtatcaggaatttggaacatagtgatgagagaacacctgataaccctgaggtgccttaccttcaaacttcacaagcacttcccaacaagtctgaaaatgccaatgaattggatggaagagaaattcaaactgatgcatccgttcaaaatttagttgaaagaacagatcacactttccaagatctagtttctttcaaacaacccccggcagatgataaaatagctcttattgacctaactactgacagggaattgccttctcagatggatctcgacatcactgatgcagagacaaaaagatctaatgcggtctggaaaaatcttgagctcgcaaccatgaaattgtcccaagaactggcagagcaattgcgcctggttatggaaccaactcttgctagtaagcttcaaggggattatagaactggaaagagaataaacatgaagaaggttattccatatattgcgagtcatttccgcagggacaagatatggttgcgccgaactaagcctaataaacggaattaccaagtggttattgctgttgatgactctagaagtatgtctgagggcaaatgtggaaaatttgctatcgaggcattagttactgtgtgccgtgctatgtcacagcttgaggttggacaatttgcagttgcaagttttgggaagaaggggaacgttagtgtgctacacgattttgatcagatctttaatagtgaagctggagttaatgtgatctctagcttgtcgtttgagcaagataacaaaattgaggatgaaccggtgtctgatctcttgacacatctgaatgttatgcttgatactgccgttgcacgggcacgcaccccatcagggcaaaatcctctccagcaactgatactgataatatctgatggaaaattccatgaaaaggaaaacttgaggcgccatgttagagacgttctaaatcgaaagaggatggtcgcgtatgtgctcctggatagccccgaggattctattattaatctaaaggaagcatgcttcagagtaggggagaaggtagagctgaaaaaatacatggattcctttccgttcccgtattatgttatgctacagaacattgaagctcttcctcgcacattggccgacctgcttagacagtggtttgagctcatgcagagcgccaacgagtgacccttgggagttgggagtagtgccacgcatttagctgtacagcaaactacattctagcttccatttttgcttgggcctggacagttctgtggtggcaagcttgattgtgcacaaatgccttcacggttcaaatcgctttcctgaaatatgatctctggtcgcaggcttgattgtctaaaagcatcatcacaattcaaattgtttttgggaaatttgaatagaatttccgctttcctgaaatatggtctctgctcgcaggctttattgtgtaaaaacatcatcacaatttaaattgtttctggcaaatttgaatagaatttccgtgctcaagagttatagtttgttttttttttcaatggagaattgttgctcacgtgctacatgcgacctgagtgtgattgatccttcaatcttgccctgctgttcatcttgtgttgtttgtcatgtttggctttgttgatgtacatgtttcttccactgcatgtgctacgcgttgacgatgtacgcaactgtcgctgccaacgcgaccactttatatatgtgacagtgacacatgccaggggcagatctagaaatctacaaaatctcttcaagctctttctctcttgtaagggattgtttgtttgag

SEQ ID NO: 216444 - DNA, 1754 bp, Zea Mays
cataagatattgccatctccacgtgacacacaggccccccgtggatgtctctagagcgggacccttcccttcgtattccagccaagcagaacgcaggaatctccttcccacggatcactctgccacgatccgcgtgctcacccgcaaaactaatccacaccgtccgtcctcctccaatccaacgcacgaaacctcatttccctcacgaagtccccgctgctgttccaaaatttcactctctctcccgcccaccacccgtcccttatttaatcaccccgcctccgcactcaatctcacaccgcaatcttcaatctccccagcaatccctagcagaagccttccatcctcactcgctcgatggcccgcacgaagcagacggcgaggaagtccaccggcggcaaggcgccgaggaagcagctggcgactaaggcggcccgcaagtctgcccctgcgaccggcggagtgaagaagccccaccgcttccgccccggcaccgtcgcgctccgggagatccgcaagtaccagaagagcacggagctgctgatccgcaagctgccgttccagcgcctggtgcgggagatcgcgcaggacttcaagaccgacctacgcttccagagctctgctgtctccgcgctgcaggaggcggctgaggcctaccttgtcgggctcttcgaggacaccaacctctgcgccatccacgccaagcgcgtcaccatcatgcccaaggacatccagcttgcccgccgcatccgcgggtccatccagccgagaggtcgtgtgcgcgtggatctctgcgtggaagcgatgaagattacggcgctcctggtgctgaagccgtcgacctctggagccgggagctcctcgtccggcggcgagtcgggcccggaggcggtggtgctcgcgaacgcgatagacgtcagccacttcggctacttccagcgcagcgccgcccgcgagttcatcgtcttcgttgcccgcaccgtcgctcagcgcacccagccaggccagcggcagtccgtccagcacgaagaatacaaggtccactcccacaatagaaatgggctttgtgcggttgcattcatggatgatcattatccggttcttgatgagtaccagaaggcttatggggactcctggaaatctgtgactgcagatgaaactcaacagtgggctttcctgacagacgccttgacaaaatttcaggatcctgcggaagctgacaaattaatgaaaattcagagggacttggatgaaacaaaaattatcctacataaaactattgagagtgtccttgccagaggagagagattggatagcttggttgagaaaagctctgatctgagtgctgcttctcagatgttctacaagcaggcaaagaagacaaaccaatgctgcacaatactgtaaattttggctcttcactcatggttgcaagaaacaaaaacggtcgatatcgtgctaatttatttactgtaagttaagtcgccagtgaagcgtggacacgtggttgcaaggcccgagctcagtaaaggctatactgttcttcaagacctgccagaattggactgttttcttgtgagaattccagctctccaaacaggccatggagtaccatcaacattctttagtgactatgaaacctcgtagtaccagctaacaccatttactctactactactatataaggcttgcgtcaaactgcagaaatcaccaatatggttaaattctcaaagcttgctggagcacattttgtg

SEQ ID NO: 216445 - DNA, 2212 bp, Zea Mays
cataagatattgccatctccacgtgacacacaggccccccgtggatgtctctagagcgggacccttcccttcgtattccagccaagcagaacgcaggaatctccttcccacggatcactctgccacgatccgcgtgctcacccgcaaaactaatccacaccgtccgtcctcctccaatccaacgcacgaaacctcatttccctcacgaagtccccgctgctgttccaaaatttcactctctctcccgcccaccacccgtcccttatttaatcaccccgcctccgcactcaatctcacaccgcaatcttcaatctccccagcaatccctagcagaagccttccatcctcactcgctcgatggcccgcacgaagcagacggcgaggaagtccaccggcggcaaggcgccgaggaagcagctggcgactaaggcggcccgcaagtctgcccctgcgaccggcggagtgaagaagccccaccgcttccgccccggcaccgtcgcgctccgggagatccgcaagtaccagaagagcacggagctgctgatccgcaagctgccgttccagcgcctggtgcgggagatcgcgcaggacttcaagaccgacctacgcttccagagctctgctgtctccgcgctgcaggaggcggctgaggcctaccttgtcgggctcttcgaggacaccaacctctgcgccatccacgccaagcgcgtcaccatcatgcccaaggacatccagcttgcccgccgcatccgcggggagagggcctaagcgtcatattttctgtcatcagtgcccgatcagaagatgtagagatatgctgggttctgtagtttgggttactgtcgaatcatcgagtgttggctgttcactgctgtaacttaattatcatgatgcatatgaaatggcaatgaactctgttatcagttctcgaattttccgtttggatcccttcttgttcctctgtgcataatcattttatatttgtggggataacgggatgaatggtgagaaggatgaatcagcgttcaggccgagcgttctttcacaagtggtcgtgtaggcgtgctgggctgtcaactgggcccactggcaggctaatcttccccttgtgaatcgtcttgtactgttctcgtgctaggcagtgggctgcgaccgaatccaacataagaggaaaggggcgtttgctttatattcgttctaacctgcgatctccgtccatccagccgagaggtcgtgtgcgcgtggatctctgcgtggaagcgatgaagattacggcgctcctggtgctgaagccgtcgacctctggagccgggagctcctcgtccggcggcgagtcgggcccggaggcggtggtgctcgcgaacgcgatagacgtcagccacttcggctacttccagcgcagcgccgcccgcgagttcatcgtcttcgttgcccgcaccgtcgctcagcgcacccagccaggccagcggcagtccgtccagcacgaagaatacaaggtccactcccacaatagaaatgggctttgtgcggttgcattcatggatgatcattatccggttcttgatgagtaccagaaggcttatggggactcctggaaatctgtgactgcagatgaaactcaacagtgggctttcctgacagacgccttgacaaaatttcaggatcctgcggaagctgacaaattaatgaaaattcagagggacttggatgaaacaaaaattatcctacataaaactattgagagtgtccttgccagaggagagagattggatagcttggttgagaaaagctctgatctgagtgctgcttctcagatgttctacaagcaggcaaagaagacaaaccaatgctgcacaatactgtaaattttggctcttcactcatggttgcaagaaacaaaaacggtcgatatcgtgctaatttatttactgtaagttaagtcgccagtgaagcgtggacacgtggttgcaaggcccgagctcagtaaaggctatactgttcttcaagacctgccagaattggactgttttcttgtgagaattccagctctccaaacaggccatggagtaccatcaacattctttagtgactatgaaacctcgtagtaccagctaacaccatttactctactactactatataaggcttgcgtcaaactgcagaaatcaccaatatggttaaattctcaaagcttgctggagcacattttgtg

SEQ ID NO: 216446 - DNA, 591 bp, Zea Mays
cgcggaaaccggactgaccacggtgccggtacgaccgtacgagtttcgaaggtttgtctcgtcctgctgcgggctgcgcggactagagaccgccaatttgcttccctccccgccgcgctactgtacatactctgcaagccaccgcagtccgcagcgcgccaccgcctggggcacgccacggtgccacggacggtgtcgccgtgctcgaacccgcgtcacggaatagcagcgtcctcacggctcacgctcccggacttcactcgcccgttctccgtgatatcgcgatctgatctcgcccagcgcagcagccagatccgccccatccagccaccagtttcgcggcggagggtggaggtggaggatgtcggcgacggtggaggagcagatggtggtgaaggcgatccgggaggagtgcccctgggagtcgctccccaagcgcctccagtccacgctccagaccaaggacgagtggcaccgcaggtggtagatctctgatgagcaacatgcttgtctatttggtgggagatctccaatgtgccaccggactggccgtggcagggctgcagggtagagattggggcacaatgagcc

SEQ ID NO: 216447 - DNA, 872 bp, Zea Mays
atggtgaacaagggcaaggtcatctcacttccttgtcatgcaatcatccatgttgtccatccccaaaggccactactccgaagtcgacatacagacaaggatcaacctccagctaccaccacatacagtggaacaacttcagtgtaccctgaatggcccagctttcaggccatgcatccatttggccattatcctatgccaacaaatgggcatgttgaaactcatggagctgcgccaagcgctccggaaatgaatgggaaaagcgagcctggcagaacgtctgctccatccgccaacgggattacctcgcacaagtttttatttcttggtgtgcaagttacagattttctgtaattcatccacaacctaatcacctcgtacttttctacctgcagcgagagtgaaggaagtgacgacaattctcaaaacgactcacactcgaaggacaatgatgggaaggaagatggcgattctcagaacagcatgtcttatttagcatcgcaaggagtggtaaaccaaaccatggcgatgcttccaatgcaaccgggtgcaatggtcggaggagttcctagctccacggcagctaacctgaatatcggagtggactactgggcagctccgggttctgcggttgtccccgcagcgcacggcaaagcgccagctggttcagctcgaggagaccaatgggatgaaagggagctcaagaagcagaagcggaagcagtccaatagagagtccgctcgcagatcccggctgcgcaaacaggtgctgtgcaaccctcgtgctgagtgctgacacctcagcacgaccaacggaatcgacaagcaaatgtgccatcaaccatggatttgctaggagttgttccaactggc

SEQ ID NO: 216448 - DNA, 3544 bp, Zea Mays
ctggacgggagatcgtttctgtgacagattaatgcctactgcaagcttgaagtcctcgaggacattctcgattgtttttgtggctgccagaacaaaaataaaaatcaagggttttagaagggtttggtattccttcgtttcctccctttcttcctctgcaagcaaaaacaccgcagggaaaaaaaggcccaaaacaatctgcgacttcgagaaccctagtatcaagcgcagaactccgtcatgctgcgtgcggcggcggctgccgccgccatattcccggcgcgggtcgccgctgcgccggctgctgcggcggcggaggaacttaggtatccgctgctcagggttattgggacgctgaggggcagccgcggctcggtgctgctggggaggagggtgcgtttctgctccaactcctccgcgagcgactccgaagtggcggcggcagatgcggaggcgaatgccgaggatgcgaccgttgcggaggaggaggcgggcagcaaggcgtcttccgccatcgtgccgaccagcaccaatatcgacgactgcctctctgttatagcgttacctcttccacatcggccactctttcctggattttacatgccgatctatgtaaaggaccaaaagctgttgcaagccctaatagaaaatcgcaaaagatcagctccgtatgctggtgcctttctcgtgaaagatgaagaaggtactgaccctaacattgtgactggttcagattcagagaaaagcattggtgatctcaaagggaaagacttgctgaagcgtcttcatgaagttgggacgcttgctcagattacaagcattcaaggggatcaggtagttctacttggtcacagacgtttacagataactgagatggtcgaagaggatccactcacagttaaagttgatcatctaaaggaaaagccctacaacaaggatgatgatgttataaaagctacctcattcgaagttatatcaactttaagggaagttctaaggacaagttccctttggaaggatcatgtgcaaacctacacacagcacattggtgacttcaactaccaacggctagcagattttggtgctgctatctctggtgccaacaagttgctttgccaggaggtgcttgaggaattagatgtatacaagcgtctgaagttcactcttgagttagtaaaaaaggagatggagattagtaagctacagcaatccatagcaaaagcaattgaagaaaagattagtggagatcagcgacgttatttgttgaatgaacaacttaaggcaatcaagaaggagctcggtttggagactgatgataaaacagcattatctgcaaaatttagggaacgtatagaatcaaagaaggacagatgtccttctcatgttttacaagtcattgaagaagagcttaccaagcttcagcttttagaagccagctctagtgagttcagtgtaactcgtaattatttggactggctgacagtattgccatggggaaattatagtgatgaaaactttgatgtccaccgtgctcagaaaattctcgatgaagaccattatggtttgagtgacgtgaaagagaggatactggaattcatagcagttgggaagttaagagggacttcacaaggcaagatcatatgtctttctgggccaccaggagttgggaaaactagtattggtcgttcaattgcacgtgcactgaaccgccagttctacaggttttctgttggaggtttggctgatgtggctgaaatcaagggccatcggcgcacgtatgttggtgcgatgccagggaagatggtgcagtgtcttaaatcagttggaacagcaaatcctctagtattgatagatgagattgacaagcttgggaagggtcattctggggatccagctagtgcattgttggaactccttgatcctgagcagaatgttaatttcttagatcactaccttgatgttcctattgacctatccaaggttctattcgtttgcacagcaaatgtaatagagacgataccaaatccgttattggataggatggagatcattgctatagctgggtatataactgatgagaagatgcatattgctcgggactatttagagaagaatacaagacaagcctgtggcattaagcctgaacaggttgaagttacagatgctgcccttcttgctcttattgaaaattattgtcgagaagctggagtgaggaaccttcaaaagcatattgagaaaatttaccgtaagattgctctccagcttgttcgccaaggagtatcgaatgagccagaccaggagtctctcggtgtcactgtaaatgaggaatctaatagtggtgatagcatcacagcaaaagatgagattgtgaaggatcctgctgtagaagatgcttcagtcgccaacaatgttacaaatcctgcctctgaggaagctaatgaagtaaatttgacaactgaagcaccaaaagaagacagcacatctaagggcaacaagaaaacagatggagtagcagaagatgcagcagacaaggcaactgagaaggttgtggtagattcatcaaaccttggtgattttgttgggaaacctgtgttccaggctgagcgtatatatgagcagactcctgttggagtggtcatgggtttagcttggactgctatgggtggttctactttgtacatcgaaacaacaaaagtggaggaaagggaagggaaaggtgaccttgtgctgacaggacagcttggagatgtaatgaaagagagtgctcagattgcgcacacagttggcagaactgtattactggagaaagagccagataatcatttttttgcaaactcgaagctatgggaaagcctgtcaagaaggacctcgcaatgacgggtgaagtaacattaactggaagaatcctcccaattggcggggtgaaagagaagacgattgcggcaaggagaagtgcgataaagacgctcatatttccggcagcgaataaaagggactttgacgagcttgcttctaatgtgaaggaaggactggaagttcattttgttgacacatacagtgaaatatatgatttggctttccagagtgacgccgggactgagatgatttagctttacattacaggattgagattttttccccttctctagatctggttacaggctaaataccaaagaagtttgtcagcagaggcagaccattgtaaccaagatgagtggagttaattgatatttacgagaaagaaaaataatatttctttttttggccccaatataacatcattgaatctaagagatttatttggctaggctgtacgtaactagtgtgctaggtggtggtattggccttttatattgttgggacttgggagtgtgggaaaaacagtactggtgcaccatctgttatttattttaagtgttttccaaaggcagcaaggtcatatacctcatatcataatttagccacaaatggcctgaatattttgtattttggtcatttttttttcgaaaaaatcacatttagacccctaaaccacttaattctg

SEQ ID NO: 216449 - DNA, 2022 bp, Zea Mays
gtttcctccctttcttcctctgcaagcaaaaacaccgcagggaaaaaaaggcccaaaacaatctgcgacttcgagaaccctagtatcaagcgcagaactccgtcatgctgcgtgcggcggcggctgccgccgccatattcccggcgcgggtcgccgctgcgccggctgctgcggcggcggaggaacttaggtatccgctgctcagggttattgggacgctgaggggcagccgcggctcggtgctgctggggaggagggtgcgtttctgctccaactcctccgcgagcgactccgaagtggcggcggcagatgcggaggcgaatgccgaggatgcgaccgttgcggaggaggaggcgggcagcaaggcgtcttccgccatcgtgccgaccagcaccaatatcgacgactgcctctctgttatagcgttacctcttccacatcggccactctttcctggattttacatgccgatctatgtaaaggaccaaaagctgttgcaagccctaatagaaaatcgcaaaagatcagctccgtatgctggtgcctttctcgtgaaagatgaagaaggtactgaccctaacattgtgactggttcagattcagagaaaagcattggtgatctcaaagggaaagacttgctgaagcgtcttcatgaagttgggacgcttgctcagattacaagcattcaaggggatcaggtagttctacttggtcacagacgtttacagataactgagatggtcgaagaggatccactcacagttaaagttgatcatctaaaggaaaagccctacaacaaggatgatgatgttataaaagctacctcattcgaagttatatcaactttaagggaagttctaaggacaagttccctttggaaggatcatgtgcaaacctacacacagcacattggtgacttcaactaccaacggctagcagattttggtgctgctatctctggtgccaacaagttgctttgccaggaggtgcttgaggaattagatgtatacaagcgtctgaagttcactcttgagttagtaaaaaaggagatggagattagtaagctacagcaatccatagcaaaagcaattgaagaaaagattagtggagatcagcgacgttatttgttgaatgaacaacttaaggcaatcaagaaggagctcggtttggagactgatgataaaacagcattatctgcaaaatttagggaacgtatagaatcaaagaaggacagatgtccttctcatgttttacaagtcattgaagaagagcttaccaagcttcagcttttagaagccagctctagtgagttcagtgtaactcgtaattatttggactggctgacagtattgccatggggaaattatagtgatgaaaactttgatgtccaccgtgctcagaaaattctcgatgaagaccattatggtttgagtgacgtgaaagagaggatactggaattcatagcagttgggaagttaagagggacttcacaaggcaagatcatatgtctttctgggccaccaggagttgggaaaactagtattggtcgttcaattgcacgtgcactgaaccgccagttctacaggttttctgttggaggtttggctgatgtggctgaaatcaagggccatcggcgcacgtatgttggtgcgatgccagggaagatggtgcagtgtcttaaatcagttggaacagcaaatcctctagtattgatagatgagattgacaagcttgggaagggtcattctggggatccagctagtgcattgttggaactccttgatcctgagcagaatgttaatttcttagatcactaccttgatgttcctattgacctatccaaggttctattcgtttgcacagcaaatgtaatagagacgataccaaatccgttattggataggatggagatcattgctatagctgggtatataactgatgagaagatgcatattgctcgggactatttagagaagaatacaagacaagcctgtggcattaagcctgaacagccacacacat

SEQ ID NO: 216450 - DNA, 3192 bp, Zea Mays
atgctgcgtgcggcggcggctgccgccgccatattcccggcgcgggtcgccgctgcgccggctgctgcggcggcggaggaacttaggtatccgctgctcagggttattgggacgctgaggggcagccgcggctcggtgctgctggggaggagggtgcgtttctgctccaactcctccgcgagcgactccgaagtggcggcggcagatgcggaggcgaatgccgaggatgcgaccgttgcggaggaggaggcgggcagcaaggcgtcttccgccatcgtgccgaccagcaccaatatcgacgactgcctctctgttatagcgttacctcttccacatcggccactctttcctggattttacatgccgatctatgtaaaggaccaaaagctgttgcaagccctaatagaaaatcgcaaaagatcagctccgtatgctggtgcctttctcgtgaaagatgaagaaggtactgaccctaacattgtgactggttcagattcagagaaaagcattggtgatctcaaagggaaagacttgctgaagcgtcttcatgaagttgggacgcttgctcagattacaagcattcaaggggatcaggtagttctacttggtcacagacgtttacagataactgagatggtcgaagaggatccactcacagttaaagttgatcatctaaaggaaaagccctacaacaaggatgatgatgttataaaagctacctcattcgaagttatatcaactttaagggaagttctaaggacaagttccctttggaaggatcatgtgcaaacctacacacagcacattggtgacttcaactaccaacggctagcagattttggtgctgctatctctggtgccaacaagttgctttgccaggaggtgcttgaggaattagatgtatacaagcgtctgaagttcactcttgagttagtaaaaaaggagatggagattagtaagctacagcaatccatagcaaaagcaattgaagaaaagattagtggagatcagcgacgttatttgttgaatgaacaacttaaggcaatcaagaaggagctcggtttggagactgatgataaaacagcattatctgcaaaatttagggaacgtatagaatcaaagaaggacagatgtccttctcatgttttacaagtcattgaagaagagcttaccaagcttcagcttttagaagccagctctaaaaattctcgatgaagaccattatggtttgagtgacgtgaaagagaggatactggaattcatagcagttgggaagttaagagggacttcacaaggcaagatcatatgtctttctgggccaccaggagttgggaaaactagtattggtcgttcaattgcacgtgcactgaaccgccagttctacaggttttctgttggaggtttggctgatgtggctgaaatcaagggccatcggcgcacgtatgttggtgcgatgccagggaagatggtgcagtgtcttaaatcagttggaacagcaaatcctctagtattgatagatgagattgacaagcttgggaagggtcattctggggatccagctagtgcattgttggaactccttgatcctgagcagaatgttaatttcttagatcactaccttgatgttcctattgacctatccaaggttctattcgtttgcacagcaaatgtaatagagacgataccaaatccgttattggataggatggagatcattgctatagctgggtatataactgatgagaagatgcatattgctcgggactatttagagaagaatacaagacaagcctgtggcattaagcctgaacagattgctctccagcttgttcgccaaggagtatcgaatgagccagaccaggagtctctcggtgtcactgtaaatgaggaatctaatagtggtgatagcatcacagcaaaagatgagattgtgaaggatcctgctgtagaagatgcttcagtcgccaacaatgttacaaatcctgcctctgaggaagctaatgaagtaaatttgacaactgaagcaccaaaagaagacagcacatctaagggcaacaagaaaacagatggagtagcagaagatgcagcagacaaggcaactgagaaggttgtggtagattcatcaaaccttggtgattttgttgggaaacctgtgttccaggctgagcgtatatatgagcagactcctgttggagtggtcatgggtttagcttggactgctatgggtggttctactttgtacatcgaaacaacaaaagtggaggaaagggaagggaaaggtgaccttgtgctgacaggacagcttggagatgtaatgaaagagagtgctcagattgcgcacacagttggcagaactgtattactggagaaagagccagataatcatttttttgcaaactcgaaggtgcacttgcatgttccagcagggtccaccccaaaggatggccctagtgctggatgcaccatgataacgtctatgctgtcgttagctatgggaaagcctgtcaagaaggacctcgcaatgacgggtgaagtaacattaactggaagaatcctcccaattggcggggtgaaagagaagacgattgcggcaaggagaagtgcgataaagacgctcatatttccggcagcgaataaaagggactttgacgagcttgcttctaatgtgaaggaaggactggaagttcattttgttgacacatacagtgaaatatatgatttggctttccagagtgacgccgggactgagatgatttagctttacattacaggattgagattttttccccttctctagatctggttacaggctaaataccaaagaagtttgtcagcagaggcagaccattgtaaccaagatgagtggagttaattgatatttacgagaaagaaaaataatatttctttttttggccccaatataacatcattgaatctaagagatttatttggctaggctgtacgtaactagtgtgctaggtggtggtattggccttttatattgttgggacttgggagtgtgggaaaaacagtactggtgcaccatctgttatttattttaagtgttttccaaaggcagcaaggtcatatacctcatatcataatttagccacaaatggcctgaatattttgtattttggtcatttttttttcgaaaaaatcacatttagacccctaaaccacttaattctg

SEQ ID NO: 216451 - DNA, 3253 bp, Zea Mays
gcctaacattttttacgcctgcacgcataggcgacgccttttaaaccatggtcgtcccacttggtgtagtccagagagtggctgaagctattttagtgccatcattatatgagaaaaacgggtttagtagggtcattcttaaagcattgaagggccttgctctcttccaccaaagggttatagcgttacctcttccacatcggccactctttcctggattttacatgccgatctatgtaaaggaccaaaagctgttgcaagccctaatagaaaatcgcaaaagatcagctccgtatgctggtgcctttctcgtgaaagatgaagaaggtactgaccctaacattgtgactggttcagattcagagaaaagcattggtgatctcaaagggaaagacttgctgaagcgtcttcatgaagttgggacgcttgctcagattacaagcattcaaggggatcaggtagttctacttggtcacagacgtttacagataactgagatggtcgaagaggatccactcacagttaaagttgatcatctaaaggaaaagccctacaacaaggatgatgatgttataaaagctacctcattcgaagttatatcaactttaagggaagttctaaggacaagttccctttggaaggatcatgtgcaaacctacacacagcacattggtgacttcaactaccaacggctagcagattttggtgctgctatctctggtgccaacaagttgctttgccaggaggtgcttgaggaattagatgtatacaagcgtctgaagttcactcttgagttagtaaaaaaggagatggagattagtaagctacagcaatccatagcaaaagcaattgaagaaaagattagtggagatcagcgacgttatttgttgaatgaacaacttaaggcaatcaagaaggagctcggtttggagactgatgataaaacagcattatctgcaaaatttagggaacgtatagaatcaaagaaggacagatgtccttctcatgttttacaagtcattgaagaagagcttaccaagcttcagcttttagaagccagctctagtgagttcagtgtaactcgtaattatttggactggctgacagtattgccatggggaaattatagtgatgaaaactttgatgtccaccgtgctcagaaaattctcgatgaagaccattatggtttgagtgacgtgaaagagaggatactggaattcatagcagttgggaagttaagagggacttcacaaggcaagatcatatgtctttctgggccaccaggagttgggaaaactagtattggtcgttcaattgcacgtgcactgaaccgccagttctacaggttttctgttggaggtttggctgatgtggctgaaatcaagggccatcggcgcacgtatgttggtgcgatgccagggaagatggtgcagtgtcttaaatcagttggaacagcaaatcctctagtattgatagatgagattgacaagcttgggaagggtcattctggggatccagctagtgcattgttggaactccttgatcctgagcagaatgttaatttcttagatcactaccttgatgttcctattgacctatccaaggttctattcgtttgcacagcaaatgtaatagagacgataccaaatccgttattggataggatggagatcattgctatagctgggtatataactgatgagaagatgcatattgctcgggactatttagagaagaatacaagacaagcctgtggcattaagcctgaacaggttgaagttacagatgctgcccttcttgctcttattgaaaattattgtcgagaagctggagtgaggaaccttcaaaagcatattgagaaaatttaccgtaagattgctctccagcttgttcgccaaggagtatcgaatgagccagaccaggagtctctcggtgtcactgtaaatgaggaatctaatagtggtgatagcatcacagcaaaagatgagattgtgaaggatcctgctgtagaagatgcttcagtcgccaacaatgttacaaatcctgcctctgaggaagctaatgaagtaaatttgacaactgaagcaccaaaagaagacagcacatctaagggcaacaagaaaacagatggagtagcagaagatgcagcagacaaggcaactgagaaggttgtggtagattcatcaaaccttggtgattttgttgggaaacctgtgttccaggctgagcgtatatatgagcagactcctgttggagtggtcatgggtttagcttggactgctatgggtggttctactttgtacatcgaaacaacaaaagtggaggaaagggaagggaaaggtgaccttgtgctgacaggacagcttggagatgtaatgaaagagagtgctcagattgcgcacacagttggcagaactgtattactggagaaagagccagataatcatttttttgcaaactcgaaggtgcacttgcatgttccagcagggtccaccccaaaggatggccctagtgctggatgcaccatgataacgtctatgctgtcgttagctatgggaaagcctgtcaagaaggacctcgcaatgacgggtgaagtaacattaactggaagaatcctcccaattggcggggtgaaagagaagacgattgcggcaaggagaagtgcgataaagacgctcatatttccggcagcgaataaaagggactttgacgagcttgcttctaatgtgaaggaaggactggaagttcattttgttgacacatacagtgaaatatatgatttggctttccagagtgacgccgggactgagatgatttagctttacattacaggattgagattttttccccttctctagatctggttacaggctaaataccaaagaagtttgtcagcagaggcagaccattgtaaccaagatgagtggagttaattgatatttacgagaaagaaaaataatatttctttttttggccccaatataacatcattgaatctaagagatttatttggctaggctgtacgtaactagtgtgctaggtggtggtattggccttttatattgttgggacttgggagtgtgggaaaaacagtactggtgcaccatctgttatttattttaagtgttttccaaaggcagcaaggtcatatacctcatatcataatttagccacaaatggcctgaatattttgtattttggtcatttttttttcgaaaaaatcacatttagacccctaaaccacttaattctg

SEQ ID NO: 216452 - DNA, 5456 bp, Zea Mays
ccgctgtccgcagcgaacacctgtcctcctccggtcctccctgtgcggaacagtctcgccaatcgccatcactagtgtcgatctgcgccggcctacagcctacgtccgtcgtcgtgtgcgatggacgccttcttcagcggtctcgactcccggctgcgggaggcagtgaaggtggcggactccatcatggtggggctggtgaacgccgccatggaggacgcctacaagaagagcctctggaaggacggcgacctggagcgcctcttccagaagctccgcttcgccgagctcgctatcatgcagctcgagtggtgcctccgcttcgtgcggggggagatggaggccgacggcggtgccgacgacggccacgagcagctgctagacgacctcctcgagacgcgggaccggatccaggcccgcctcgacgaggccgaactcgccgtcgcccagacggactgcgactacatgcgccggaagcgcgatgaactcgacccgtcgcgccgccgggagacgccgtccgcagttgatcaccgcggcgccgaggtggagggcggtacgttcgaggaactcagggggtccgtgggccggaagatgacgaggatgagggctaggctggaggacgcgagctccgagctggcggcgctcatgcaaaaggtcagcggcgaggcgtcgccgatggcgaggctgcaggagcccggccacgagggcgacggggtcaagggcctctcgggattctacagcatggcgcagctgcttatggagttccaggagatggtcctggacgccggcgtcctcagagacagcgtcgcatctgcgttcgatgcgatggagaggtcggtctctgctcagcgggcagccatggaggagcagcagtggctcatggatgcagagaaggagatgtacagtgccgtcgttgaaggttttctccgggagatcaacgtggaatcgacgaaacgcaatcagtctgagggagagggatgcccgacacctacattgcatcatagcagagatgctcctgataataatagctcggacgaattccagtatctgaacgatgaaactagccagctgcactcagcaaggcgtatcccggcagagaagtcagagagcagactgcgttatactaattcagaagaggattgtttctgtctctctcaagaggaagctgaaaggctaacagaaacaacgattgattcagaaattagatttgaactgcagcgtgttttgtactcagcagcattcagagacctattaagcaaactttcggttcaggcatatcatgcacagaggcttacagaacaaagagatgaaacggaaatcagaagtaatatacagtatgagatggatagtatcatattcaaagacttggtgaagaacctatgtgttgaatccgttgatcatcttatcaagacctggatccaagatgaggtgcatagagctcttcttgccaagattatgaatccttggaagatcactactgagatggttcacagcgagagacttatcaaggaagagattgaatgcattgtttttggaggtttgataaatgatttggtaaatggtcaaaatttaagtgtggtcaaatatcaacaccaaaatagacccagcgataatctgggaagattcggtatgattgacagcgccgagcagttagtgaatgggaagatacaagtcaatgtaactactgaagatgatggtgtaggctctgatcaacatagaatacttgtgaatcaagaagttttaggtctaattggtaactgtgacaggcaaaattcaaaaggaagtgataagcaagctgaagaatcaataggcagagatgatgttaaggaacgattggatgattgcaggaagctgcaaacagaagaggtagctacaggtttgtgcatgccttctgaaggagtgattcaagaaatctgcattccattgacaaacatatatgaaatatttggggactttgaggctattacctgtgaaaaaataggaacatctgtgctgagattgagagacctggacaaacaattgtcaaacctgattgaaaaagtgaactctcttaaaacaagtgagtttctgtaccggagcgctttcactaggagatgttgcgaccttcaaacagcagaagcagaggtggatcttcttggcgatgaagtggagctgcttcttggacttctcagtaagacatacggagctctggttcactactcaccagttcttcaacactatgtgggggtaattatctaatttcaccgagttaaaaggcttcgatcagggaggtgctgaacctgcttgggaaggagcttgctcatatgcctaacaagacagtgatgccaggcaaggactgcctgcgccagcccgtgcagcatggtgtccgtgttggcagtgactttgctgccgcattgcaagcgcagtttcggaggcagcggaggttggtcgggacttggatgcaggggccgacgccgactggctggagccctcgacggcgactcggcgaggcgccgctgtctcgagaagaagctctattggaacttggaagtggtgctgttctccatttcggatacttctggagtttccagcggttagccacgtggattcttgcacctgtcctgtcctctccactgccaccgtcgttcctcaggtccgttccaagggtagctatggaactcgatctgccgccgcaaccgaccccgccactcaccgacctggccgcctccatccaccgcgccgcagcggccgcggcagtgctctcagcccccgcgccctcctcccatgccgccgccgcggtggctgcccttcgcgacgcccacgctgccatcggttctttcctctcccgcctcaacgtatcgtacggtgatgatcatcaacccatggcggatagcggcgaggagttggtggaggatggggagggggcgcagatggtcggggaggcggaggagaggctccggaactgcggcctgcaggggagcaagcggcggaaacgtcctgtgccgccttcatggcccctagggcgccgctcgagcagcagttccgaagcggcggcggcagccgccgcgccgggtgccggtgctggacgtcgaggagcggcgacgcgcgaccatggatctcttgatgcaattccatgcgtgatgcgtaggaaggaacgtgagtgatattctgtcttgacgccataacggaaatttagttgtttgcatcagtgttaaatgtgctttctaaatttttgtctctaaattatcattcggagagtcactatctatatcttttcatccttcaacaacttttctacatcgtttaatttctagaaagctattcttttttttttaattttggcttgcgagaaatccaggacagatgatgtctcagaacagaagtctatttgaacaactattcaaagaaactgttgaaatattttttactgaaatatacattcctagcaattagggaggtatagaaaagctgagttgctctaaatcgtgaaaatggtttgacatttctggatatttttattacctagataggtatcgttcatggttagttggagctggacaattagtggtgtagataaggcgaattgactatgagattgaaatgaactatggcaagaaaacgagataagtatactcaaatttcaccaacttccaatgccccctcatgtgcgaagtatgctcgattgaagtacacatttttatgatgctactaaggacatgtttggaagtaaagtatttcaaaactatggttctagaatactatgattttaaaacgtcatgacataactgtagtattttgtacatcactccaaacaatacaacaacatttcaaatcatggtatttagtatccatgagccaaaagttagtcatagtaaaaaactttggattggagttaagtttcaaatactccaaaaataccatggtaactattaaaccactgtattcaaaacagagtttttacaagctagccaagcacctcttggtaaaaaataccatagtaatctcaaaactccaaaaatgctttgcttccaaacactcccctaaacgtttataaattttggttggtgctaaatttacattagccaaattagagcttgaactctgaaatctaagaattgcacggctggtagcattgtatggcaactggcatgtagttgctaacacacctcaacaactttgtctaaagttttgtaaaatttagaaaggagaaatgcatatttggctgttatgaaagtggatgagctttgcctgtattaaatgagttacaaagttgaaggaattagcagttaataggtcgtactagggtatttatggatcctgccaaaattagtgtgctattcataactcttttagcacttgctagcaacatcgatcttgctaattctttctattagctagcacacctatttggatcttggtctactaatttttagttgctagctattagcaacatggatccaaacatgccctacttggtatcctctatgctgctcatagcaactaaaaattaggagtatgaatccaaacagtccgtctactgggaggtatgctagttacaagaaaaaaaatagaaggtcaatgttgctagtaagtgctaagagttaggatgctaattttaagatgatccatatagagctagtgaagtagtgtactgagtgctgacagagaaatatttggagatcatagcagaagttgtttgaggaaagatcatagtgaacattggcggcataaagcacataagcagggacatatgttctggctaatattcatattcgtagattcgtgttgccacagccattctttatctaaaatttccctatgcttgtgttagcaacctacgccctccgtgctcttttaagtgtgactatgatttgtactgatttgtagtttcacttttactctttaatcgtttgaccttttcttgtgcccctttagatcttgctggttcttgttggttttatctctttttatgtgtttctccgtttcgtcgtttttcggttctcctttgcatttgtctcccttttcttttctttgagggttgagctctgaggttttcatacggggtcatctctagcctacctcaacgtgcttgggacaaaaaagctttgttgttgttgttgttgttgttgtatttagtaaaagtcgagtacgtttgacttctcggtaaatgagaatgacgcttgagaaagtgacggaggggtatgcagtattcataggttatagcatgctacattacagaatacaaagttcaaagagatgttggtgctagctcatctgttaagtgatgatagataacggtatgtctacatgttgctctagcacgataaatggggtctgggattatttgcaacattgtttccaagctggatagccacatgtcagtacttagctgaagatatgctaatggtattcatttcctagggcagctagtaacactttcctgttatttcatttgaatagcatttcctactaatgcc

SEQ ID NO: 216453 - DNA, 2818 bp, Zea Mays
gcaccgtgcttgcttgtccatttccgtcacagctagcgcttgcccaggtcccccaccttatcaacaacaactgtgcccctcctgcccccgctcgccgcgagagctcccgtcccgacgaccttccctcctgtagcactctacagtctacaccaagcagcagcgtctcctgttgcatgttgcactgcacctatctacgacgtccgttcccagtgctttgctcaccgacaccgtatcttatgagcaaggagccctgctgctcccatcaccttcatcaagccaagcgtgtgtcctctgtcctctcccagctgcgagctccgacccccggcaccatgtccgacagcagcgacttcgccgagctgctatgggagaacggccaggcggtggtgcacgcgcggacgaggaaacacccgccccagcaggccgccttcccgcccttcaccttcacctgcagcagcagagctcaacaaaggcagccggtgccgccgctgctcaagacgggaggaggtctctttgccgacttctcctcggccaccgccggcctagacgccccccgtgacaacgccgacctcgacgacaccgtgccgtggatccactaccccatccccatcgtcgacgaagccagtcccgccgcgcctgccctggcagatagcttcatcccagatttcttctcggagctgcatgcggcggcggcgacgacgagcctcggccctctgccaccaccaccaccaccaccaccagcagtccagcacaccggcgacgacaacgacaaccggagcaccccggttcccaatcccaccaccggcagaggaccagagccctcaaaggaaacccaccgcgcaccagtaccaggtccagccggcaggcctgagccacaaccacaagctgagctcgcgcccgccaggaagcctcggcaggagagcggcggcggggaggctttgatgaacttctccatcttctctaggccggcagccatggcgcgtgccagcctgcggcagaggccgccacagacaggcaccgacaaggcgtccaatgccaccacgagcacccgcgtggagtcgacggtgctacagtcggccagtgccagtgggccgagaactgcagctgcccccgccgtgttcgtggaccagaggacggcgtggccgtcgcagcagcccaaggaggtgcggtttccatgcgcagcagcagcgccaccgccgacgccgacggctggtaacctgcagcaagaaagacctagcaacaacaacatgactcctccgcagaaagaagtagagaccaggaaggcgtcagaggctgcgggcgccaccgccacctcatcggtctgctccggcaatggtgctgggacaggaaaggacgacgagtcctggcgccaacagaagaggaagaccctgcaggccgagtgttccgcgagtcaagatgatgatcctgacgatgagtccggtgggatgagaagatcgtgcagcagaggtgcgaagcgcagccgcaccgcggaggtgcacaacctgtccgaaagggtaagtcccatgccaatatgccatgcgatcgatctcgagctggagcctggagctgtgcacttgaactcaccgcactgtaatgcatgcaatgcaatgcaacaacaaacctgcagaggagaagggacaggatcaatgaaaaaatgcgtgccctgcaagagctcatccccaactgcaacaagattgacaaggcctccatgctggacgaagcgatcgagtacctcaaaaccctccagcttcaagtgcagatgatgtccatgggaagtgggctgtgcattcctcccatgctgctgccaccagccatgcagcacctgcagattcctccggctgctgctcacttccctcatctcggcatgggattgggttacgggatgggtgtcctcgatatgaacagcgcggcggcggcggcggcggcggttccatttccgcacatgcccggtgctcacttcccttgcccgatgatcccaggcgcgccactaccacggggtctcggaatcggaatgcctgccagaaacacgatgccggtgttcggagtccctcctgggcaaccaatccagccaccattcccatctttggcgggccttcctgtcaggccaaacctggcacctcctcacgcctcctcagccgccatggctaacatggtgcaggagcaacagcagcagcagcagcatcagagcctgaataatggagcatcaacagcagcagcaacagcatcagatcctcagactatcgtgcagtgtgccctcttcagcacaaaccgagagcgatcagtttttggatggtggtggcaacagggctatttgtacaggaagaaatgaggctgaaacatgaaaaacactcagcaggtctcgactaacaggctgcagatgtgaatatcagcgccaactcatcctggaaaagagcctaacgagtttcaagatccacgaagcagatccgtcagttgaaaagagtccaatcaatcaagacagggccatgacaggacgtctagctttagcgagctaagatgctcctaagttttgtgtcaaatgtagatggtagatggaacctggttacaagaaacatttcttggcagccggtgctttttttctttttttttgggattcactgaagttttcttggatcagtatgtcttatttcctcaggcattcagtgatcatatgcacaaagatatttgtgtccatatactggctctgctttaactatatctctttgcaaataataacgagctagctaacaattgttcaaagctgcatgcttaagcagatatgtaaccacattattctgcagatgtatgcatagggccaaaagag

SEQ ID NO: 216454 - DNA, 1761 bp, Zea Mays
gcagggatgaagagagacattctaccgtgagatcagcggtggaagatggcccggcgcagccgcgacaggatcgagctccggtgtgcgcgacgggtccggagcggagcggagcggagcgggggagaaggcatataaaatgcgaaggaagaatccgttcctctgcttgatctgtgttgtagatgagacgagaagcggaggattaacagagcaggaaggtgaattgggcgcagagactctcagacgcgcagtttttgaagctcgtcgcgaaatgaaggaggcgaggaatcactaccacacccggggctcctcgcgcggcggcggcggcaccactgccgagcgcgacctggtgttacagtggggcaaccggaagcgcctgcgctgcgtcaaggtgcagcgccgtgacgtcgaggccgccgctaccgtggccgccgagaaagccgccatcagccagcgccgcgccgcggccacagctgcccagcaccacccagacggccacacccaccaccgtgttttcaggaacacagaagagtttgcgatcatgaaatcgccagcacggcaacaacagaacagcaggatcgacgcagttgcttcaccggacagggagtgccctggtagaggtaacaacaacaacaacggaggtccacagacctgtccagatgacaagaaaggctcttcatcggggagtgaggggtccatctggccgaagtttgcagtcaccctgtcgaacagggaaaaggaagaggatttcctggtgttcagaggatccaagctgcctcaaagacccaagaaaagagccaaggtcatccagagaactgtcaatttcgtatgcccaggaacgtggctgtgtgacctgactcttgaaagatacgaagtccgagagaagaaggtttccaagaagcgccccaggggattgaaagctatgcacgacttggacagtgactcggaataaaaaacagagagagaagagatcactgaacatgagaagctgaacattagagagaaggccaggacagatgcagcagatggaggtcgaccataaagcttcctgatggaatgaggaccaacgggtcaccactcctcgcgattgatactggagatcgatttgtccaaaaggactaggtttttttaaaagcaaatggcaggagctctgcctatccattaagagagagggagagagagaaatttacaagaagtgagcacaataaaagcacgcccaaacataacgagggatcccaataagaagtcgtccctgctgctacaaaaaaaaaaggacttgtagcgatcggaggacgaccgagatgtcaggaagttgcacggaagaacagagaggagagctgcaggagctggagttcctgaacattagcaaactattcaattccctggaaagcagcaacgctgttttgctattctctcatgttaatatgaatggcgagctagccagtcctgtcgcgtctagtttgccttccgtagtttttttttatcctctggtgctgtatgaaaggtcagtggatattctttcaggggcatgagacagtgtccggcactctcagtccagtgcgagtggatcaggattcaggcaaacatagaccgacgatcggactttatgtgttttcaggactgccagacttgtaaattctgaaagtttcagtgaattttttttatagtttaaattttatataggcctaccctccgtataaaaaaattgagaactttttttacgtgatattggaagatgtttggcattggttttgcaaactctat

SEQ ID NO: 216455 - DNA, 1699 bp, Zea Mays
gcaacaactcgatgtcacgtgatgtcgtccgcgtcgacaagaaaaaggcagagacctgatctggtttggtttttatttgaagagaaattcaatttgaatgaatgtggacaaagatgtggtctgtctttttttcctgaagaactcgatttgtacatcgaattcgaagatgtggtctgtctttttcatgaagaactgataataccgaagttgctagttttctggtagtatggagtagtccgtgcccagtactgccgagttcagtatttgttggttttttacttgcatcgctaaaatcaggcctgtttttttttcttccaaaaaaggggtcctggaaggctaaaagaagacggtgtttagaacagaaatcttgatatcagttgcgaacactgagattagaagctagtttaaggaccaacaggctccttatcgccatcttcgatccatccagctgaatgaacacagaagagtttgcgatcatgaaatcgccagcacggcaacaacagaacagcaggatcgacgcagttgcttcaccggacagggagtgccctggtagaggtaacaacaacaacaacggaggtccacagacctgtccagatgacaagaaaggctcttcatcggggagtgaggggtccatctggccgaagtttgcagtcaccctgtcgaacagggaaaaggaagaggatttcctggtgttcagaggatccaagctgcctcaaagacccaagaaaagagccaaggtcatccagagaactgtcaatttcgtatgcccaggaacgtggctgtgtgacctgactcttgaaagatacgaagtccgagagaagaaggtttccaagaagcgccccaggggattgaaagctatgcacgacttggacagtgactcggaataaaaaacagagagagaagagatcactgaacatgagaagctgaacattagagagaaggccaggacagatgcagcagatggaggtcgaccataaagcttcctgatggaatgaggaccaacgggtcaccactcctcgcgattgatactggagatcgatttgtccaaaaggactaggtttttttaaaagcaaatggcaggagctctgcctatccattaagagagagggagagagagaaatttacaagaagtgagcacaataaaagcacgcccaaacataacgagggatcccaataagaagtcgtccctgctgctacaaaaaaaaaaggacttgtagcgatcggaggacgaccgagatgtcaggaagttgcacggaagaacagagaggagagctgcaggagctggagttcctgaacattagcaaactattcaattccctggaaagcagcaacgctgttttgctattctctcatgttaatatgaatggcgagctagccagtcctgtcgcgtctagtttgccttccgtagtttttttttatcctctggtgctgtatgaaaggtcagtggatattctttcaggggcatgagacagtgtccggcactctcagtccagtgcgagtggatcaggattcaggcaaacatagaccgacgatcggactttatgtgttttcaggactgccagacttgtaaattctgaaagtttcagtgaattttttttatagtttaaattttatataggcctaccctccgtataaaaaaattgagaactttttttacgtgatattggaagatgtttggcattggttttgcaaactctat

SEQ ID NO: 216456 - DNA, 2217 bp, Zea Mays
gcaacaactcgatgtcacgtgatgtcgtccgcgtcgacaagaaaaaggcagagacctgatctggtttggtttttatttgaagagaaattcaatttgaatgaatgtggacaaagatgtggtctgtctttttttcctgaagaactcgatttgtacatcgaattcgaagatgtggtctgtctttttcatgaagaactgataataccgaagttgctagttttctggtagtatggagtagtccgtgcccagtactgccgagttcagtatttgttggttttttacttgcatcgctaaaatcaggcctgtttttttttcttccaaaaaaggggtcctggaaggctaaaagaagacggtgtttagaacagaaatcttgatatcagttgcgaacactgagattagaagctagtttaaggaccaacaggctccttatcgccatcttcgatccatccagctgaatgtatttggagttattattattctctgaattttcagtattttctagcttatgtgccaattcgatttctgcatcacatgaatttttacgtgcccttttgttggtacagttttctcagactggtttgtgattttgcttcgccgaaactattacaagaaagaactcctagactgctgtcaataatagcttatccgtgttctcttaaaaaagggacttatcggcattacgataaattttgatggctgagtattctttgccttcatctgttgctatctttggactctagtcacatcatatcaactatattttgttgactaattttggattccgaagaaaacaacaattttatcttgaatcagtcaccaccacacgtataagtggatggtgagggcctgctcattattgctcttccttttgcatcctcgaattcatagcttggtgcctggacggtacgaagcgttggtataggtagtaggtggaagcttttgccttctatgttacccctctcccctaaattggaggaacacagaagagtttgcgatcatgaaatcgccagcacggcaacaacagaacagcaggatcgacgcagttgcttcaccggacagggagtgccctggtagaggtaacaacaacaacaacggaggtccacagacctgtccagatgacaagaaaggctcttcatcggggagtgaggggtccatctggccgaagtttgcagtcaccctgtcgaacagggaaaaggaagaggatttcctggtgttcagaggatccaagctgcctcaaagacccaagaaaagagccaaggtcatccagagaactgtcaatttcgtatgcccaggaacgtggctgtgtgacctgactcttgaaagatacgaagtccgagagaagaaggtttccaagaagcgccccaggggattgaaagctatgcacgacttggacagtgactcggaataaaaaacagagagagaagagatcactgaacatgagaagctgaacattagagagaaggccaggacagatgcagcagatggaggtcgaccataaagcttcctgatggaatgaggaccaacgggtcaccactcctcgcgattgatactggagatcgatttgtccaaaaggactaggtttttttaaaagcaaatggcaggagctctgcctatccattaagagagagggagagagagaaatttacaagaagtgagcacaataaaagcacgcccaaacataacgagggatcccaataagaagtcgtccctgctgctacaaaaaaaaaaggacttgtagcgatcggaggacgaccgagatgtcaggaagttgcacggaagaacagagaggagagctgcaggagctggagttcctgaacattagcaaactattcaattccctggaaagcagcaacgctgttttgctattctctcatgttaatatgaatggcgagctagccagtcctgtcgcgtctagtttgccttccgtagtttttttttatcctctggtgctgtatgaaaggtcagtggatattctttcaggggcatgagacagtgtccggcactctcagtccagtgcgagtggatcaggattcaggcaaacatagaccgacgatcggactttatgtgttttcaggactgccagacttgtaaattctgaaagtttcagtgaattttttttatagtttaaattttatataggcctaccctccgtataaaaaaattgagaactttttttacgtgatattggaagatgtttggcattggttttgcaaactctat

SEQ ID NO: 216457 - DNA, 1076 bp, Zea Mays
gttcgctctcgccaatgatgctatcagctcaatggcgtattgttctccagttccatgatcgtccaccagacctttcatgcccgtccctttactgacaaagcatagctagcttgactgggagagaaaaaatgttcttgagtcaccatcgttttctgtttttcgagtcaccatctgatgtaagtaaaggtaccaagaccttgtgagcttggagtctaagggagcactgcgaccgttgttagatcttccatttttcttgaagcaatcgcagaggaagatggtggtgtcgaagaagaagctgatcaaggtcggcccatggggcggcgccgggggacacccgtgggacgacggcggctactccgggatccgcagcatcaccatgtcctacgaccggttcatggagtccatcagcgtggagtacgacagggacggcatgcccgtcactggggagcggcacggaggagccgccgccagccacacgacccagatcaagctgggctacccggacgagtacctgacaacggtgagcgggcactacgcgccgatcgcgcccggcggctcgccggtcatccgctcgctggcgttccggaccaaccagggggcgtacgggccgttcggcgtggcggagggcacgcccttcgagttcccggtggacggcggcgtcatcgtcggcttctgcgggaggagcgggtggcagctcgacgccgtcggcctctacgtcgcgccgctgcgcccggagaccgtgtacgacagggtgcacaagcttggcctcacggcttaccgcgcagtttggcagcggatcgggtcccagcagcagcagcaagaaccggtgaaactgctgaacggcaacgcgcagattactcacaagatgtaaccaactgccaggatgccaaccatgactatctatattctgcagtccgaatgtatccagctagcgtatggatctaatgtacctgtacctcatcctgatttgaacacttcagcgtatgaatctaaacatgcagcaaacagtcctgcgacgggacttggctgctggccacgtctaacagcaatagttggtattttcattcctaagccac

SEQ ID NO: 216458 - DNA, 850 bp, Zea Mays
ccgttgttagatcttccatttttcttgaagcagcaatcgcagaggaagatggtggtgtcgaagaagaagctgatcaaggtcggcccatggggcggcgccgggggacacccgtgggacgacggcggctactccgggatccgcagcatcaccatgtcctacgaccggttcatggagtccatcagcgtggagtacgacagggacggcatgcccgtcactggggagcggcacggaggagccgccgccagccacacgacccagatcaagctgggctacccggacgagtacctgacaacggtgagcgggcactacgcgccgatcgcgcccggcggctcgccggtcatccgctcgctggcgttccggaccaaccagggggcgtacgggccgttcggcgtggcggagggcacgcccttcgagttcccggtggacggcggcgtcatcgtcggcttctgcgggaggagcgggtggcagctcgacgccgtcggcctctacgtcgcgccgctgcgcccggagaccgtgtacgacagggtgcacaagcttggcctcacggcttaccgcgcagtttggcagcggatcgggtcccagcagcagcagcaagaaccggtgaaactgctgaacggcaacgcgcagattactcacaagatgtaaccaactgccaggatgccaaccatgactatctatattctgcagtccgaatgtatccagctagcgtatggatctaatgtacctgtacctcatcctgatttgaacacttcagcgtatgaatctaaacatgcagcaaacagtcctgcgacgggacttggctgctggccacgtctaacagcaatagttggtattttcattcctaagccac

SEQ ID NO: 216459 - DNA, 3908 bp, Zea Mays
atcagcactgcaggggtctactgaggcactccaagtggggaaatggcggaggcgacgaattcgagcttgggcacgtaggcgtcgctcctgccatcgccgcagcggtcactggactctcacgccgccgccgccgccgccggagaccattagttctcctgcgcggcggctccgcggctcccgccctctcccttaccttcttcccgctagggttttctccgatccccaatcactgctggttcacaaatggcttcatctcagcatgttgagatggaggctgcgaaacttctacataaacttatccaggagtcgaaggatgagcctgctaaactagcaacaaaactttacgtgatatgtcagcatatgaaactaagtggaaaggagcaatcactgccatatcaagtcatatcaagggctatggagacagttgtgaaccaacatggaattgatatggatgcattgcgatcatcacgaattccatttgctggtggtcctcaggcaggggattctagtggtgtcatgtcaaaggacaaggaggtcattggtaaccagtctcccatggtcggaagtgatgcttcccaaagtagtggacaagctggattatggcagcttccatcaggttcaaccgatatgataagacatggggcatctatttcaggtagggtacccacagggccaaataggggagatttctcagcagctgatattcatcaaggctccatgtcacaaaaaagcggtagatcctctggcattgaaagccctgcaagtctgcagatggaggacaccagatctatgaattcacatgattctttgaaatccgatgagaaaacaagtaagaaaacctcttccaagagaaaaaggatggattcaaaaggagctggtgatttgcgttcagaagacaactcaaagtcagatgttatctccactggacagaataccaggaaggggaaacaggttggtaaggctggtagacaaggtcagccttccatgggaattgagcatgagcagcaacctcataaactgcaaggtggtactggtcaggtaccacctatacatggtggtgcaccttttctcaggactcgctcagaaggtccttctgggaggacaatggacaagactaaaccatcaaatccattctcaatgggtcaaattccaaattttcctgaagggctggcttctactggtgctccaatcgagttgcagaaaagtatacagggtggagcaagtttatttaatcctggttttggctggaaccaaaatccacaagttcaaaccttgaagaattctcaaggttctattcataatttagtgaggtctggagttactgttgaagggaaagttaatgtaggggcacaaggagcttttaactctgcctctgcaccacagatggaatttcccacagttcctccatacaacccctcttccttcggagctagctcacagtttctggacaaaggcaaggagttggtttccagcattataagcactgaacctcattcatctaaagttgcatctcagcctgggatttctcatggaagtcccatgcaagaaaggcaaggtatgatcagggtgccacagagaggcgaggcatcatttcaggaacgcaggccatcttcacttccgagtagaagtactgggccaagtccaatgtctcacatttcttccaacacaccatttaaagaacagcagctgaagcagctcagagcacagtgcttagtatttcttgcatttaggaataatttgcagcccaggaaggtacatcttgaaattgctttgggcagagggcctcctgcagaaagtgacagtgcaggtcaaaggggcagcgagggcagagtgtctgatgctctgggaaaggaaaatggtagcagtcgggagaactctggtgtcttttgtaggcaaactgatatctctagacttccagccacatctgcaggaagtattgcagaggatgattccttatcgaaggatccagaaaatgctacaaaaaaaatcaagttagctgaacaggagaagtcattgatggaagtagaaaatgtccagcaagcttctgttatgcaaggaactagttctgaaatgcgttcccaagaaactgcatctcaaaatccatatcgaccacaacagtcatattatcaaggagatacaagaagaatcgcctcggatatccataggactgatgctgaaattttgaaccagaatttaagttggggaggccagggatctactgctttgggtggtactagacagcttctgaatcaggaaactaaagaatcacttgcaccttcaaagtcacaccatatgcctgttgatggttacaactccaatatacaaggaatagatcggactccagagatagctggagctggtaatgatgttgaaaattgtagccacgtagcagatattgtgcctgagcaggctgctgatgaaggagatgaggacctctcagagcatgaggatttattgtcatctccaaagcacacaatgacggaaaaatggatcttagattaccagaagagaatttacaatgagaaacaaaagagaacattggagcagcataaggtacacagcagaatgtcagcaacatatgaggagctaaaggagagcgttaattcatccgaagatctttctgcaaagaccaagagcgtcattgaattgaaaaagcttcagcttctgccacttcaacgtcgtgtacgcagtgaatttttgctggattttttcaagcctaatacatccgacttagagcgcataaaatcactgaagaaacataggcatgggcggcgggtgaaacagcttgaaaaaattgaacagaaaatgaaggaagaaaggcaaaagagaattcgtgagagacagaaggaattctttgctgatattgaagcttacagagagaaactcgaggataacttcaaggttaagagagagcgcttgaaggggttcaatcgatacataaaagaatttcacaaaaggaaagaaagaattcatcgggagaaactggataggatccaacgcgagaaaatcaacctgcttaagaacaatgatgttgaaggttatcttagaatggtcaaggatgcaaaatctgatcgtgtcaagcaactattgcgtgaaactgagaaatatcttcagaaacttgggaacaaattacagagtgcaaagtccacagatggccgctcatcttttgttactgataagagtgacactgcaaacgacattgaagatgagagctaccagccacagcattatctggaaagtaatgaaaagtactatcaactggcacacagtgtaaaggaaactgtaaatgatcagccatcttatcttcagggcggcaaattgcgagagtaccaaatgaatggcttgcgttggctggtttcattgtacaataataatttgaatggtattttagcagatgagatgggccttggtaaaacagtacaagtaatctctttgatatgctaccttatggaaacaaaaaatgaccgtgggccttttctcgtggttgtaccatcatctgttcttcctggatgggaatctgaactcagcttctgggcacctagtataaataaaattgcttatgctggtcctcctgaagaaaggcgcaggatgttcaaagagatgattgttcatcagaagttcaatgttcttctgacaacatatgagtacttgatgaacaagcatgataggccaaaactaagcaaaatacaatggcactatataataatcgatgaagggcatcgtattaaaaatgcttcttgtaaacttaatgctgatttgaagctttatcggagctctcatcggatattattgacaggaacacctcttcaggtattttctccaatatatgccacatgcagaacctgtgtactgtatcaggaagattagaggcaattgctgatttcatacttgcatcttcatcggtcacc

SEQ ID NO: 216460 - DNA, 2428 bp, Zea Mays
cagagaaaagccgaaaggtccgcgtcctcggtgcggagaacggcggcggaggagaggggtccgtcgctcagccagccggccccaaagtcgccctccctgctggccctctcgctcgcgttttttttcggtggcatccccctcgcccgacggagcattcagggactgcatgcgaacgcctgagtcaggcctgacccgcgctgattttaggctgccggctgccaagatataaaaaagatcgcttatcgccggcgccaagtgcagttaccaatacatcatgtcaagggacgcgtggtccgtgctggcggtttcggtctgcctcttggcttgccccgtgacgatcggcgggttctcgtggaacatcttctcctccccgtccccgtcgacggccgccacgggcggcgaccgcggtccggcgatggcgctcgacggcgcggtggccgacttcgccatggacggggccggtgggcccagagggctcaagctgctggagaacgcgcggggcaagctcgccgggccgcggaactgctggcaggatgcgtacggaaagctgttcgccagctgcggcgagatcatggccgacaaggagaggcagtcgcgcctggcgtggcacctcagcagctgcttccaggaggactcggggcgctcgcccttcccgtcctgcgccgagggatccgagatggtgcactgccgcaagcggctcggtgagtcccaagacaaggtcttcctcgagttcttcttggagaccaacaccctgtgccaccaattgcaggctgaagctttcaagcacaacaccgagagactcgtcaacgacctcacaaggacatccaagtatgccgaggagaagctcgaggtgatcgaggagagggctgaccacatcatcaaagagtcgagcaaagtccaggacacactgtcgtcgatcgagatgcagaccgacaacctggcagaggcgtcgaagcacgtcggggtgcagatcaacgacgtgctgctccactccaagtccatcttcgagcagtccaaggagatcgccaccgctcaggctgaactgggcagagggcaggcggagatgagggagaagatcgaggccggcatggcgcgcgttgaggagtcgtaccaaacgctaggaaacgggatggataagctgaaacaggagactggatatatccacaaggaaatccaaagtgtcggtgcgtcgatgtcttcgaagatgcagcatttgcagagcaccgctgatgacattgggagtgctgctggaaagtcgttggagaaccagatgcagctactgaatggacaggcccaggccatggatggactgaatgaactccacagctttcaagcacaagctcttgaagaaagcagggaaacagttcagagacttgcacagtttggccagcgtcagcaggaggagctgctgtcccgacaagaagagatccggcaagcccatgagcatctcatccagaattctcactccatactggaagcacaggaagagtttagagcaaagcaggctaacattttcgctgctctggacaagctgtacattctgcacaacgccattctagccgagtctcgcttcatcaaggcctttttcttctactgctgcattgtgttcctcgtctacatgctcaccagcgcaaagcagacgttcagcatcaggggccacctctactttggcctgtgcttcacgcttctgttggagatagggctgatcaaactcggtgctgacgacttcgacaggcagttctgggtcatgtccaaggtgttcttggtcagaatggcgttcctcggcgctgccactgttcagatcctgcactccatattcacctacagggactacgaagtgctgaactacgggctgctccagacgctggtggagaaggtccgggcgctggaggaaaacgccggtgggagggcaccgtcgtacgcctcggagtcggaggagagcctgagggactactcgtgggtcttcgacgagctggcagacgacgtggacagcaagatggacccaacctatgtcgtgccgccggagaggtcacctccaactcgacggcgcgaccaaatcgtcgtggcagaggagactggcgagaactccgtcaccacgtttgtctcccggaaatacaatctgcgggcacgaaaataggcagcggtctggtttttttttagttccgaaagagctattttgagtgccgcatcagatgttggtgaaattttaatttacacgttggtctaccgcattgtaaagaagctaccattcggaaataaaatcacgctggagaaatctcgtgtgctattcagcattttgcaattttcatgcttccattcgagcggctaccagtgatgtttttttttccgtttttggtccaaagagcaagatgttttattattgtttttgtttttactatgtgaaactgtccatgcgttgcaaggtgag

SEQ ID NO: 216461 - DNA, 2341 bp, Zea Mays
gttactgctcgcgccgccattaccttccgttcttcattgggagattgaattttgcggcaaccactagtttagggactgcatgcgaacgcctgagtcaggcctgacccgcgctgattttaggctgccggctgccaagatataaaaaagatcgcttatcgccggcgccaagtgcagttaccaatacatcatgtcaagggacgcgtggtccgtgctggcggtttcggtctgcctcttggcttgccccgtgacgatcggcgggttctcgtggaacatcttctcctccccgtccccgtcgacggccgccacgggcggcgaccgcggtccggcgatggcgctcgacggcgcggtggccgacttcgccatggacggggccggtgggcccagagggctcaagctgctggagaacgcgcggggcaagctcgccgggccgcggaactgctggcaggatgcgtacggaaagctgttcgccagctgcggcgagatcatggccgacaaggagaggcagtcgcgcctggcgtggcacctcagcagctgcttccaggaggactcggggcgctcgcccttcccgtcctgcgccgagggatccgagatggtgcactgccgcaagcggctcggtgagtcccaagacaaggtcttcctcgagttcttcttggagaccaacaccctgtgccaccaattgcaggctgaagctttcaagcacaacaccgagagactcgtcaacgacctcacaaggacatccaagtatgccgaggagaagctcgaggtgatcgaggagagggctgaccacatcatcaaagagtcgagcaaagtccaggacacactgtcgtcgatcgagatgcagaccgacaacctggcagaggcgtcgaagcacgtcggggtgcagatcaacgacgtgctgctccactccaagtccatcttcgagcagtccaaggagatcgccaccgctcaggctgaactgggcagagggcaggcggagatgagggagaagatcgaggccggcatggcgcgcgttgaggagtcgtaccaaacgctaggaaacgggatggataagctgaaacaggagactggatatatccacaaggaaatccaaagtgtcggtgcgtcgatgtcttcgaagatgcagcatttgcagagcaccgctgatgacattgggagtgctgctggaaagtcgttggagaaccagatgcagctactgaatggacaggcccaggccatggatggactgaatgaactccacagctttcaagcacaagctcttgaagaaagcagggaaacagttcagagacttgcacagtttggccagcgtcagcaggaggagctgctgtcccgacaagaagagatccggcaagcccatgagcatctcatccagaattctcactccatactggaagcacaggaagagtttagagcaaagcaggctaacattttcgctgctctggacaagctgtacattctgcacaacgccattctagccgagtctcgcttcatcaaggcctttttcttctactgctgcattgtgttcctcgtctacatgctcaccagcgcaaagcagacgttcagcatcaggggccacctctactttggcctgtgcttcacgcttctgttggagatagggctgatcaaactcggtgctgacgacttcgacaggcagttctgggtcatgtccaaggtgttcttggtcagaatggcgttcctcggcgctgccactgttcagatcctgcactccatattcacctacagggactacgaagtgctgaactacgggctgctccagacgctggtggagaaggtccgggcgctggaggaaaacgccggtgggagggcaccgtcgtacgcctcggagtcggaggagagcctgagggactactcgtgggtcttcgacgagctggcagacgacgtggacagcaagatggacccaacctatgtcgtgccgccggagaggtcacctccaactcgacggcgcgaccaaatcgtcgtggcagaggagactggcgagaactccgtcaccacgtttgtctcccggaaatacaatctgcgggcacgaaaataggcagcggtctggtttttttttagttccgaaagagctattttgagtgccgcatcagatgttggtgaaattttaatttacacgttggtctaccgcattgtaaagaagctaccattcggaaataaaatcacgctggagaaatctcgtgtgctattcagcattttgcaattttcatgcttccattcgagcggctaccagtgatgtttttttttccgtttttggtccaaagagcaagatgttttattattgtttttgtttttactatgtgaaactgtccatgcgttgcaaggtgag

SEQ ID NO: 216462 - DNA, 4914 bp, Zea Mays
cttttttataatgggatgattccagatttctctatgttttataacctttggccccgtctggcagcaacacagaagcgtcgctcacatcaacatcacatgttcacatccatcttcgaaccccttcttcctctcttcagcgccgcacccgcgcccgcgccgtcgaaggcggcgcctagtctcgaggcttgcacgctgccgcggaggatcgcctcgctactgcgcgccatcgcctccgatctcctctatctccaatctgctccctcatcgccgtgcagtggaaactaggggaccgattcctcttctcgtttgtcgcatatttctcgctgcgtgccgcgtgctgcggtgagtgattctccaagaattctggggacgctgatctgagtccgcacagaacgcagcggcagcaatgatgatgtcggacgatgacgatgctgagccccagctcaacgcggtggagggctactacttcgttgactccaagaacgagaaggagcctgtctgcttctccaccctgcctttctggttcggggacactgatgatcttcctgacggcaagaagaagctggtgctgcgcgggactggtgacccgggcgtcaaggtgtacgatgaggtggtggcctgcaggctgggtctcgaggggaaacaacccgagtttgcagtgctcacagcaaaaggcagacgttggatacgtctcattaggcccttgaacagctacgaggaaatgatcaggactgtgttgatcacagcgcagatgctgcattttctaaggaggaagcctcatgagccagaaaaaaccttgtggaaccacctttgcaaagtttttaacaagtttgacgttccaccctcagaggacgatttcaggaaccactgctcactgatgaagcagtttgcggcaaaagatcctgtcttagcaaaatcagagattttgcgagtatttattgaaggaaaatctagaaaaaaattcactgaggttggtgcagaccatattgatgtcaagcagccgttcatcactgatgatgagggcatagatgaaatgaatgtggaagatgtcgataatgaatctgatgaagatgacgatgaatatttgtttgattcaatatgtgctatttgtgacgatggaggagacatattatgctgtgatggcccatgtatgcgctctttccatgcaaaagaaggaagtggtgaagactcctgttgtgttacccttggatacactgaggcagaagttgaggcaatgaaattatttctttgcaagaattgtgagtataagcaacaccagtgtttcatctgcggagtgttggaaccttcagatggagaagcagccaaggtgtttttatgtaacaatgctacatgtgggcacttttaccacccgaaatgtgttgcccaacaacttcaccccatcaacattgatgaagcctcagaattggagaagaagataacagaagggttttcatttacatgcccaattcactggtgctttcattgcaaaggtttggaggatagaacacaagaacctttgcaatttgctgtttgcagacgctgtccaaagtcatatcacagaaagtgtttaccaagcgaaatttcctttgacgaaaatgaagaggacgatatcatcatacgggcttgggaattatcaaaaagaattttgatatactgcctggaccatgagattgatagtgaacttgagacacctgtcagagatcatatcaagtttccaaagattgaaaaaccacttcaatttgtaaagaagggatctagcttgttgcctaagaagaaaaagaggacttacagtgagacagttcttgagcaatctcccaaagatactgtgaaaaggaaaagcaaggttcacatgctagaaagggaacaaaacaaacaagacaccagagaagtttctgcaaagagtttcactcaaaaccttgttgacacacctgtaaagaaaaaagccaagttgaaagagaaaatacagttgccgtatgtggccaaggatcattttataagcagtccaaaatctgtgaaagagcaagaacaagagttggtacctttgcccttatctgccatcaggaagagttcatttcctaaagtggacagtgaaactgaaaagagggtgattaccatattgggaaataaagtgtcttcattgacaataaaagatgtaacgaggaattgcagtttgccatcaactcatgtatactctggcagattgactgacaagataccactgggaaagattgaacgttctgttcaggctgtagaagcagctttaaaaaagctggaaaatggaggtagtgtcaatgatgctaaagcagtatgtgaacctgaagttttaaggcagcttgcaaggtggcatagtaaactcagagtgtatatatcaccttttattcatggcacaaggtacagttcctttggtagacattttacaaaggtggagaaacttgttgagattgttgatagacttcactggtatgtggaaactggtgacatgatagtagatttctgctgtggggcaaatgattttagccgtcttatgaaagaaaaactcgacaaagttcagaagaagtgccatttcaagaattatgatcttatccaaccacagaatcgcttctgctttgaaaagagggattggatgactgtgcagccaaacgagctgcctcatggatcccaactaattatgggtcttaatcctccttttggagtcaaagcaagtcttgcgaacaaatttattgacaaagcattgacattcaagcctaagctcattgtactaattgtccctaaagaaactaaaaggttagatcagaggagaacaccttatgatttgatttgggaggacagtgagtgtctttctggcaagtccttctatttgcctggttctgtggatcttaatgataaaatagttgaagggtggaatgcatctgcgccacccctctatttgtggagtcatcctggttggacaaagaagcacatgcaagtggctgaagagcatggtcatacttgtatggggaagatagcttgccatgttgaagagagtaatctatcagatgacctgtccgtgaggaaacaatctgatgctacaaacaaactgaactcgagatcagggaaagagactccattcaatgacagaatgtccaatctacttgatgatggttctgctaggaagcaagcaagatctgaagaagagaagagaactctagggaagatagaacaccatgtgaaaaaggctaatataccagataacctcccagtgaagaaagaacctgaagcttccagcaaagtcatgtcgcattctggaaaagatagaaagattggcagatacaacaggaggagacatgacaacaggagcagcaaggggacacctgatcacacagagagcctcccccctgaaaagcaagtggaagttgcatatgaggaaacaagagttattcctagcaaaaagattgctcataatgaaaaaaagagcgcgcagtacaactacgagcaaactgcagcagggatgccaaacatgaggtctagaggaggggattctgacatgagtatctcacccccagtcagttgcaatgctcgaagcaaacccatgagctattccctgacgagaccaattgaacacttggatacgaatgctcaccttttggcagaagaacctagtgactctgtgctcaatagggttccaaatcatgacagttatttggcaatcaaagaggaatactgtgatggatttaagaggaaaaatgatcctatcttcagtcacattgatgatagctcaaggatgaggggctccagcatcgaagaagtgaccaagccgtatattactgctccaaacagtgatccgtggtctaaaggagatggcagcttttacaggcatccgagctcagaagatttaaacgctaatgctgatgtgcttatgccaggatacagtgcaagatatggacaaattggtggtgacagtaacccacaagctagtatggtcccactagcaacagattcaagactgcatggtggaacggttgctgataattacctctcggcaagatactcccttggatcttcaggtgctcgcgttagccaaccagctccaactgttcccccttttgggctctcaggtgcaagttcacaacgaggctcagtaatggacaggtattcgtatgggctttcgggtccgactggaacacagcgctcagttattgacaggtatgcgccgtccctcgatggaacgaacacaacaagatcgaggagctccttgcctgagcagtacccgttcggacaacctggctcttccggtggcgggtggcctcatcactgatcgctggaacttggtcctcagatttgaccagcaaaagtgcaaccgatttcttgagtccggtggagcctacaacctatctacggcctaactttttggatcctactagtcgtttcttcctggcgccttcgacgaagacatcacctgtgtctaccaatacagaagtgtagacttcaattcctacaaatacagaagtgtaggcttcaatcctattgtttgctctggatttctgtttatgagcgtatttacaagagtatgtttggtctatgttagtatattaggaatacaattccaaaaccgttgtaccgtgccaaagtttaatactatacgtttgggtctgtcgatgagaaaaaaggacgagtgggtgagaagatgctgccctccgcagaactcgatcaggccggttcctctgcgcgtcctgctatgagaggctaacctgagcccgacagaaccggcttggtcgatttgggacctggtaggccggtatttttttattgaagtgtaactttctaaattaggtcttgttggtttgcgttggattgcgtccggaatcgtttcaagtttatataaattagagaagcaatccggttagaaatcgtttcgatccactaatcctaaacaac

SEQ ID NO: 216463 - DNA, 4818 bp, Zea Mays
cgtctggcagcaacacagaagcgtcgctcacatcaacatcacatgttcacatccatcttcgaaccccttcttcctctcttcagcgccgcacccgcgcccgcgccgtcgaaggcggcgcctagtctcgaggcttgcacgctgccgcggaggatcgcctcgctactgcgcgccatcgcctccgatctcctctatctccaatctgctccctcatcgccgtgcagtggaaactaggggaccgattcctcttctcgtttgtcgcatatttctcgctgcgtgccgcgtgctgcggtgagtgattctccaagaattctggggacgctgatctgagtccgcacagaacgcagcggcagcaatgatgatgtcggacgatgacgatgctgagccccagctcaacgcggtggagggctactacttcgttgactccaagaacgagaaggagcctgtctgcttctccaccctgcctttctggttcggggacactgatgatcttcctgacggcaagaagaagctggtgctgcgcgggactggtgacccgggcgtcaaggtgtacgatgaggtggtggcctgcaggctgggtctcgaggggaaacaacccgagtttgcagtgctcacagcaaaaggcagacgttggatacgtctcattaggcccttgaacagctacgaggaaatgatcaggactgtgttgatcacagcgcagatgctgcattttctaaggaggaagcctcatgagccagaaaaaaccttgtggaaccacctttgcaaagtttttaacaagtttgacgttccaccctcagaggacgatttcaggaaccactgctcactgatgaagcagtttgcggcaaaagatcctgtcttagcaaaatcagagattttgcgagtatttattgaaggaaaatctagaaaaaaattcactgaggttggtgcagaccatattgatgtcaagcagccgttcatcactgatgatgagggcatagatgaaatgaatgtggaagatgtcgataatgaatctgatgaagatgacgatgaatatttgtttgattcaatatgtgctatttgtgacgatggaggagacatattatgctgtgatggcccatgtatgcgctctttccatgcaaaagaaggaagtggtgaagactcctgttgtgttacccttggatacactgaggcagaagttgaggcaatgaaattatttctttgcaagaattgtgagtataagcaacaccagtgtttcatctgcggagtgttggaaccttcagatggagaagcagccaaggtgtttttatgtaacaatgctacatgtgggcacttttaccacccgaaatgtgttgcccaacaacttcaccccatcaacattgatgaagcctcagaattggagaagaagataacagaagggttttcatttacatgcccaattcactggtgctttcattgcaaaggtttggaggatagaacacaagaacctttgcaatttgctgtttgcagacgctgtccaaagtcatatcacagaaagtgtttaccaagcgaaatttcctttgacgaaaatgaagaggacgatatcatcatacgggcttgggaattatcaaaaagaattttgatatactgcctggaccatgagattgatagtgaacttgagacacctgtcagagatcatatcaagtttccaaagattgaaaaaccacttcaatttgtaaagaagggatctagcttgttgcctaagaagaaaaagaggacttacagtgagacagttcttgagcaatctcccaaagatactgtgaaaaggaaaagcaaggttcacatgctagaaagggaacaaaacaaacaagacaccagagaagtttctgcaaagagtttcactcaaaaccttgttgacacacctgtaaagaaaaaagccaagttgaaagagaaaatacagttgccgtatgtggccaaggatcattttataagcagtccaaaatctgtgaaagagcaagaacaagagttggtacctttgcccttatctgccatcaggaagagttcatttcctaaagtggacagtgaaactgaaaagagggtgattaccatattgggaaataaagtgtcttcattgacaataaaagatgtaacgaggaattgcagtttgccatcaactcatgtatactctggcagattgactgacaagataccactgggaaagattgaacgttctgttcaggctgtagaagcagctttaaaaaagctggaaaatggaggtagtgtcaatgatgctaaagcagtatgtgaacctgaagttttaaggcagcttgcaaggtggcatagtaaactcagagtgtatatatcaccttttattcatggcacaaggtacagttcctttggtagacattttacaaaggtggagaaacttgttgagatagtagatttctgctgtggggcaaatgattttagccgtcttatgaaagaaaaactcgacaaagttcagaagaagtgccatttcaagaattatgatcttatccaaccacagaatcgcttctgctttgaaaagagggattggatgactgtgcagccaaacgagctgcctcatggatcccaactaattatgggtcttaatcctccttttggagtcaaagcaagtcttgcgaacaaatttattgacaaagcattgacattcaagcctaagctcattgtactaattgtccctaaagaaactaaaaggttagatcagaggagaacaccttatgatttgatttgggaggacagtgagtgtctttctggcaagtccttctatttgcctggttctgtggatcttaatgataaaatagttgaagggtggaatgcatctgcgccacccctctatttgtggagtcatcctggttggacaaagaagcacatgcaagtggctgaagagcatggtcatacttgtatggggaagatagcttgccatgttgaagagagtaatctatcagatgacctgtccgtgaggaaacaatctgatgctacaaacaaactgaactcgagatcagggaaagagactccattcaatgacagaatgtccaatctacttgatgatggttctgctaggaagcaagcaagatctgaagaagagaagagaactctagggaagatagaacaccatgtgaaaaaggctaatataccagataacctcccagtgaagaaagaacctgaagcttccagcaaagtcatgtcgcattctggaaaagatagaaagattggcagatacaacaggaggagacatgacaacaggagcagcaaggggacacctgatcacacagagagcctcccccctgaaaagcaagtggaagttgcatatgaggaaacaagagttattcctagcaaaaagattgctcataatgaaaaaaagagcgcgcagtacaactacgagcaaactgcagcagggatgccaaacatgaggtctagaggaggggattctgacatgagtatctcacccccagtcagttgcaatgctcgaagcaaacccatgagctattccctgacgagaccaattgaacacttggatacgaatgctcaccttttggcagaagaacctagtgactctgtgctcaatagggttccaaatcatgacagttatttggcaatcaaagaggaatactgtgatggatttaagaggaaaaatgatcctatcttcagtcacattgatgatagctcaaggatgaggggctccagcatcgaagaagtgaccaagccgtatattactgctccaaacagtgatccgtggtctaaaggagatggcagcttttacaggcatccgagctcagaagatttaaacgctaatgctgatgtgcttatgccaggatacagtgcaagatatggacaaattggtggtgacagtaacccacaagctagtatggtcccactagcaacagattcaagactgcatggtggaacggttgctgataattacctctcggcaagatactcccttggatcttcaggtgctcgcgttagccaaccagctccaactgttcccccttttgggctctcaggtgcaagttcacaacgaggctcagtaatggacaggtattcgtatgggctttcgggtccgactggaacacagcgctcagttattgacaggtatgcgccgtccctcgatggaacgaacacaacaagatcgaggagctccttgcctgagcagtacccgttcggacaacctggctcttccggtggcgggtggcctcatcactgatcgctggaacttggtcctcagatttgaccagcaaaagtgcaaccgatttcttgagtccggtggagcctacaacctatctacggcctaactttttggatcctactagtcgtttcttcctggcgccttcgacgaagacatcacctgtgtctaccaatacagaagtgtagacttcaattcctacaaatacagaagtgtaggcttcaatcctattgtttgctctggatttctgtttatgagcgtatttacaagagtatgtttggtctatgttagtatattaggaatacaattccaaaaccgttgtaccgtgccaaagtttaatactatacgtttgggtctgtcgatgagaaaaaaggacgagtgggtgagaagatgctgccctccgcagaactcgatcaggccggttcctctgcgcgtcctgctatgagaggctaacctgagcccgacagaaccggcttggtcgatttgggacctggtaggccggtatttttttattgaagtgtaactttctaaattaggtcttgttggtttgcgttggattgcgtccggaatcgtttcaagtttatataaattagagaagcaatccggttagaaatcgtttcgatccactaatcctaaacaac

SEQ ID NO: 216464 - DNA, 5075 bp, Zea Mays
cgtctggcagcaacacagaagcgtcgctcacatcaacatcacatgttcacatccatcttcgaaccccttcttcctctcttcagcgccgcacccgcgcccgcgccgtcgaaggcggcgcctagtctcgaggcttgcacgctgccgcggaggatcgcctcgctactgcgcgccatcgcctccgatctcctctatctccaatctgctccctcatcgccgtgcagtggaaactaggggaccgattcctcttctcgtttgtcgcatatttctcgctgcgtgccgcgtgctgcggtgagtgattctccaagaattctggggacgctgatctgagtccgcacagaacgcagcggcagcaatgatgatgtcggacgatgacgatgctgagccccagctcaacgcggtggagggctactacttcgttgactccaagaacgagaaggagcctgtctgcttctccaccctgcctttctggttcggggacactgatgatcttcctgacggcaagaagaagctggtgctgcgcgggactggtgacccgggcgtcaaggtgtacgatgaggtggtggcctgcaggctgggtctcgaggggaaacaacccgagtttgcagtgctcacagcaaaaggcagacgttggatacgtctcattaggcccttgaacagctacgaggaaatgatcaggactgtgttgatcacagcgcagatgctgcattttctaaggaggaagcctcatgagccagaaaaaaccttgtggaaccacctttgcaaagtttttaacaagtttgacgttccaccctcagaggacgatttcaggaaccactgctcactgatgaagcagtttgcggcaaaagatcctgtcttagcaaaatcagagattttgcgagtatttattgaaggaaaatctagaaaaaaattcactgaggttggtgcagaccatattgatgtcaagcagccgttcatcactgatgatgagggcatagatgaaatgaatgtggaagatgtcgataatgaatctgatgaagatgacgatgaatatttgtttgattcaatatgtgctatttgtgacgatggaggagacatattatgctgtgatggcccatgtatgcgctctttccatgcaaaagaaggaagtggtgaagactcctgttgtgttacccttggatacactgaggcagaagttgaggcaatgaaattatttctttgcaagaattgtgagtataagcaacaccagtgtttcatctgcggagtgttggaaccttcagatggagaagcagccaaggtgtttttatgtaacaatgctacatgtgggcacttttaccacccgaaatgtgttgcccaacaacttcaccccatcaacattgatgaagcctcagaattggagaagaagataacagaagggttttcatttacatgcccaattcactggtgctttcattgcaaaggtttggaggatagaacacaagaacctttgcaatttgctgtttgcagacgctgtccaaagtcatatcacagaaagtgtttaccaagcgaaatttcctttgacgaaaatgaagaggacgatatcatcatacgggcttgggaattatcaaaaagaattttgatatactgcctggaccatgagattgatagtgaacttgagacacctgtcagagatcatatcaagtttccaaagattgaaaaaccacttcaatttgtaaagaagggatctagcttgttgcctaagaagaaaaagaggacttacagtgagacagttcttgagcaatctcccaaagatactgtgaaaaggaaaagcaaggttcacatgctagaaagggaacaaaacaaacaagacaccagagaagtttctgcaaagagtttcactcaaaaccttgttgacacacctgtaaagaaaaaagccaagttgaaagagaaaatacagttgccgtatgtggccaaggatcattttataagcagtccaaaatctgtgaaagagcaagaacaagagttggtacctttgcccttatctgccatcaggaagagttcatttcctaaagtggacagtgaaactgaaaagaggtgagtcacttgtgtataaagtacttggggaatgaaatctccagatcatatggtctgatgaggcattggattttttttgtttatcatgttgcagaatcctctcctatactcatgttttaatcttaatgccatgtatccacattctgtatgataatgtaaacgatgtttgaagtccgcatactgttatatgactatatgagatcttctatttgcagggtgattaccatattgggaaataaagtgtcttcattgacaataaaagatgtaacgaggaattgcagtttgccatcaactcatgtatactctggcagattgactgacaagataccactgggaaagattgaacgttctgttcaggctgtagaagcagctttaaaaaagctggaaaatggaggtagtgtcaatgatgctaaagcagtatgtgaacctgaagttttaaggcagcttgcaaggtggcatagtaaactcagagtgtatatatcaccttttattcatggcacaaggtacagttcctttggtagacattttacaaaggtggagaaacttgttgagattgttgatagacttcactggtatgtggaaactggtgacatgatagtagatttctgctgtggggcaaatgattttagccgtcttatgaaagaaaaactcgacaaagttcagaagaagtgccatttcaagaattatgatcttatccaaccacagaatcgcttctgctttgaaaagagggattggatgactgtgcagccaaacgagctgcctcatggatcccaactaattatgggtcttaatcctccttttggagtcaaagcaagtcttgcgaacaaatttattgacaaagcattgacattcaagcctaagctcattgtactaattgtccctaaagaaactaaaaggttagatcagaggagaacaccttatgatttgatttgggaggacagtgagtgtctttctggcaagtccttctatttgcctggttctgtggatcttaatgataaaatagttgaagggtggaatgcatctgcgccacccctctatttgtggagtcatcctggttggacaaagaagcacatgcaagtggctgaagagcatggtcatacttgtatggggaagatagcttgccatgttgaagagagtaatctatcagatgacctgtccgtgaggaaacaatctgatgctacaaacaaactgaactcgagatcagggaaagagactccattcaatgacagaatgtccaatctacttgatgatggttctgctaggaagcaagcaagatctgaagaagagaagagaactctagggaagatagaacaccatgtgaaaaaggctaatataccagataacctcccagtgaagaaagaacctgaagcttccagcaaagtcatgtcgcattctggaaaagatagaaagattggcagatacaacaggaggagacatgacaacaggagcagcaaggggacacctgatcacacagagagcctcccccctgaaaagcaagtggaagttgcatatgaggaaacaagagttattcctagcaaaaagattgctcataatgaaaaaaagagcgcgcagtacaactacgagcaaactgcagcagggatgccaaacatgaggtctagaggaggggattctgacatgagtatctcacccccagtcagttgcaatgctcgaagcaaacccatgagctattccctgacgagaccaattgaacacttggatacgaatgctcaccttttggcagaagaacctagtgactctgtgctcaatagggttccaaatcatgacagttatttggcaatcaaagaggaatactgtgatggatttaagaggaaaaatgatcctatcttcagtcacattgatgatagctcaaggatgaggggctccagcatcgaagaagtgaccaagccgtatattactgctccaaacagtgatccgtggtctaaaggagatggcagcttttacaggcatccgagctcagaagatttaaacgctaatgctgatgtgcttatgccaggatacagtgcaagatatggacaaattggtggtgacagtaacccacaagctagtatggtcccactagcaacagattcaagactgcatggtggaacggttgctgataattacctctcggcaagatactcccttggatcttcaggtgctcgcgttagccaaccagctccaactgttcccccttttgggctctcaggtgcaagttcacaacgaggctcagtaatggacaggtattcgtatgggctttcgggtccgactggaacacagcgctcagttattgacaggtatgcgccgtccctcgatggaacgaacacaacaagatcgaggagctccttgcctgagcagtacccgttcggacaacctggctcttccggtggcgggtggcctcatcactgatcgctggaacttggtcctcagatttgaccagcaaaagtgcaaccgatttcttgagtccggtggagcctacaacctatctacggcctaactttttggatcctactagtcgtttcttcctggcgccttcgacgaagacatcacctgtgtctaccaatacagaagtgtagacttcaattcctacaaatacagaagtgtaggcttcaatcctattgtttgctctggatttctgtttatgagcgtatttacaagagtatgtttggtctatgttagtatattaggaatacaattccaaaaccgttgtaccgtgccaaagtttaatactatacgtttgggtctgtcgatgagaaaaaaggacgagtgggtgagaagatgctgccctccgcagaactcgatcaggccggttcctctgcgcgtcctgctatgagaggctaacctgagcccgacagaaccggcttggtcgatttgggacctggtaggccggtatttttttattgaagtgtaactttctaaattaggtcttgttggtttgcgttggattgcgtccggaatcgtttcaagtttatataaattagagaagcaatccggttagaaatcgtttcgatccactaatcctaaacaac

SEQ ID NO: 216465 - DNA, 5072 bp, Zea Mays
cgtctggcagcaacacagaagcgtcgctcacatcaacatcacatgttcacatccatcttcgaaccccttcttcctctcttcagcgccgcacccgcgcccgcgccgtcgaaggcggcgcctagtctcgaggcttgcacgctgccgcggaggatcgcctcgctactgcgcgccatcgcctccgatctcctctatctccaatctgctccctcatcgccgtgcagtggaaactaggggaccgattcctcttctcgtttgtcgcatatttctcgctgcgtgccgcgtgctgcggtgagtgattctccaagaattctggggacgctgatctgagtccgcacagaacgcagcggcagcaatgatgatgtcggacgatgacgatgctgagccccagctcaacgcggtggagggctactacttcgttgactccaagaacgagaaggagcctgtctgcttctccaccctgcctttctggttcggggacactgatgatcttcctgacggcaagaagaagctggtgctgcgcgggactggtgacccgggcgtcaaggtgtacgatgaggtggtggcctgcaggctgggtctcgaggggaaacaacccgagtttgcagtgctcacagcaaaaggcagacgttggatacgtctcattaggcccttgaacagctacgaggaaatgatcaggactgtgttgatcacagcgcagatgctgcattttctaaggaggaagcctcatgagccagaaaaaaccttgtggaaccacctttgcaaagtttttaacaagtttgacgttccaccctcagaggacgatttcaggaaccactgctcactgatgaagcagtttgcggcaaaagatcctgtcttagcaaaatcagagattttgcgagtatttattgaaggaaaatctagaaaaaaattcactgaggttggtgcagaccatattgatgtcaagcagccgttcatcactgatgatgagggcatagatgaaatgaatgtggaagatgtcgataatgaatctgatgaagatgacgatgaatatttgtttgattcaatatgtgctatttgtgacgatggaggagacatattatgctgtgatggcccatgtatgcgctctttccatgcaaaagaaggaagtggtgaagactcctgttgtgttacccttggatacactgaggcagaagttgaggcaatgaaattatttctttgcaagaattgtgagtataagcaacaccagtgtttcatctgcggagtgttggaaccttcagatggagaagcagccaaggtgtttttatgtaacaatgctacatgtgggcacttttaccacccgaaatgtgttgcccaacaacttcaccccatcaacattgatgaagcctcagaattggagaagaagataacagaagggttttcatttacatgcccaattcactggtgctttcattgcaaaggtttggaggatagaacacaagaacctttgcaatttgctgtttgcagacgctgtccaaagtcatatcacagaaagtgtttaccaagcgaaatttcctttgacgaaaatgaagaggacgatatcatcatacgggcttgggaattatcaaaaagaattttgatatactgcctggaccatgagattgatagtgaacttgagacacctgtcagagatcatatcaagtttccaaagattgaaaaaccacttcaatttgtaaagaagggatctagcttgttgcctaagaagaaaaagaggacttacagtgagacagttcttgagcaatctcccaaagatactgtgaaaaggaaaagcaaggttcacatgctagaaagggaacaaaacaaacaagacaccagagaagtttctgcaaagagtttcactcaaaaccttgttgacacacctgtaaagaaaaaagccaagttgaaagagaaaatacagttgccgtatgtggccaaggatcattttataagcagtccaaaatctgtgaaagagcaagaacaagagttggtacctttgcccttatctgccatcaggaagagttcatttcctaaagtggacagtgaaactgaaaagaggtgagtcacttgtgtataaagtacttggggaatgaaatctccagatcatatggtatgtaactttatgtgcaaaaattgctagcattcatgaatttcctacaaccagacctgatgaggcattgaaattttgtttgtttgtcaggtctgatgaggcattggattttttttgtttatcatgttgcagaatcctctcctatactcatgttttaatcttaatgccatgtatccacattctgtatgataatgtaaacgatgtttgaagtccgcatactgttatatgactatatgagatcttctatttgcagggtgattaccatattgggaaataaagtgtcttcattgacaataaaagatgtaacgaggaattgcagtttgccatcaactcatgtatactctggcagattgactgacaagataccactgggaaagattgaacgttctgttcaggctgtagaagcagctttaaaaaagctggaaaatggaggtagtgtcaatgatgctaaagcagtatgtgaacctgaagttttaaggcagcttgcaaggtggcatattgttgatagacttcactggtatgtggaaactggtgacatgatagtagatttctgctgtggggcaaatgattttagccgtcttatgaaagaaaaactcgacaaagttcagaagaagtgccatttcaagaattatgatcttatccaaccacagaatcgcttctgctttgaaaagagggattggatgactgtgcagccaaacgagctgcctcatggatcccaactaattatgggtcttaatcctccttttggagtcaaagcaagtcttgcgaacaaatttattgacaaagcattgacattcaagcctaagctcattgtactaattgtccctaaagaaactaaaaggttagatcagaggagaacaccttatgatttgatttgggaggacagtgagtgtctttctggcaagtccttctatttgcctggttctgtggatcttaatgataaaatagttgaagggtggaatgcatctgcgccacccctctatttgtggagtcatcctggttggacaaagaagcacatgcaagtggctgaagagcatggtcatacttgtatggggaagatagcttgccatgttgaagagagtaatctatcagatgacctgtccgtgaggaaacaatctgatgctacaaacaaactgaactcgagatcagggaaagagactccattcaatgacagaatgtccaatctacttgatgatggttctgctaggaagcaagcaagatctgaagaagagaagagaactctagggaagatagaacaccatgtgaaaaaggctaatataccagataacctcccagtgaagaaagaacctgaagcttccagcaaagtcatgtcgcattctggaaaagatagaaagattggcagatacaacaggaggagacatgacaacaggagcagcaaggggacacctgatcacacagagagcctcccccctgaaaagcaagtggaagttgcatatgaggaaacaagagttattcctagcaaaaagattgctcataatgaaaaaaagagcgcgcagtacaactacgagcaaactgcagcagggatgccaaacatgaggtctagaggaggggattctgacatgagtatctcacccccagtcagttgcaatgctcgaagcaaacccatgagctattccctgacgagaccaattgaacacttggatacgaatgctcaccttttggcagaagaacctagtgactctgtgctcaatagggttccaaatcatgacagttatttggcaatcaaagaggaatactgtgatggatttaagaggaaaaatgatcctatcttcagtcacattgatgatagctcaaggatgaggggctccagcatcgaagaagtgaccaagccgtatattactgctccaaacagtgatccgtggtctaaaggagatggcagcttttacaggcatccgagctcagaagatttaaacgctaatgctgatgtgcttatgccaggatacagtgcaagatatggacaaattggtggtgacagtaacccacaagctagtatggtcccactagcaacagattcaagactgcatggtggaacggttgctgataattacctctcggcaagatactcccttggatcttcaggtgctcgcgttagccaaccagctccaactgttcccccttttgggctctcaggtgcaagttcacaacgaggctcagtaatggacaggtattcgtatgggctttcgggtccgactggaacacagcgctcagttattgacaggtatgcgccgtccctcgatggaacgaacacaacaagatcgaggagctccttgcctgagcagtacccgttcggacaacctggctcttccggtggcgggtggcctcatcactgatcgctggaacttggtcctcagatttgaccagcaaaagtgcaaccgatttcttgagtccggtggagcctacaacctatctacggcctaactttttggatcctactagtcgtttcttcctggcgccttcgacgaagacatcacctgtgtctaccaatacagaagtgtagacttcaattcctacaaatacagaagtgtaggcttcaatcctattgtttgctctggatttctgtttatgagcgtatttacaagagtatgtttggtctatgttagtatattaggaatacaattccaaaaccgttgtaccgtgccaaagtttaatactatacgtttgggtctgtcgatgagaaaaaaggacgagtgggtgagaagatgctgccctccgcagaactcgatcaggccggttcctctgcgcgtcctgctatgagaggctaacctgagcccgacagaaccggcttggtcgatttgggacctggtaggccggtatttttttattgaagtgtaactttctaaattaggtcttgttggtttgcgttggattgcgtccggaatcgtttcaagtttatataaattagagaagcaatccggttagaaatcgtttcgatccactaatcctaaacaac

SEQ ID NO: 216466 - DNA, 5166 bp, Zea Mays
cgtctggcagcaacacagaagcgtcgctcacatcaacatcacatgttcacatccatcttcgaaccccttcttcctctcttcagcgccgcacccgcgcccgcgccgtcgaaggcggcgcctagtctcgaggcttgcacgctgccgcggaggatcgcctcgctactgcgcgccatcgcctccgatctcctctatctccaatctgctccctcatcgccgtgcagtggaaactaggggaccgattcctcttctcgtttgtcgcatatttctcgctgcgtgccgcgtgctgcggtgagtgattctccaagaattctggggacgctgatctgagtccgcacagaacgcagcggcagcaatgatgatgtcggacgatgacgatgctgagccccagctcaacgcggtggagggctactacttcgttgactccaagaacgagaaggagcctgtctgcttctccaccctgcctttctggttcggggacactgatgatcttcctgacggcaagaagaagctggtgctgcgcgggactggtgacccgggcgtcaaggtgtacgatgaggtggtggcctgcaggctgggtctcgaggggaaacaacccgagtttgcagtgctcacagcaaaaggcagacgttggatacgtctcattaggcccttgaacagctacgaggaaatgatcaggactgtgttgatcacagcgcagatgctgcattttctaaggaggaagcctcatgagccagaaaaaaccttgtggaaccacctttgcaaagtttttaacaagtttgacgttccaccctcagaggacgatttcaggaaccactgctcactgatgaagcagtttgcggcaaaagatcctgtcttagcaaaatcagagattttgcgagtatttattgaaggaaaatctagaaaaaaattcactgaggttggtgcagaccatattgatgtcaagcagccgttcatcactgatgatgagggcatagatgaaatgaatgtggaagatgtcgataatgaatctgatgaagatgacgatgaatatttgtttgattcaatatgtgctatttgtgacgatggaggagacatattatgctgtgatggcccatgtatgcgctctttccatgcaaaagaaggaagtggtgaagactcctgttgtgttacccttggatacactgaggcagaagttgaggcaatgaaattatttctttgcaagaattgtgagtataagcaacaccagtgtttcatctgcggagtgttggaaccttcagatggagaagcagccaaggtgtttttatgtaacaatgctacatgtgggcacttttaccacccgaaatgtgttgcccaacaacttcaccccatcaacattgatgaagcctcagaattggagaagaagataacagaagggttttcatttacatgcccaattcactggtgctttcattgcaaaggtttggaggatagaacacaagaacctttgcaatttgctgtttgcagacgctgtccaaagtcatatcacagaaagtgtttaccaagcgaaatttcctttgacgaaaatgaagaggacgatatcatcatacgggcttgggaattatcaaaaagaattttgatatactgcctggaccatgagattgatagtgaacttgagacacctgtcagagatcatatcaagtttccaaagattgaaaaaccacttcaatttgtaaagaagggatctagcttgttgcctaagaagaaaaagaggacttacagtgagacagttcttgagcaatctcccaaagatactgtgaaaaggaaaagcaaggttcacatgctagaaagggaacaaaacaaacaagacaccagagaagtttctgcaaagagtttcactcaaaaccttgttgacacacctgtaaagaaaaaagccaagttgaaagagaaaatacagttgccgtatgtggccaaggatcattttataagcagtccaaaatctgtgaaagagcaagaacaagagttggtacctttgcccttatctgccatcaggaagagttcatttcctaaagtggacagtgaaactgaaaagaggtgagtcacttgtgtataaagtacttggggaatgaaatctccagatcatatggtatgtaactttatgtgcaaaaattgctagcattcatgaatttcctacaaccagacctgatgaggcattgaaattttgtttgtttgtcaggtctgatgaggcattggattttttttgtttatcatgttgcagaatcctctcctatactcatgttttaatcttaatgccatgtatccacattctgtatgataatgtaaacgatgtttgaagtccgcatactgttatatgactatatgagatcttctatttgcagggtgattaccatattgggaaataaagtgtcttcattgacaataaaagatgtaacgaggaattgcagtttgccatcaactcatgtatactctggcagattgactgacaagataccactgggaaagattgaacgttctgttcaggctgtagaagcagctttaaaaaagctggaaaatggaggtagtgtcaatgatgctaaagcagtatgtgaacctgaagttttaaggcagcttgcaaggtggcatagtaaactcagagtgtatatatcaccttttattcatggcacaaggtacagttcctttggtagacattttacaaaggtggagaaacttgttgaggattgttgatagacttcactggtatgtggaaactggtgacatgatagtagatttctgctgtggggcaaatgattttagccgtcttatgaaagaaaaactcgacaaagttcagaagaagtgccatttcaagaattatgatcttatccaaccacagaatcgcttctgctttgaaaagagggattggatgactgtgcagccaaacgagctgcctcatggatcccaactaattatgggtcttaatcctccttttggagtcaaagcaagtcttgcgaacaaatttattgacaaagcattgacattcaagcctaagctcattgtactaattgtccctaaagaaactaaaaggttagatcagaggagaacaccttatgatttgatttgggaggacagtgagtgtctttctggcaagtccttctatttgcctggttctgtggatcttaatgataaaatagttgaagggtggaatgcatctgcgccacccctctatttgtggagtcatcctggttggacaaagaagcacatgcaagtggctgaagagcatggtcatacttgtatggggaagatagcttgccatgttgaagagagtaatctatcagatgacctgtccgtgaggaaacaatctgatgctacaaacaaactgaactcgagatcagggaaagagactccattcaatgacagaatgtccaatctacttgatgatggttctgctaggaagcaagcaagatctgaagaagagaagagaactctagggaagatagaacaccatgtgaaaaaggctaatataccagataacctcccagtgaagaaagaacctgaagcttccagcaaagtcatgtcgcattctggaaaagatagaaagattggcagatacaacaggaggagacatgacaacaggagcagcaaggggacacctgatcacacagagagcctcccccctgaaaagcaagtggaagttgcatatgaggaaacaagagttattcctagcaaaaagattgctcataatgaaaaaaagagcgcgcagtacaactacgagcaaactgcagcagggatgccaaacatgaggtctagaggaggggattctgacatgagtatctcacccccagtcagttgcaatgctcgaagcaaacccatgagctattccctgacgagaccaattgaacacttggatacgaatgctcaccttttggcagaagaacctagtgactctgtgctcaatagggttccaaatcatgacagttatttggcaatcaaagaggaatactgtgatggatttaagaggaaaaatgatcctatcttcagtcacattgatgatagctcaaggatgaggggctccagcatcgaagaagtgaccaagccgtatattactgctccaaacagtgatccgtggtctaaaggagatggcagcttttacaggcatccgagctcagaagatttaaacgctaatgctgatgtgcttatgccaggatacagtgcaagatatggacaaattggtggtgacagtaacccacaagctagtatggtcccactagcaacagattcaagactgcatggtggaacggttgctgataattacctctcggcaagatactcccttggatcttcaggtgctcgcgttagccaaccagctccaactgttcccccttttgggctctcaggtgcaagttcacaacgaggctcagtaatggacaggtattcgtatgggctttcgggtccgactggaacacagcgctcagttattgacaggtatgcgccgtccctcgatggaacgaacacaacaagatcgaggagctccttgcctgagcagtacccgttcggacaacctggctcttccggtggcgggtggcctcatcactgatcgctggaacttggtcctcagatttgaccagcaaaagtgcaaccgatttcttgagtccggtggagcctacaacctatctacggcctaactttttggatcctactagtcgtttcttcctggcgccttcgacgaagacatcacctgtgtctaccaatacagaagtgtagacttcaattcctacaaatacagaagtgtaggcttcaatcctattgtttgctctggatttctgtttatgagcgtatttacaagagtatgtttggtctatgttagtatattaggaatacaattccaaaaccgttgtaccgtgccaaagtttaatactatacgtttgggtctgtcgatgagaaaaaaggacgagtgggtgagaagatgctgccctccgcagaactcgatcaggccggttcctctgcgcgtcctgctatgagaggctaacctgagcccgacagaaccggcttggtcgatttgggacctggtaggccggtatttttttattgaagtgtaactttctaaattaggtcttgttggtttgcgttggattgcgtccggaatcgtttcaagtttatataaattagagaagcaatccggttagaaatcgtttcgatccactaatcctaaacaac

SEQ ID NO: 216467 - DNA, 4688 bp, Zea Mays
gctcacatcaacatcacatgttcacatccatcttcgaaccccttcttcctctcttcagcgccgcacccgcgcccgcgccgtcgaaggcggcgcctagtctcgaggcttgcacgctgccgcggaggatcgcctcgctactgcgcgccatcgcctccgatctcctctatctccaatctgctccctcatcgccgtgcagtggaaactaggggaccgattcctcttctcgaattctggggacgctgatctgagtccgcacagaacgcagcggcagcaatgatgatgtcggacgatgacgatgctgagccccagctcaacgcggtggagggctactacttcgttgactccaagaacgagaaggagcctgtctgcttctccaccctgcctttctggttcggggacactgatgatcttcctgacggcaagaagaagctggtgctgcgcgggactggtgacccgggcgtcaaggtgtacgatgaggtggtggcctgcaggctgggtctcgaggggaaacaacccgagtttgcagtgctcacagcaaaaggcagacgttggatacgtctcattaggcccttgaacagctacgaggaaatgatcaggactgtgttgatcacagcgcagatgctgcattttctaaggaggaagcctcatgagccagaaaaaaccttgtggaaccacctttgcaaagtttttaacaagtttgacgttccaccctcagaggacgatttcaggaaccactgctcactgatgaagcagtttgcggcaaaagatcctgtcttagcaaaatcagagattttgcgagtatttattgaaggaaaatctagaaaaaaattcactgaggttggtgcagaccatattgatgtcaagcagccgttcatcactgatgatgagggcatagatgaaatgaatgtggaagatgtcgataatgaatctgatgaagatgacgatgaatatttgtttgattcaatatgtgctatttgtgacgatggaggagacatattatgctgtgatggcccatgtatgcgctctttccatgcaaaagaaggaagtggtgaagactcctgttgtgttacccttggatacactgaggcagaagttgaggcaatgaaattatttctttgcaagaattgtgagtataagcaacaccagtgtttcatctgcggagtgttggaaccttcagatggagaagcagccaaggtgtttttatgtaacaatgctacatgtgggcacttttaccacccgaaatgtgttgcccaacaacttcaccccatcaacattgatgaagcctcagaattggagaagaagataacagaagggttttcatttacatgcccaattcactggtgctttcattgcaaaggtttggaggatagaacacaagaacctttgcaatttgctgtttgcagacgctgtccaaagtcatatcacagaaagtgtttaccaagcgaaatttcctttgacgaaaatgaagaggacgatatcatcatacgggcttgggaattatcaaaaagaattttgatatactgcctggaccatgagattgatagtgaacttgagacacctgtcagagatcatatcaagtttccaaagattgaaaaaccacttcaatttgtaaagaagggatctagcttgttgcctaagaagaaaaagaggacttacagtgagacagttcttgagcaatctcccaaagatactgtgaaaaggaaaagcaaggttcacatgctagaaagggaacaaaacaaacaagacaccagagaagtttctgcaaagagtttcactcaaaaccttgttgacacacctgtaaagaaaaaagccaagttgaaagagaaaatacagttgccgtatgtggccaaggatcattttataagcagtccaaaatctgtgaaagagcaagaacaagagttggtacctttgcccttatctgccatcaggaagagttcatttcctaaagtggacagtgaaactgaaaagagggtgattaccatattgggaaataaagtgtcttcattgacaataaaagatgtaacgaggaattgcagtttgccatcaactcatgtatactctggcagattgactgacaagataccactgggaaagattgaacgttctgttcaggctgtagaagcagctttaaaaaagctggaaaatggaggtagtgtcaatgatgctaaagcagtatgtgaacctgaagttttaaggcagcttgcaaggtggcatattgttgatagacttcactggtatgtggaaactggtgacatgatagtagatttctgctgtggggcaaatgattttagccgtcttatgaaagaaaaactcgacaaagttcagaagaagtgccatttcaagaattatgatcttatccaaccacagaatcgcttctgctttgaaaagagggattggatgactgtgcagccaaacgagctgcctcatggatcccaactaattatgggtcttaatcctccttttggagtcaaagcaagtcttgcgaacaaatttattgacaaagcattgacattcaagcctaagctcattgtactaattgtccctaaagaaactaaaaggttagatcagaggagaacaccttatgatttgatttgggaggacagtgagtgtctttctggcaagtccttctatttgcctggttctgtggatcttaatgataaaatagttgaagggtggaatgcatctgcgccacccctctatttgtggagtcatcctggttggacaaagaagcacatgcaagtggctgaagagcatggtcatacttgtatggggaagatagcttgccatgttgaagagagtaatctatcagatgacctgtccgtgaggaaacaatctgatgctacaaacaaactgaactcgagatcagggaaagagactccattcaatgacagaatgtccaatctacttgatgatggttctgctaggaagcaagcaagatctgaagaagagaagagaactctagggaagatagaacaccatgtgaaaaaggctaatataccagataacctcccagtgaagaaagaacctgaagcttccagcaaagtcatgtcgcattctggaaaagatagaaagattggcagatacaacaggaggagacatgacaacaggagcagcaaggggacacctgatcacacagagagcctcccccctgaaaagcaagtggaagttgcatatgaggaaacaagagttattcctagcaaaaagattgctcataatgaaaaaaagagcgcgcagtacaactacgagcaaactgcagcagggatgccaaacatgaggtctagaggaggggattctgacatgagtatctcacccccagtcagttgcaatgctcgaagcaaacccatgagctattccctgacgagaccaattgaacacttggatacgaatgctcaccttttggcagaagaacctagtgactctgtgctcaatagggttccaaatcatgacagttatttggcaatcaaagaggaatactgtgatggatttaagaggaaaaatgatcctatcttcagtcacattgatgatagctcaaggatgaggggctccagcatcgaagaagtgaccaagccgtatattactgctccaaacagtgatccgtggtctaaaggagatggcagcttttacaggcatccgagctcagaagatttaaacgctaatgctgatgtgcttatgccaggatacagtgcaagatatggacaaattggtggtgacagtaacccacaagctagtatggtcccactagcaacagattcaagactgcatggtggaacggttgctgataattacctctcggcaagatactcccttggatcttcaggtgctcgcgttagccaaccagctccaactgttcccccttttgggctctcaggtgcaagttcacaacgaggctcagtaatggacaggtattcgtatgggctttcgggtccgactggaacacagcgctcagttattgacaggtatgcgccgtccctcgatggaacgaacacaacaagatcgaggagctccttgcctgagcagtacccgttcggacaacctggctcttccggtggcgggtggcctcatcactgatcgctggaacttggtcctcagatttgaccagcaaaagtgcaaccgatttcttgagtccggtggagcctacaacctatctacggcctaactttttggatcctactagtcgtttcttcctggcgccttcgacgaagacatcacctgtgtctaccaatacagaagtgtagacttcaattcctacaaatacagaagtgtaggcttcaatcctattgtttgctctggatttctgtttatgagcgtatttacaagagtatgtttggtctatgttagtatattaggaatacaattccaaaaccgttgtaccgtgccaaagtttaatactatacgtttgggtctgtcgatgagaaaaaaggacgagtgggtgagaagatgctgccctccgcagaactcgatcaggccggttcctctgcgcgtcctgctatgagaggctaacctgagcccgacagaaccggcttggtcgatttgggacctggtaggccggtatttttttattgaagtgtaactttctaaattaggtcttgttggtttgcgttggattgcgtccggaatcgtttcaagtttatataaattagagaagcaatccggttagaaatcgtttcgatccactaatcctaaacaac

SEQ ID NO: 216468 - DNA, 6907 bp, Zea Mays
gctcacatcaacatcacatgttcacatccatcttcgaaccccttcttcctctcttcagcgccgcacccgcgcccgcgccgtcgaaggcggcgcctagtctcgaggcttgcacgctgccgcggaggatcgcctcgctactgcgcgccatcgcctccgatctcctctatctccaatctgctccctcatcgccgtgcagtggaaactaggggaccgattcctcttctcgtttgtcgcatatttctcgctgcgtgccgcgtgctgcggtgagtgattctccaagaattctggggacgctgatctgagtccgcacagaacgcagcggcagcaatgatgatgtcggacgatgacgatgctgagccccagctcaacgcggtggagggctactacttcgttgactccaagaacgagaaggagcctgtctgcttctccaccctgcctttctggttcggggacactgatgatcttcctgacggcaagaagaagctggtgctgcgcgggactggtgacccgggcgtcaaggtgtacgatgaggtggtggcctgcaggctgggtctcgaggggaaacaacccgagtttgcagtgctcacagcaaaaggcagacgttggatacgtctcattaggcccttgaacagctacgaggaaatgatcaggactgtgttgatcacagcgcagatgctgcattttctaaggaggaagcctcatgagccagaaaaaaccttgtggaaccacctttgcaaagtttttaacaagtttgacgttccaccctcagaggacgatttcaggaaccactgctcactgatgaagcagtttgcggcaaaagatcctgtcttagcaaaatcagagattttgcgagtatttattgaaggaaaatctagaaaaaaattcactgaggttggtgcagaccatattgatgtcaagcagccgttcatcactgatgatgagggcatagatgaaatgaatgtggaagatgtcgataatgaatctgatgaagatgacgatgaatatttgtttgattcaatatgtgctatttgtgacgatggaggagacatattatggtaggtggattcccttatgtgattgagtaggctacctgagagtcttttctcttgagaatctaggcagcttgatgtttagttagtatttaattgttcttttcttcagttgagcaaacacaacaaaaccattacatatatattttacatggtgattagcccaatatcgtcgcgccaagcccctaggattgtttttataagcactatttatattatgtactaaacttaggaaggccccatatgacatgacttaatggctggctacctgtagagagatcacttgctaacgttaggctgtgaagtttgaacttagttaactctatcatcataaaatcaaaacagaagttgaagaagtatagtgtttacaaagatgctgctcattccaccgatggaaattgcatcgtacgggaaaataatatacatggtcagagctatatgcattcctatgaagtaggtcatcgagttactctatatcctgaaaagctttgttatgaaaattccagtagactgttgttgatatagaataaagtgtgacattgatgcacagaaagctcctaaatttgatattattttttcacagctggatcaagagatttagtgttttctattgtgacacatgagccataactaaaagatagggttgatggattatattttgcataatctatagttctatacacaaattcattctcttttgagatcaagtttagttgtaaaggtgcttcagcgcagagagccgcagaccatgttccgaggagcaattgcgagcttatgcatcctctcacatctacatgctgagagtatgtttcttttttcatcaattagaacagtttgtagtttcccttaataggtgttgtattaggaagaagtccatgatagtagatgtcaaaggtccaggcatccaacttctatctataatctgattctctagttcttagctcctgcttttgctatcagggcactgacatgctggttatacatgagcccactggccactcacttgcccaatctcagcggaatgtatatcaatcatctgtctggaatctgtggttgtgaattcattgcttacatgtttatccctggttatacatgagcccactggccactcacttgcatttttgatggctgcaacccaagtatgtcttcaagtctcagagctgctaatgaggaaagaagaagatgggaagtggctggtgcaaaaggcctcacacatctggctgcacccttggtagaaccttaggaagatttgagtagtttgattttttgatccccttatggatctatatttgtatgcctgtttctggcctccgtaaggagggctgtaaacctttttgttttgttttgttttttctattttctctgcttaatatataatggggcgtagttctcctgcgcgttcgagaaaaaaaatacatgtttatcccttgtaaatattttgaaaaaaatacgaaatttctggagtgaagttgttatagactatagtttctttcattgttaacacataatggaaaccaccttgcataatctggtttattgtgcagtataattaccaattttcttatttctcttttttttcatgctgagcttcttatgtttattaattttctagccatcgaaatgtcatgtcaatatctaattttctccagtatatacttgttctatctgtcgatgtggtcatattcttgtgcttatcaacatgttggtcatccattctccatattctaatctttttctttctgtggtgtacttgttgcgtttttctactatagctgtgatggcccatgtatgcgctctttccatgcaaaagaaggaagtggtgaagactcctgttgtgttacccttggatacactgaggcagaagttgaggcaatgaaattatttctttgcaagaattgtgagtataagcaacaccagtgtttcatctgcggagtgttggaaccttcagatggagaagcagccaaggtgtttttatgtaacaatgctacatgtgggcacttttaccacccgaaatgtgttgcccaacaacttcaccccatcaacattgatgaagcctcagaattggagaagaagataacagaagggttttcatttacatgcccaattcactggtgctttcattgcaaaggtttggaggatagaacacaagaacctttgcaatttgctgtttgcagacgctgtccaaagtcatatcacagaaagtgtttaccaagcgaaatttcctttgacgaaaatgaagaggacgatatcatcatacgggcttgggaattatcaaaaagaattttgatatactgcctggaccatgagattgatagtgaacttgagacacctgtcagagatcatatcaagtttccaaagattgaaaaaccacttcaatttgtaaagaagggatctagcttgttgcctaagaagaaaaagaggacttacagtgagacagttcttgagcaatctcccaaagatactgtgaaaaggaaaagcaaggttcacatgctagaaagggaacaaaacaaacaagacaccagagaagtttctgcaaagagtttcactcaaaaccttgttgacacacctgtaaagaaaaaagccaagttgaaagagaaaatacagttgccgtatgtggccaaggatcattttataagcagtccaaaatctgtgaaagagcaagaacaagagttggtacctttgcccttatctgccatcaggaagagttcatttcctaaagtggacagtgaaactgaaaagaggtgagtcacttgtgtataaagtacttggggaatgaaatctccagatcatatggtatgtaactttatgtgcaaaaattgctagcattcatgaatttcctacaaccagacctgatgaggcattgaaattttgtttgtttgtcaggtctgatgaggcattggattttttttgtttatcatgttgcagaatcctctcctatactcatgttttaatcttaatgccatgtatccacattctgtatgataatgtaaacgatgtttgaagtccgcatactgttatatgactatatgagatcttctatttgcagggtgattaccatattgggaaataaagtgtcttcattgacaataaaagatgtaacgaggaattgcagtttgccatcaactcatgtatactctggcagattgactgacaagataccactgggaaagattgaacgttctgttcaggctgtagaagcagctttaaaaaagctggaaaatggaggtagtgtcaatgatgctaaagcagtatgtgaacctgaagttttaaggcagcttgcaaggtggcatagtaaactcagagtgtatatatcaccttttattcatggcacaaggtacagttcctttggtagacattttacaaaggtggagaaacttgttgaggattgttgatagacttcactggtatgtggaaactggtgacatgatagtagatttctgctgtggggcaaatgattttagccgtcttatgaaagaaaaactcgacaaagttcagaagaagtgccatttcaagaattatgatcttatccaaccacagaatcgcttctgctttgaaaagagggattggatgactgtgcagccaaacgagctgcctcatggatcccaactaattatgggtcttaatcctccttttggagtcaaagcaagtcttgcgaacaaatttattgacaaagcattgacattcaagcctaagctcattgtactaattgtccctaaagaaactaaaaggttagatcagaggagaacaccttatgatttgatttgggaggacagtgagtgtctttctggcaagtccttctatttgcctggttctgtggatcttaatgataaaatagttgaagggtggaatgcatctgcgccacccctctatttgtggagtcatcctggttggacaaagaagcacatgcaagtggctgaagagcatggtcatacttgtatggggaagatagcttgccatgttgaagagagtaatctatcagatgacctgtccgtgaggaaacaatctgatgctacaaacaaactgaactcgagatcagggaaagagactccattcaatgacagaatgtccaatctacttgatgatggttctgctaggaagcaagcaagatctgaagaagagaagagaactctagggaagatagaacaccatgtgaaaaaggctaatataccagataacctcccagtgaagaaagaacctgaagcttccagcaaagtcatgtcgcattctggaaaagatagaaagattggcagatacaacaggaggagacatgacaacaggagcagcaaggggacacctgatcacacagagagcctcccccctgaaaagcaagtggaagttgcatatgaggaaacaagagttattcctagcaaaaagattgctcataatgaaaaaaagagcgcgcagtacaactacgagcaaactgcagcagggatgccaaacatgaggtctagaggaggggattctgacatgagtatctcacccccagtcagttgcaatgctcgaagcaaacccatgagctattccctgacgagaccaattgaacacttggatacgaatgctcaccttttggcagaagaacctagtgactctgtgctcaatagggttccaaatcatgacagttatttggcaatcaaagaggaatactgtgatggatttaagaggaaaaatgatcctatcttcagtcacattgatgatagctcaaggatgaggggctccagcatcgaagaagtgaccaagccgtatattactgctccaaacagtgatccgtggtctaaaggagatggcagcttttacaggcatccgagctcagaagatttaaacgctaatgctgatgtgcttatgccaggatacagtgcaagatatggacaaattggtggtgacagtaacccacaagctagtatggtcccactagcaacagattcaagactgcatggtggaacggttgctgataattacctctcggcaagatactcccttggatcttcaggtgctcgcgttagccaaccagctccaactgttcccccttttgggctctcaggtgcaagttcacaacgaggctcagtaatggacaggtattcgtatgggctttcgggtccgactggaacacagcgctcagttattgacaggtatgcgccgtccctcgatggaacgaacacaacaagatcgaggagctccttgcctgagcagtacccgttcggacaacctggctcttccggtggcgggtggcctcatcactgatcgctggaacttggtcctcagatttgaccagcaaaagtgcaaccgatttcttgagtccggtggagcctacaacctatctacggcctaactttttggatcctactagtcgtttcttcctggcgccttcgacgaagacatcacctgtgtctaccaatacagaagtgtagacttcaattcctacaaatacagaagtgtaggcttcaatcctattgtttgctctggatttctgtttatgagcgtatttacaagagtatgtttggtctatgttagtatattaggaatacaattccaaaaccgttgtaccgtgccaaagtttaatactatacgtttgggtctgtcgatgagaaaaaaggacgagtgggtgagaagatgctgccctccgcagaactcgatcaggccggttcctctgcgcgtcctgctatgagaggctaacctgagcccgacagaaccggcttggtcgatttgggacctggtaggccggtatttttttattgaagtgtaactttctaaattaggtcttgttggtttgcgttggattgcgtccggaatcgtttcaagtttatataaattagagaagcaatccggttagaaatcgtttcgatccactaatcctaaacaac

SEQ ID NO: 216469 - DNA, 3862 bp, Zea Mays
gtgcttcagcgcagagagccgcagaccatgttccgaggagcaattgcgagcttatgcatcctctcacatctacatgctgagactgtgatggcccatgtatgcgctctttccatgcaaaagaaggaagtggtgaagactcctgttgtgttacccttggatacactgaggcagaagttgaggcaatgaaattatttctttgcaagaattgtgagtataagcaacaccagtgtttcatctgcggagtgttggaaccttcagatggagaagcagccaaggtgtttttatgtaacaatgctacatgtgggcacttttaccacccgaaatgtgttgcccaacaacttcaccccatcaacattgatgaagcctcagaattggagaagaagataacagaagggttttcatttacatgcccaattcactggtgctttcattgcaaaggtttggaggatagaacacaagaacctttgcaatttgctgtttgcagacgctgtccaaagtcatatcacagaaagtgtttaccaagcgaaatttcctttgacgaaaatgaagaggacgatatcatcatacgggcttgggaattatcaaaaagaattttgatatactgcctggaccatgagattgatagtgaacttgagacacctgtcagagatcatatcaagtttccaaagattgaaaaaccacttcaatttgtaaagaagggatctagcttgttgcctaagaagaaaaagaggacttacagtgagacagttcttgagcaatctcccaaagatactgtgaaaaggaaaagcaaggttcacatgctagaaagggaacaaaacaaacaagacaccagagaagtttctgcaaagagtttcactcaaaaccttgttgacacacctgtaaagaaaaaagccaagttgaaagagaaaatacagttgccgtatgtggccaaggatcattttataagcagtccaaaatctgtgaaagagcaagaacaagagttggtacctttgcccttatctgccatcaggaagagttcatttcctaaagtggacagtgaaactgaaaagagggtgattaccatattgggaaataaagtgtcttcattgacaataaaagatgtaacgaggaattgcagtttgccatcaactcatgtatactctggcagattgactgacaagataccactgggaaagattgaacgttctgttcaggctgtagaagcagctttaaaaaagctggaaaatggaggtagtgtcaatgatgctaaagcagtatgtgaacctgaagttttaaggcagcttgcaaggtggcatagtaaactcagagtgtatatatcaccttttattcatggcacaaggtacagttcctttggtagacattttacaaaggtggagaaacttgttgagattgttgatagacttcactggtatgtggaaactggtgacatgatagtagatttctgctgtggggcaaatgattttagccgtcttatgaaagaaaaactcgacaaagttcagaagaagtgccatttcaagaattatgatcttatccaaccacagaatcgcttctgctttgaaaagagggattggatgactgtgcagccaaacgagctgcctcatggatcccaactaattatgggtcttaatcctccttttggagtcaaagcaagtcttgcgaacaaatttattgacaaagcattgacattcaagcctaagctcattgtactaattgtccctaaagaaactaaaaggttagatcagaggagaacaccttatgatttgatttgggaggacagtgagtgtctttctggcaagtccttctatttgcctggttctgtggatcttaatgataaaatagttgaagggtggaatgcatctgcgccacccctctatttgtggagtcatcctggttggacaaagaagcacatgcaagtggctgaagagcatggtcatacttgtatggggaagatagcttgccatgttgaagagagtaatctatcagatgacctgtccgtgaggaaacaatctgatgctacaaacaaactgaactcgagatcagggaaagagactccattcaatgacagaatgtccaatctacttgatgatggttctgctaggaagcaagcaagatctgaagaagagaagagaactctagggaagatagaacaccatgtgaaaaaggctaatataccagataacctcccagtgaagaaagaacctgaagcttccagcaaagtcatgtcgcattctggaaaagatagaaagattggcagatacaacaggaggagacatgacaacaggagcagcaaggggacacctgatcacacagagagcctcccccctgaaaagcaagtggaagttgcatatgaggaaacaagagttattcctagcaaaaagattgctcataatgaaaaaaagagcgcgcagtacaactacgagcaaactgcagcagggatgccaaacatgaggtctagaggaggggattctgacatgagtatctcacccccagtcagttgcaatgctcgaagcaaacccatgagctattccctgacgagaccaattgaacacttggatacgaatgctcaccttttggcagaagaacctagtgactctgtgctcaatagggttccaaatcatgacagttatttggcaatcaaagaggaatactgtgatggatttaagaggaaaaatgatcctatcttcagtcacattgatgatagctcaaggatgaggggctccagcatcgaagaagtgaccaagccgtatattactgctccaaacagtgatccgtggtctaaaggagatggcagcttttacaggcatccgagctcagaagatttaaacgctaatgctgatgtgcttatgccaggatacagtgcaagatatggacaaattggtggtgacagtaacccacaagctagtatggtcccactagcaacagattcaagactgcatggtggaacggttgctgataattacctctcggcaagatactcccttggatcttcaggtgctcgcgttagccaaccagctccaactgttcccccttttgggctctcaggtgcaagttcacaacgaggctcagtaatggacaggtattcgtatgggctttcgggtccgactggaacacagcgctcagttattgacaggtatgcgccgtccctcgatggaacgaacacaacaagatcgaggagctccttgcctgagcagtacccgttcggacaacctggctcttccggtggcgggtggcctcatcactgatcgctggaacttggtcctcagatttgaccagcaaaagtgcaaccgatttcttgagtccggtggagcctacaacctatctacggcctaactttttggatcctactagtcgtttcttcctggcgccttcgacgaagacatcacctgtgtctaccaatacagaagtgtagacttcaattcctacaaatacagaagtgtaggcttcaatcctattgtttgctctggatttctgtttatgagcgtatttacaagagtatgtttggtctatgttagtatattaggaatacaattccaaaaccgttgtaccgtgccaaagtttaatactatacgtttgggtctgtcgatgagaaaaaaggacgagtgggtgagaagatgctgccctccgcagaactcgatcaggccggttcctctgcgcgtcctgctatgagaggctaacctgagcccgacagaaccggcttggtcgatttgggacctggtaggccggtatttttttattgaagtgtaactttctaaattaggtcttgttggtttgcgttggattgcgtccggaatcgtttcaagtttatataaattagagaagcaatccggttagaaatcgtttcgatccactaatcctaaacaac

SEQ ID NO: 216470 - DNA, 3813 bp, Zea Mays
gcaaaaggcctcacacatctggctgcacccttgctgtgatggcccatgtatgcgctctttccatgcaaaagaaggaagtggtgaagactcctgttgtgttacccttggatacactgaggcagaagttgaggcaatgaaattatttctttgcaagaattgtgagtataagcaacaccagtgtttcatctgcggagtgttggaaccttcagatggagaagcagccaaggtgtttttatgtaacaatgctacatgtgggcacttttaccacccgaaatgtgttgcccaacaacttcaccccatcaacattgatgaagcctcagaattggagaagaagataacagaagggttttcatttacatgcccaattcactggtgctttcattgcaaaggtttggaggatagaacacaagaacctttgcaatttgctgtttgcagacgctgtccaaagtcatatcacagaaagtgtttaccaagcgaaatttcctttgacgaaaatgaagaggacgatatcatcatacgggcttgggaattatcaaaaagaattttgatatactgcctggaccatgagattgatagtgaacttgagacacctgtcagagatcatatcaagtttccaaagattgaaaaaccacttcaatttgtaaagaagggatctagcttgttgcctaagaagaaaaagaggacttacagtgagacagttcttgagcaatctcccaaagatactgtgaaaaggaaaagcaaggttcacatgctagaaagggaacaaaacaaacaagacaccagagaagtttctgcaaagagtttcactcaaaaccttgttgacacacctgtaaagaaaaaagccaagttgaaagagaaaatacagttgccgtatgtggccaaggatcattttataagcagtccaaaatctgtgaaagagcaagaacaagagttggtacctttgcccttatctgccatcaggaagagttcatttcctaaagtggacagtgaaactgaaaagagggtgattaccatattgggaaataaagtgtcttcattgacaataaaagatgtaacgaggaattgcagtttgccatcaactcatgtatactctggcagattgactgacaagataccactgggaaagattgaacgttctgttcaggctgtagaagcagctttaaaaaagctggaaaatggaggtagtgtcaatgatgctaaagcagtatgtgaacctgaagttttaaggcagcttgcaaggtggcatagtaaactcagagtgtatatatcaccttttattcatggcacaaggtacagttcctttggtagacattttacaaaggtggagaaacttgttgagattgttgatagacttcactggtatgtggaaactggtgacatgatagtagatttctgctgtggggcaaatgattttagccgtcttatgaaagaaaaactcgacaaagttcagaagaagtgccatttcaagaattatgatcttatccaaccacagaatcgcttctgctttgaaaagagggattggatgactgtgcagccaaacgagctgcctcatggatcccaactaattatgggtcttaatcctccttttggagtcaaagcaagtcttgcgaacaaatttattgacaaagcattgacattcaagcctaagctcattgtactaattgtccctaaagaaactaaaaggttagatcagaggagaacaccttatgatttgatttgggaggacagtgagtgtctttctggcaagtccttctatttgcctggttctgtggatcttaatgataaaatagttgaagggtggaatgcatctgcgccacccctctatttgtggagtcatcctggttggacaaagaagcacatgcaagtggctgaagagcatggtcatacttgtatggggaagatagcttgccatgttgaagagagtaatctatcagatgacctgtccgtgaggaaacaatctgatgctacaaacaaactgaactcgagatcagggaaagagactccattcaatgacagaatgtccaatctacttgatgatggttctgctaggaagcaagcaagatctgaagaagagaagagaactctagggaagatagaacaccatgtgaaaaaggctaatataccagataacctcccagtgaagaaagaacctgaagcttccagcaaagtcatgtcgcattctggaaaagatagaaagattggcagatacaacaggaggagacatgacaacaggagcagcaaggggacacctgatcacacagagagcctcccccctgaaaagcaagtggaagttgcatatgaggaaacaagagttattcctagcaaaaagattgctcataatgaaaaaaagagcgcgcagtacaactacgagcaaactgcagcagggatgccaaacatgaggtctagaggaggggattctgacatgagtatctcacccccagtcagttgcaatgctcgaagcaaacccatgagctattccctgacgagaccaattgaacacttggatacgaatgctcaccttttggcagaagaacctagtgactctgtgctcaatagggttccaaatcatgacagttatttggcaatcaaagaggaatactgtgatggatttaagaggaaaaatgatcctatcttcagtcacattgatgatagctcaaggatgaggggctccagcatcgaagaagtgaccaagccgtatattactgctccaaacagtgatccgtggtctaaaggagatggcagcttttacaggcatccgagctcagaagatttaaacgctaatgctgatgtgcttatgccaggatacagtgcaagatatggacaaattggtggtgacagtaacccacaagctagtatggtcccactagcaacagattcaagactgcatggtggaacggttgctgataattacctctcggcaagatactcccttggatcttcaggtgctcgcgttagccaaccagctccaactgttcccccttttgggctctcaggtgcaagttcacaacgaggctcagtaatggacaggtattcgtatgggctttcgggtccgactggaacacagcgctcagttattgacaggtatgcgccgtccctcgatggaacgaacacaacaagatcgaggagctccttgcctgagcagtacccgttcggacaacctggctcttccggtggcgggtggcctcatcactgatcgctggaacttggtcctcagatttgaccagcaaaagtgcaaccgatttcttgagtccggtggagcctacaacctatctacggcctaactttttggatcctactagtcgtttcttcctggcgccttcgacgaagacatcacctgtgtctaccaatacagaagtgtagacttcaattcctacaaatacagaagtgtaggcttcaatcctattgtttgctctggatttctgtttatgagcgtatttacaagagtatgtttggtctatgttagtatattaggaatacaattccaaaaccgttgtaccgtgccaaagtttaatactatacgtttgggtctgtcgatgagaaaaaaggacgagtgggtgagaagatgctgccctccgcagaactcgatcaggccggttcctctgcgcgtcctgctatgagaggctaacctgagcccgacagaaccggcttggtcgatttgggacctggtaggccggtatttttttattgaagtgtaactttctaaattaggtcttgttggtttgcgttggattgcgtccggaatcgtttcaagtttatataaattagagaagcaatccggttagaaatcgtttcgatccactaatcctaaacaac

SEQ ID NO: 216471 - DNA, 4202 bp, Zea Mays
ctggtttattgtgcagtataattaccaattttcttatttctcttttttttcatgctgagcttcttatgtttattaattttctagccatcgaaatgtcatgtcaatatctaattttctccagtatatacttgttctatctgtcgatgtggtcatattcttctgtgatggcccatgtatgcgctctttccatgcaaaagaaggaagtggtgaagactcctgttgtgttacccttggatacactgaggcagaagttgaggcaatgaaattatttctttgcaagaattgtgagtataagcaacaccagtgtttcatctgcggagtgttggaaccttcagatggagaagcagccaaggtgtttttatgtaacaatgctacatgtgggcacttttaccacccgaaatgtgttgcccaacaacttcaccccatcaacattgatgaagcctcagaattggagaagaagataacagaagggttttcatttacatgcccaattcactggtgctttcattgcaaaggtttggaggatagaacacaagaacctttgcaatttgctgtttgcagacgctgtccaaagtcatatcacagaaagtgtttaccaagcgaaatttcctttgacgaaaatgaagaggacgatatcatcatacgggcttgggaattatcaaaaagaattttgatatactgcctggaccatgagattgatagtgaacttgagacacctgtcagagatcatatcaagtttccaaagattgaaaaaccacttcaatttgtaaagaagggatctagcttgttgcctaagaagaaaaagaggacttacagtgagacagttcttgagcaatctcccaaagatactgtgaaaaggaaaagcaaggttcacatgctagaaagggaacaaaacaaacaagacaccagagaagtttctgcaaagagtttcactcaaaaccttgttgacacacctgtaaagaaaaaagccaagttgaaagagaaaatacagttgccgtatgtggccaaggatcattttataagcagtccaaaatctgtgaaagagcaagaacaagagttggtacctttgcccttatctgccatcaggaagagttcatttcctaaagtggacagtgaaactgaaaagaggtgagtcacttgtgtataaagtacttggggaatgaaatctccagatcatatggtatgtaactttatgtgcaaaaattgctagcattcatgaatttcctacaaccagacctgatgaggcattgaaattttgtttgtttgtcaggtctgatgaggcattggattttttttgtttatcatgttgcagaatcctctcctatactcatgttttaatcttaatgccatgtatccacattctgtatgataatgtaaacgatgtttgaagtccgcatactgttatatgactatatgagatcttctatttgcagggtgattaccatattgggaaataaagtgtcttcattgacaataaaagatgtaacgaggaattgcagtttgccatcaactcatgtatactctggcagattgactgacaagataccactgggaaagattgaacgttctgttcaggctgtagaagcagctttaaaaaagctggaaaatggaggtagtgtcaatgatgctaaagcagtatgtgaacctgaagttttaaggcagcttgcaaggtggcatagtaaactcagagtgtatatatcaccttttattcatggcacaaggtacagttcctttggtagacattttacaaaggtggagaaacttgttgagatagtagatttctgctgtggggcaaatgattttagccgtcttatgaaagaaaaactcgacaaagttcagaagaagtgccatttcaagaattatgatcttatccaaccacagaatcgcttctgctttgaaaagagggattggatgactgtgcagccaaacgagctgcctcatggatcccaactaattatgggtcttaatcctccttttggagtcaaagcaagtcttgcgaacaaatttattgacaaagcattgacattcaagcctaagctcattgtactaattgtccctaaagaaactaaaaggttagatcagaggagaacaccttatgatttgatttgggaggacagtgagtgtctttctggcaagtccttctatttgcctggttctgtggatcttaatgataaaatagttgaagggtggaatgcatctgcgccacccctctatttgtggagtcatcctggttggacaaagaagcacatgcaagtggctgaagagcatggtcatacttgtatggggaagatagcttgccatgttgaagagagtaatctatcagatgacctgtccgtgaggaaacaatctgatgctacaaacaaactgaactcgagatcagggaaagagactccattcaatgacagaatgtccaatctacttgatgatggttctgctaggaagcaagcaagatctgaagaagagaagagaactctagggaagatagaacaccatgtgaaaaaggctaatataccagataacctcccagtgaagaaagaacctgaagcttccagcaaagtcatgtcgcattctggaaaagatagaaagattggcagatacaacaggaggagacatgacaacaggagcagcaaggggacacctgatcacacagagagcctcccccctgaaaagcaagtggaagttgcatatgaggaaacaagagttattcctagcaaaaagattgctcataatgaaaaaaagagcgcgcagtacaactacgagcaaactgcagcagggatgccaaacatgaggtctagaggaggggattctgacatgagtatctcacccccagtcagttgcaatgctcgaagcaaacccatgagctattccctgacgagaccaattgaacacttggatacgaatgctcaccttttggcagaagaacctagtgactctgtgctcaatagggttccaaatcatgacagttatttggcaatcaaagaggaatactgtgatggatttaagaggaaaaatgatcctatcttcagtcacattgatgatagctcaaggatgaggggctccagcatcgaagaagtgaccaagccgtatattactgctccaaacagtgatccgtggtctaaaggagatggcagcttttacaggcatccgagctcagaagatttaaacgctaatgctgatgtgcttatgccaggatacagtgcaagatatggacaaattggtggtgacagtaacccacaagctagtatggtcccactagcaacagattcaagactgcatggtggaacggttgctgataattacctctcggcaagatactcccttggatcttcaggtgctcgcgttagccaaccagctccaactgttcccccttttgggctctcaggtgcaagttcacaacgaggctcagtaatggacaggtattcgtatgggctttcgggtccgactggaacacagcgctcagttattgacaggtatgcgccgtccctcgatggaacgaacacaacaagatcgaggagctccttgcctgagcagtacccgttcggacaacctggctcttccggtggcgggtggcctcatcactgatcgctggaacttggtcctcagatttgaccagcaaaagtgcaaccgatttcttgagtccggtggagcctacaacctatctacggcctaactttttggatcctactagtcgtttcttcctggcgccttcgacgaagacatcacctgtgtctaccaatacagaagtgtagacttcaattcctacaaatacagaagtgtaggcttcaatcctattgtttgctctggatttctgtttatgagcgtatttacaagagtatgtttggtctatgttagtatattaggaatacaattccaaaaccgttgtaccgtgccaaagtttaatactatacgtttgggtctgtcgatgagaaaaaaggacgagtgggtgagaagatgctgccctccgcagaactcgatcaggccggttcctctgcgcgtcctgctatgagaggctaacctgagcccgacagaaccggcttggtcgatttgggacctggtaggccggtatttttttattgaagtgtaactttctaaattaggtcttgttggtttgcgttggattgcgtccggaatcgtttcaagtttatataaattagagaagcaatccggttagaaatcgtttcgatccactaatcctaaacaac

SEQ ID NO: 216472 - DNA, 2516 bp, Zea Mays
atgccctcgttgcccctagctttgcctccggctcccgcactagctccgcttccaaggaggcaaggacctcgcctcctcacgcataggtcaggtctgccgatcgaccggctcgtgcccgccatcctatcttgcaagcgccgggccacggcgatgcagcgtggagcgctgctgaccagggctgtcgtcgcgaggctctacctcgtcgtgctcaacatcgacacccacaggtgctgggcccgcgactactacaacaactacgcccagttccgttgggttggcgactccgttcactgcgcgtcagccatccgttctgttgcctgcgcagaaagatctggtgtttcgttacaggatcctcaacctattgttggaatactgatccagcctgacacttttgggacaaggttgctaattgcatatgagagagggttgttggttctttgggatgtatctgaggaccgtgcagtttctgtcagaggctatggggatttacgcatgaagggtcaaatcaatggtgctcagggggattctggtgaagatcaactaaatactactattgatgacagtgaagaagaaagagaaatttgctctctttgttgggcttcaagagagggctcaactgttgcggtgggctatataacaggtgacatacttctatgggatatgactacaaaatcctccagacaagagaagcaaagtgatgtttcatctaatgttgttaagctacagctggcctcagggagtcgtaggcttcttgttattgtcttgcattggtctgctggccttttgttcattaagcatgactttggctgttgggacaacaagtggtctgtgtgcatctataaactccgagaacacactgggggttcaagcttccattttgtgagtgaatctaagcaagaaggaaggcaagagagggagtatgagatgacactcaagaggacgttgcagagtatttgcttgctcacagttcatcctaacaccaccacctctgtcgtgcttcaggttgaagatagcaacaatagttttacattacttgtagtctggatgacgcaaaaggtgctgcactgtagtctgtcaccactgccagcatatgagcctgcatttgattgggagaacgagaggtctttgatatttggccaaagggtgccagaaagtataccagcaataagcaacagtggcttgaagataactgtcaagataaggacgtgccaagaatggaggaacaaaaccatgaagactacaactgagagccgtagttggccgagtcgtttaagcagaacatgcctttttaacacagagaagccaaaccaagaaccaagtcctcacacagagaagaatcaggcacgggcttcaggccaagctcctgctacaccagtatctgccatcattactctgcataacagcacacagaaatgtgagatatatgtattctacaaagctctccaggaagaaagcattgtattttcgcttgtttgcatgcccgttaacgagggagatgcatatttgtcacagttttacatgatggaaggtgaggcagagaccgtggttggttcttgttctaaaccatgtgggcctctggaggactactacattccatattacattctaaagccaggtgcccaacaagtttttgatctctcaaaagaggctccagataaggtattgcatcgtttatatgccaaccttgaaaggctgaagatggaaggacactttcttgcagttcaaatttggaggacactgaggctaattgcggtgatggtacagctagctggttgcttggggtagtcagtgaccttaagctttcccacccacctccagtggcaactgtgcctctaggaaccggaaataacctccccttttcatttggatggaaggcgttcatatttgtggagcggaacctcttatctgttgcctacaagaacgtaattggggcccgccgtgcctcatggcgcattatctcctccattgagcataaggaggagtcccgcaagaatgaggaacatgttattcagatcaaggagtaccgtggcaagattgaggctgaattgagcaacatttgtgatggtatcctgaagttgatcgactctcaccttgtgccttcctccactgctgcagagtcgaaggtgttttacctcaagatgaagggagattatcacaggtaccttgctgagtttaagactggtgctgagaggaaggaagctgcagagagtacaatgatagcttataacgcagctcaggatattgcgttggcggaactggcatctactcatcccataagacttggacttgcacttaacttctcagttttctattacgagattctgaactctccagacaaagcttgcaaccttgccaggcaggcgtttgatgaggctatttctcagttggatacgcttggcgaggattcatacaaagatagcaccttaatcatgcagctcctgagggacaacttaaccctatggtccgctgacaacacaacggtgttggcaaaatcttctaagatggtttctgactaa

SEQ ID NO: 216473 - DNA, 1285 bp, Zea Mays
atggcattgatgcgaggactgcaaagggcggttgcatcccggacgcaccctcccggctcccgcacgccgcctctcagtgagatgttgccatcgctggtgcgcgctcgcagcgcccctctccgccgcctcgtctccacgttctcctcgacgctagccgtattgcctcgcgtcccgcacgtcatcagtagcggcggtaacctcaacctcccgttctccgctcacccctcgccggcccgcgacggcccgagcggtccggctggtggagcccagcgagggataagcttcagcacccgcgcggtggacgccagggacgaggcagcctccagctccgccgcggcggactctgacctctccgcgccttacctctccgtccgcatacgatgccgcaggcacgacgtggaagtactctccgaggcgctcttgagcttcggtgctagctccgtgaccgtggatgacatttccgatgctgaaaatctcgatgaaatctccataacttcattatatgctgatggggaagacgtggactccagtgtaagaagtgccgcgaggtcagctggtgtgaactacagtccagtgtatgaaacctctgtcgggaagcagtgcgattggatagcaactgtgcaggaaacatacgagtcgactgaagtggctgatggcctttgggttgttcctaaatggagaactccccctgatccagaggccacaaacataatcatcgatccaggcacgggagtattggggattgcagctctgaagatgggtgctactcaatcaactgggatagatattgaccctcaagccatagcctctgcttcagaaaacttgttgctgaatggtttacattcgaaccaaatgcctgtttatttggtatcaacaaatgcccagccttcatgccttccaagcttcatcgacaaatcagaagagcatcactcaaccaataaccttgacttgaagttatcaagaggaacttatgatgtagttgcagcaaatatccttctaaatcccttactggagctggtcgaggacatagttggttatgcaaaacctggtggaataattgctgtttctggaatattggaggagcaggtgccaaaaatcaaagaagtttactcgaggtatttggacagaatattggtatccgaaatggatgggtgggcctgtcttcagggaaccaggagagtgtagaggaattaagtatttcaccacgttgaagaagggttttgaccttacatgtttttttttttaagagaggactaggtatatacccgtgcgtgcaacagggaca

SEQ ID NO: 216474 - DNA, 1005 bp, Zea Mays
ctcgaagacataaaaatcacaagcggccgaaaccatacatgagctaatgaccatgagattgagtatggacaggagtaggagggcagctagcaatttgcaggctgtggagaggccacgtcagcgcgcgcctcgtgaggctgtctcggcttcctcagcagcaggcagcagctcccatcttctccgctcctgccgcggcaacgtgcggccatccaaaagatgcggccgccgccgaagcccgccagcggcggcggggcgacccagctggccagcaggccaactagcaataggcccggcggcggcgtcctgaggctgcggctgcggctgctgcaggcgccggcggtggtcgcgctggcggcggcgctggcggtgtcgtccgccgctactcctcctcccgcgccggcgccggcgccgctgtgcaacctcccgccgacgctgtcgggctcggacggcggcgggcggcagggcgaggcgaaccggatccggcaccccaagtcggagcgcgcggcgcgctgcacgtccaagtgcgtcagcacctgcgtcctcggcggctacggcgcgccgggcgtcgccggccccttcaacatccggaggcccctggtggtgttcaaggacaccttccgaagccggcagtactggacggcgaagatgaccagtgatcgagaaggggtacagtgagtggacacaacgcacaatgcaagaagacgtacacggcatcgccgccttgacgacatgccatgcgagctataggcggcatggaggaacgtgtttgctctagcgctacacacaattaggaagaaaccgagtggcggcaaaagagtcctgtgtgctttgcgtcatggaggaacatacgtactatacgtatttgctctctctcgccgtatgtgtatagtctgtcatgtagagaagctgaatctagtgagctgctttcgacattttagcgttgtacgtgacctctaaatttatataacacacacacaaagctcaatttccaaacgcagcattggg

SEQ ID NO: 216475 - DNA, 2070 bp, Zea Mays
cgggtcacgtgagtgacgtggcacgcaagcagttcagctttcggttctcctgccggcggcgccgcgtcttttcccgcaccttcgcatcgtatgccacttcagacgccatggccgtggctccgcctctctcaacccacgtctcccgaactctaacctcaaacctgcacctctggccgcggacccacggtggcgtggctcatgcgcggacgcgggctctgatcccgacaccggctgcggcgtgcgccttccgtttcagtttccgtgttcgcgccaccgccagtggctcgaagctgccgccttatcctctacccgatgtcttcccctacattaccgccgagtgggaggccgtcgcgaagggttgggcgtgcgccgccgtcgccgtatactgcctctcccgcgcagtgcccgccgcggggcgcctgccgcgcgcgctcgccggcggcggcgggggagggggcgcggctgttgtggtggcagccaggggcggggtcgccctcgctgcgtttgcatcggcgcgtgccgccgctacatacgcgcagcaggcgtttctctgggaggcggcgctgcaggcggcggggcggctgcgggagcgcgccttcgagcgcctcctagagcgcgatctcgagttcttcgagggtaggggaggggtggctgcgggcgacatcgcgcacaggatcaccgacgaggcggacgatgtcgcggatgccttgttctccgtgctcaacgatgcagggaaggcatacaatgaatataagcaaggacagccagcattagaacgcatatttgatcttatgaggttcaaccctaaggtgactgataagccaagggcaattcatttacaaagtattaatggggacattaagttccatgatgttacatttagatatgttgatgacatgcctccagtagcagatggtgtgaatcttcatattagaccgggagaaataattgctttagttggaccttctggtggaggcaaaactactcttgccaaattactcctccgtctttatcatccacaaaaagggtatatacttctggacaaccatgatattcaggacattcaatcgcaatgcctgagaacacatatcgcttttgtttcacaggacactatgctattttctgggacaattgctgaaaacattgcttatagagaccctgtgggagatattgacatgaatagggttgagtacgctgctaagattgccaatgctgaggagttcattaagatgttgccagaagggtacaattcaaatgtgggacagagaggttctagtttgagcggtggacagaagcaaaggttatctattgccagggcaatctatcaaaattcctccatattgataatggatgaagcaacttctgctttggatatcagatctgagctgctactgaaagaagcgcttagtaatctaattgcaaaacactcagtaactgttatcatcattgctcatcgacaggaaatggtcctaatggctgacaggattatttcactagagcgcggtgaattgcgagagatgtcgaaacaggcatttttgtctcaagatggtcacttcagcttaccaaggatcaggagtccaaattagggtgtccaaactagggtgagacttggcatgggtaatggtagtttctctcgtgaagatttgttcatatatttggccatggaagaaaacgattgatagaatcacatttcttgcctgagccctgctcagaactttggcttcttggaaccttgtttcatcccaacagcaacaaatctgtcaacattatcgaaggtcgtctgccggagagaatagcaggctcctcagcggcattggctcctacctgctgcaagattctcctcaagacctcaacaggaaggtcaaagcaaggtatagggttttaccaatttttgtacacatgaaaaagcacaggttccttacatcccccgcccccgcccctgcatacatgcaggatgcagtagttgagctgtatatatgccaaaataaagttattcgttttagatttttttattgccaaactccagattggtgcgtttcagaatcgtcaggtagtaaacgtgtaactgag

SEQ ID NO: 216476 - DNA, 3130 bp, Zea Mays
cgggtcacgtgagtgacgtggcacgcaagcagttcagctttcggttctcctgccggcggcgccgcgtcttttcccgcaccttcgcatcgtatgccacttcagacgccatggccgtggctccgcctctctcaacccacgtctcccgaactctaacctcaaacctgcacctctggccgcggacccacggtggcgtggctcatgcgcggacgcgggctctgatcccgacaccggctgcggcgtgcgccttccgtttcagtttccgtgttcgcgccaccgccagtggctcgaagctgccgccttatcctctacccgatgtcttcccctacattaccgccgagtgggaggccgtcgcgaagggttgggcgtgcgccgccgtcgccgtatactgcctctcccgcgcagtgcccgccgcggggcgcctgccgcgcgcgctcgccggcggcggcgggggagggggcgcggctgttgtggtggcagccaggggcggggtcgccctcgctgcgtttgcatcggcgcgtgccgccgctacatacgcgcagcaggcgtttctctgggaggcggcgctgcaggcggcggggcggctgcgggagcgcgccttcgagcgcctcctagagcgcgatctcgagttcttcgagggtaggggaggggtggctgcgggcgacatcgcgcacaggatcaccgacgaggcggacgatgtcgcggatgccttgttctccgtgctcaacgtgaggttcctggagacttgcattcgtccttattttatctgttgccgatcgactcgcagtcgcttcagtgagtaacaaacctttgtagattagatgtgcaggttgctgtgtttgttagttttatggaatgtaggtttgctgttcgtggaaatgcctgcataactgttagtttaattgttgaattggtagtcttaaaattcaaaatttgaactttctgaatttgagcttttccttcacatcttatgctagcactagtaagcatctgtataccggttaaatttcaccaaatttgattgcactttctgatcttcaaatatgttggttacttcatcaatcatggaggcaaaaacctccaacataacgcaacacattatggctgctgtaatagttacagtccaagtgtccaactccacgccaattgtgccaatgcatggtactctgcacatatatggattctgactactaatttgacacagacgattgtgccaacaagcttgcagttgataacgatggccattcagatggtgacaatcaatcccatgctctcattgcttgcagcaacggaagccatgtccacagttcatattgttgtttcataatcacatctatttgcattgtttaatttccattgtataaacaggtcattccatgcatgtgcttcgccatagtcaatcttggtaaaaggcttcgtcaaatatccaaggaggcacatcttagcctcgccatgctcgcatcatatctcaacgatgtacttccatctatgctgactgtgaaggcaaacaatggggaacttaaggagatcatgagattccaaaagttagctcgtgctgatctaaagaataatttgagtaagaagaaaatgaaggctctcatacctcaagcggttcgagcaacatacattgggggcctgcttgtgctctgtgctgggtcgatagttgtttcaggctcatcctttgatgctgaagagtttctgtctttcctaacagcacttgctcttgttgtggagcctattcaggatgcagggaaggcatacaatgaatataagcaaggacagccagcattagaacgcatatttgatcttatgaggttcaaccctaaggtgactgataagccaagggcaattcatttacaaagtattaatggggacattaagttccatgatgttacatttagatatgttgatgacatgcctccagtagcagatggtgtgaatcttcatattagaccgggagaaataattgctttagttggaccttctggtggaggcaaaactactcttgccaaattactcctccgtctttatcatccacaaaaagggtatatacttctggacaaccatgatattcaggacattcaatcgcaatgcctgagaacacatatcgcttttgtttcacaggacactatgctattttctgggacaattgctgaaaacattgcttatagagaccctgtgggagatattgacatgaatagggttgagtacgctgctaagattgccaatgctgaggagttcattaagatgttgccagaagggtacaattcaaatgtgggacagagaggttctagtttgagcggtggacagaagcaaaggtaaaatgctcactttccagtttccagactaccttgtatcacaaggttatctattgccagggcaatctatcaaaattcctccatattgataatggatgaagcaacttctgctttggatatcagatctgagctgctactgaaagaagcgcttagtaatctaattgcaaaacactcagtaactgttatcatcattgctcatcgacaggaaatggtcctaatggctgacaggattatttcactagagcgcggtgaattgcgagagatgtcgaaacaggcatttttgtctcaagatggtcacttcagcttaccaaggatcaggagtccaaattagggtgtccaaactagggtgagacttggcatgggtaatggtagtttctctcgtgaagatttgttcatatatttggccatggaagaaaacgattgatagaatcacatttcttgcctgagccctgctcagaactttggcttcttggaaccttgtttcatcccaacagcaacaaatctgtcaacattatcgaaggtcgtctgccggagagaatagcaggctcctcagcggcattggctcctacctgctgcaagattctcctcaagacctcaacaggaaggtcaaagcaaggtatagggttttaccaatttttgtacacatgaaaaagcacaggttccttacatcccccgcccccgcccctgcatacatgcaggatgcagtagttgagctgtatatatgccaaaataaagttattcgttttagatttttttattgccaaactccagattggtgcgtttcagaatcgtcaggtagtaaacgtgtaactgag

SEQ ID NO: 216477 - DNA, 2490 bp, Zea Mays
cgggtcacgtgagtgacgtggcacgcaagcagttcagctttcggttctcctgccggcggcgccgcgtcttttcccgcaccttcgcatcgtatgccacttcagacgccatggccgtggctccgcctctctcaacccacgtctcccgaactctaacctcaaacctgcacctctggccgcggacccacggtggcgtggctcatgcgcggacgcgggctctgatcccgacaccggctgcggcgtgcgccttccgtttcagtttccgtgttcgcgccaccgccagtggctcgaagctgccgccttatcctctacccgatgtcttcccctacattaccgccgagtgggaggccgtcgcgaagggttgggcgtgcgccgccgtcgccgtatactgcctctcccgcgcagtgcccgccgcggggcgcctgccgcgcgcgctcgccggcggcggcgggggagggggcgcggctgttgtggtggcagccaggggcggggtcgccctcgctgcgtttgcatcggcgcgtgccgccgctacatacgcgcagcaggcgtttctctgggaggcggcgctgcaggcggcggggcggctgcgggagcgcgccttcgagcgcctcctagagcgcgatctcgagttcttcgagggtaggggaggggtggctgcgggcgacatcgcgcacaggatcaccgacgaggcggacgatgtcgcggatgccttgttctccgtgctcaacgtcattccatgcatgtgcttcgccatagtcaatcttggtaaaaggcttcgtcaaatatccaaggaggcacatcttagcctcgccatgctcgcatcatatctcaacgatgtacttccatctatgctgactgtgaaggcaaacaatggggaacttaaggagatcatgagattccaaaagttagctcgtgctgatctaaagaataatttgagtaagaagaaaatgaaggctctcatacctcaagcggttcgagcaacatacattgggggcctgcttgtgctctgtgctgggtcgatagttgtttcaggctcatcctttgatgctgaagagtttctgtctttcctaacagcacttgctcttgttgtggagcctattcaggatgcagggaaggcatacaatgaatataagcaaggacagccagcattagaacgcatatttgatcttatgaggttcaaccctaaggtgactgataagccaagggcaattcatttacaaagtattaatggggacattaagttccatgatgttacatttagatatgttgatgacatgcctccagtagcagatggtgtgaatcttcatattagaccgggagaaataattgctttagttggaccttctggtggaggcaaaactactcttgccaaattactcctccgtctttatcatccacaaaaagggtatatacttctggacaaccatgatattcaggacattcaatcgcaatgcctgagaacacatatcgcttttgtttcacaggacactatgctattttctgggacaattgctgaaaacattgcttatagagaccctgtgggagatattgacatgaatagggttgagtacgctgctaagattgccaatgctgaggagttcattaagatgttgccagaagggtacaattcaaatgtgggacagagaggttctagtttgagcggtggacagaagcaaaggtaaaatgctcactttccagtttccagactaccttgtatcacaaggttatctattgccagggcaatctatcaaaattcctccatattgataatggatgaagcaacttctgctttggatatcagatctgagctgctactgaaagaagcgcttagtaatctaattgcaaaacactcagtaactgttatcatcattgctcatcgacaggaaatggtcctaatggctgacaggattatttcactagagcgcggtgaattgcgagagatgtcgaaacaggcatttttgtctcaagatggtcacttcagcttaccaaggatcaggagtccaaattagggtgtccaaactagggtgagacttggcatgggtaatggtagtttctctcgtgaagatttgttcatatatttggccatggaagaaaacgattgatagaatcacatttcttgcctgagccctgctcagaactttggcttcttggaaccttgtttcatcccaacagcaacaaatctgtcaacattatcgaaggtcgtctgccggagagaatagcaggctcctcagcggcattggctcctacctgctgcaagattctcctcaagacctcaacaggaaggtcaaagcaaggtatagggttttaccaatttttgtacacatgaaaaagcacaggttccttacatcccccgcccccgcccctgcatacatgcaggatgcagtagttgagctgtatatatgccaaaataaagttattcgttttagatttttttattgccaaactccagattggtgcgtttcagaatcgtcaggtagtaaacgtgtaactgag

SEQ ID NO: 216478 - DNA, 2382 bp, Zea Mays
cgggtcacgtgagtgacgtggcacgcaagcagttcagctttcggttctcctgccggcggcgccgcgtcttttcccgcaccttcgcatcgtatgccacttcagacgccatggccgtggctccgcctctctcaacccacgtctcccgaactctaacctcaaacctgcacctctggccgcggacccacggtggcgtggctcatgcgcggacgcgggctctgatcccgacaccggctgcggcgtgcgccttccgtttcagtttccgtgttcgcgccaccgccagtggctcgaagctgccgccttatcctctacccgatgtcttcccctacattaccgccgagtgggaggccgtcgcgaagggttgggcgtgcgccgccgtcgccgtatactgcctctcccgcgcagtgcccgccgcggggcgcctgccgcgcgcgctcgccggcggcggcgggggagggggcgcggctgttgtggtggcagccaggggcggggtcgccctcgctgcgtttgcatcggcgcgtgccgccgctacatacgcgcagcaggcgtttctctgggaggcggcgctgcaggcggcggggcggctgcgggagcgcgccttcgagcgcctcctagagcgcgatctcgagttcttcgagggtaggggaggggtggctgcgggcgacatcgcgcacaggatcaccgacgaggcggacgatgtcgcggatgccttgttctccgtgctcaacgtacttccatctatgctgactgtgaaggcaaacaatggggaacttaaggagatcatgagattccaaaagttagctcgtgctgatctaaagaataatttgagtaagaagaaaatgaaggctctcatacctcaagcggttcgagcaacatacattgggggcctgcttgtgctctgtgctgggtcgatagttgtttcaggctcatcctttgatgctgaagagtttctgtctttcctaacagcacttgctcttgttgtggagcctattcaggatgcagggaaggcatacaatgaatataagcaaggacagccagcattagaacgcatatttgatcttatgaggttcaaccctaaggtgactgataagccaagggcaattcatttacaaagtattaatggggacattaagttccatgatgttacatttagatatgttgatgacatgcctccagtagcagatggtgtgaatcttcatattagaccgggagaaataattgctttagttggaccttctggtggaggcaaaactactcttgccaaattactcctccgtctttatcatccacaaaaagggtatatacttctggacaaccatgatattcaggacattcaatcgcaatgcctgagaacacatatcgcttttgtttcacaggacactatgctattttctgggacaattgctgaaaacattgcttatagagaccctgtgggagatattgacatgaatagggttgagtacgctgctaagattgccaatgctgaggagttcattaagatgttgccagaagggtacaattcaaatgtgggacagagaggttctagtttgagcggtggacagaagcaaaggtaaaatgctcactttccagtttccagactaccttgtatcacaaggttatctattgccagggcaatctatcaaaattcctccatattgataatggatgaagcaacttctgctttggatatcagatctgagctgctactgaaagaagcgcttagtaatctaattgcaaaacactcagtaactgttatcatcattgctcatcgacaggaaatggtcctaatggctgacaggattatttcactagagcgcggtgaattgcgagagatgtcgaaacaggcatttttgtctcaagatggtcacttcagcttaccaaggatcaggagtccaaattagggtgtccaaactagggtgagacttggcatgggtaatggtagtttctctcgtgaagatttgttcatatatttggccatggaagaaaacgattgatagaatcacatttcttgcctgagccctgctcagaactttggcttcttggaaccttgtttcatcccaacagcaacaaatctgtcaacattatcgaaggtcgtctgccggagagaatagcaggctcctcagcggcattggctcctacctgctgcaagattctcctcaagacctcaacaggaaggtcaaagcaaggtatagggttttaccaatttttgtacacatgaaaaagcacaggttccttacatcccccgcccccgcccctgcatacatgcaggatgcagtagttgagctgtatatatgccaaaataaagttattcgttttagatttttttattgccaaactccagattggtgcgtttcagaatcgtcaggtagtaaacgtgtaactgag

SEQ ID NO: 216479 - DNA, 2493 bp, Zea Mays
cgggtcacgtgagtgacgtggcacgcaagcagttcagctttcggttctcctgccggcggcgccgcgtcttttcccgcaccttcgcatcgtatgccacttcagacgccatggccgtggctccgcctctctcaacccacgtctcccgaactctaacctcaaacctgcacctctggccgcggacccacggtggcgtggctcatgcgcggacgcgggctctgatcccgacaccggctgcggcgtgcgccttccgtttcagtttccgtgttcgcgccaccgccagtggctcgaagctgccgccttatcctctacccgatgtcttcccctacattaccgccgagtgggaggccgtcgcgaagggttgggcgtgcgccgccgtcgccgtatactgcctctcccgcgcagtgcccgccgcggggcgcctgccgcgcgcgctcgccggcggcggcgggggagggggcgcggctgttgtggtggcagccaggggcggggtcgccctcgctgcgtttgcatcggcgcgtgccgccgctacatacgcgcagcaggcgtttctctgggaggcggcgctgcaggcggcggggcggctgcgggagcgcgccttcgagcgcctcctagagcgcgatctcgagttcttcgagggtaggggaggggtggctgcgggcgacatcgcgcacaggatcaccgacgaggcggacgatgtcgcggatgccttgttctccgtgctcaacacgattgtgccaacaagcttgcagttgataacgatggccattcagatggtcattccatgcatgtgcttcgccatagtcaatcttggtaaaaggcttcgtcaaatatccaaggaggcacatcttagcctcgccatgctcgcatcatatctcaacgatgtacttccatctatgctgactgtgaaggcaaacaatggggaacttaaggagatcatgagattccaaaagttagctcgtgctgatctaaagaataatttgagtaagaagaaaatgaaggctctcatacctcaagcggttcgagcaacatacattgggggcctgcttgtgctctgtgctgggtcgatagttgtttcaggctcatcctttgatgctgaagagtttctgtctttcctaacagcacttgctcttgttgtggagcctattcaggatgcagggaaggcatacaatgaatataagcaaggacagccagcattagaacgcatatttgatcttatgaggttcaaccctaaggtgactgataagccaagggcaattcatttacaaagtattaatggggacattaagttccatgatgttacatttagatatgttgatgacatgcctccagtagcagatggtgtgaatcttcatattagaccgggagaaataattgctttagttggaccttctggtggaggcaaaactactcttgccaaattactcctccgtctttatcatccacaaaaagggtatatacttctggacaaccatgatattcaggacattcaatcgcaatgcctgagaacacatatcgcttttgtttcacaggacactatgctattttctgggacaattgctgaaaacattgcttatagagaccctgtgggagatattgacatgaatagggttgagtacgctgctaagattgccaatgctgaggagttcattaagatgttgccagaagggtacaattcaaatgtgggacagagaggttctagtttgagcggtggacagaagcaaaggttatctattgccagggcaatctatcaaaattcctccatattgataatggatgaagcaacttctgctttggatatcagatctgagctgctactgaaagaagcgcttagtaatctaattgcaaaacactcagtaactgttatcatcattgctcatcgacaggaaatggtcctaatggctgacaggattatttcactagagcgcggtgaattgcgagagatgtcgaaacaggcatttttgtctcaagatggtcacttcagcttaccaaggatcaggagtccaaattagggtgtccaaactagggtgagacttggcatgggtaatggtagtttctctcgtgaagatttgttcatatatttggccatggaagaaaacgattgatagaatcacatttcttgcctgagccctgctcagaactttggcttcttggaaccttgtttcatcccaacagcaacaaatctgtcaacattatcgaaggtcgtctgccggagagaatagcaggctcctcagcggcattggctcctacctgctgcaagattctcctcaagacctcaacaggaaggtcaaagcaaggtatagggttttaccaatttttgtacacatgaaaaagcacaggttccttacatcccccgcccccgcccctgcatacatgcaggatgcagtagttgagctgtatatatgccaaaataaagttattcgttttagatttttttattgccaaactccagattggtgcgtttcagaatcgtcaggtagtaaacgtgtaactgag

SEQ ID NO: 216480 - DNA, 2337 bp, Zea Mays
cgggtcacgtgagtgacgtggcacgcaagcagttcagctttcggttctcctgccggcggcgccgcgtcttttcccgcaccttcgcatcgtatgccacttcagacgccatggccgtggctccgcctctctcaacccacgtctcccgaactctaacctcaaacctgcacctctggccgcggacccacggtggcgtggctcatgcgcggacgcgggctctgatcccgacaccggctgcggcgtgcgccttccgtttcagtttccgtgttcgcgccaccgccagtggctcgaagctgccgccttatcctctacccgatgtcttcccctacattaccgccgagtgggaggccgtcgcgaagggttgggcgtgcgccgccgtcgccgtatactgcctctcccgcgcagtgcccgccgcggggcgcctgccgcgcgcgctcgccggcggcggcgggggagggggcgcggctgttgtggtggcagccaggggcggggtcgccctcgctgcgtttgcatcggcgcgtgccgccgctacatacgcgcagcaggcgtttctctgggaggcggcgctgcaggcggcggggcggctgcgggagcgcgccttcgagcgcctcctagagcgcgatctcgagttcttcgagggtaggggaggggtggctgcgggcgacatcgcgcacaggatcaccgacgaggcggacgatgtcgcggatgccttgttctccgtgctcaacgtacttccatctatgctgactgtgaaggcaaacaatggggaacttaaggagatcatgagattccaaaagttagctcgtgctgatctaaagaataatttgagtaagaagaaaatgaaggctctcatacctcaagcggttcgagcaacatacattgggggcctgcttgtgctctgtgctgggtcgatagttgtttcaggctcatcctttgatgctgaagagtttctgtctttcctaacagcacttgctcttgttgtggagcctattcaggatgcagggaaggcatacaatgaatataagcaaggacagccagcattagaacgcatatttgatcttatgaggttcaaccctaaggtgactgataagccaagggcaattcatttacaaagtattaatggggacattaagttccatgatgttacatttagatatgttgatgacatgcctccagtagcagatggtgtgaatcttcatattagaccgggagaaataattgctttagttggaccttctggtggaggcaaaactactcttgccaaattactcctccgtctttatcatccacaaaaagggtatatacttctggacaaccatgatattcaggacattcaatcgcaatgcctgagaacacatatcgcttttgtttcacaggacactatgctattttctgggacaattgctgaaaacattgcttatagagaccctgtgggagatattgacatgaatagggttgagtacgctgctaagattgccaatgctgaggagttcattaagatgttgccagaagggtacaattcaaatgtgggacagagaggttctagtttgagcggtggacagaagcaaaggttatctattgccagggcaatctatcaaaattcctccatattgataatggatgaagcaacttctgctttggatatcagatctgagctgctactgaaagaagcgcttagtaatctaattgcaaaacactcagtaactgttatcatcattgctcatcgacaggaaatggtcctaatggctgacaggattatttcactagagcgcggtgaattgcgagagatgtcgaaacaggcatttttgtctcaagatggtcacttcagcttaccaaggatcaggagtccaaattagggtgtccaaactagggtgagacttggcatgggtaatggtagtttctctcgtgaagatttgttcatatatttggccatggaagaaaacgattgatagaatcacatttcttgcctgagccctgctcagaactttggcttcttggaaccttgtttcatcccaacagcaacaaatctgtcaacattatcgaaggtcgtctgccggagagaatagcaggctcctcagcggcattggctcctacctgctgcaagattctcctcaagacctcaacaggaaggtcaaagcaaggtatagggttttaccaatttttgtacacatgaaaaagcacaggttccttacatcccccgcccccgcccctgcatacatgcaggatgcagtagttgagctgtatatatgccaaaataaagttattcgttttagatttttttattgccaaactccagattggtgcgtttcagaatcgtcaggtagtaaacgtgtaactgag

SEQ ID NO: 216481 - DNA, 3510 bp, Zea Mays
atggcgttttggaggccgaaaattcgatcttggcgctggtctcagtgtttcgaggcctcgaggggttgctgtgaagaaccagaggaagataaaaaggtggttttctcgccggttttccttggttttggggtactgaattctgagattgttctgaggcaggggtctgtcttgctggagaatgaagatgtggaggtttgtgtgctctgcgcgtttgttttggtgaagacaactagctggagtaaaaggaagaaaaaaaagttccgcttcctttcttttgcgtgttctgatccttctgagatatcccttcctgccgcttcagagtttcatttgtttccgactcggcatcggcatctcgtataaaccgaggagacacggcaatttcaagggccttcgtttgggaccaacagaataacctgttcctgcctgcaattttttggttctgaagactcaaagattggattgagtgatctttgaaaccaaatcttccttcggtgttttttggcattttgggcactatctgtgaagtgtagcaggaccgcctctgcttttatgctcggtagacttctgtgatcaagtattcaagtactggtaaaagattataagcttgtctaaagcaagcccttagaaggaaagttatctgaccatgttctcagctatcatggcaaagaagaattacaaacagcattccaaatctgagaaaattcaggggggttgtatgtctgggctgattcgcatgcttgatttccgtcgcagtccaaaacttctttcagacgggagagaatggaaaggaccacagggttgaattgatttatgttggtaggtcaagtattagaactttgatggaagaagagatggccagcagcacacagcccttgaagcaagcacaaagcaatgtcgctgggatatgctctgaagatattgatctaaacttggctggaagtctcatggaaatctacagatctcatactgaaggccaagaaaccaggaggtcgattgagtcaggtcgcagttccatttcgactgacgaagagaagaatactgaccctcctgctcatcactatcagatcccatctagtatccagagagctctagaagatgttgctgaagcagttataagacatcaatctgcaaacaaaaaatacataaacagcggtgatgaaactaggtccagagaattcgttgatgccctacagctactgagctcaaacaaggaattgtttgtgatgcttatgcaagatccaagctctaggttgttagaatgtctccaaaacctttacatgtcactaggaagtaccaggttagactctgaagaatatgacgaaggaactgagttgcaaggtacgacagatagtctagagcagtcagcgacttctccaagtaaggtgaaaagaaggcataattctttcttgaaggaggatgggttggtcacgaggaagccaccaaagttaaatgatggttctcgtggccttagcagaatagtaatcttgaagcccagtcctgcaagaggtcatagcagtcttatctcaggtagcgcaacttcatcaccactatcaaatcatattgattggcaagttcaggaaggcagtgataaacatgattgccatttctcgcttagagagcttaaaaggaggctaagaattgccattagcaataatcagaaggatcaccagttaaactccacgagtagtgatattcatgaagctgaggctgattctggcaaactgcttccagtcacaagtatgtcggagacggagagtctggcaagtacagattcttctgacagggctaaggaaccatctattgttgacgagaaaatagtcccggaagatagtgaaagtgggatgagaaatgatgttgctcatggtgtcggagtcagctctttctcatatgaaaaagctaagatgtatataattgagagactaaatgatcaaggcgaagaaagttgtcaaattgtacagaaatctgaatcttttgagagattgatttcactgcccgagaatggtacattttctccaattgatttccctcaagaggagaaaattagcatagcgcatgaagctacaaaaccattgaacttgcatactgttgagcaagaggatggttcagcaagcccttactcaacaatgcagtacgaggagacagaatcagccgacactagcaacttaggtacagaaacgttgattgagcccacgatagatcatggtagttattcacaaaatgagggcgctatctcacaggagttggtccgtgaaggggttaagatcatgctagatataatggagaactcatcgctctgtgctgagactggaacttcgcaggaaggagtgggagtgaaaaatccagatgaatgttcattggaggaaccacaatccatgaatttgttgccagaaccggcactgtattctccagatgacttcgttaatgaacaagagaaccatagtccgtcagaaattgttgaattagtcaaaccatctgtattgacatttccttactcgccggaaaatactaatgacaaagaggagaaattgagtccacaatccgttcttgatcccattgcagaagttaccagtcctagacacaaaactccaaagcaagatgaattctccatgcctacttccagagtgctattcaaagaggttgacgccccttcagcatccccaactttgtggaatgggccacaggtagccattttggatgacagagccacaagggtgtccttcatcaaggccgtgctagaagcttcaggattgctgtctgaggaaaattcgcaaatttggtacacagaagagccactgcttgatgtatctgtattggctgaagtaggaaactcgtactgcctgacagacgatgcagtgctcttgtttgactacgtggaagaggttcttctcgagataagggacaagttctttggtagcgacccttgggttaattctctgaaacacaatgtacggccagctccagtaggaagacggctggttcgagaggtggctaagggaatcgattctcttgtaggtaaagaatttccacacactttagaacaggtaatgatgaaagacttggacagtgggtcgtggctggatcttggaggcgatactggaagtgttgtagttgagttgtgggatggtttacttgatgacttgctggaggaactggtttttgatttgtggctttgatactgtagtgctttgtagtaatacatgcagaggcatattcgactagtactgacatggggttaatagatacagaaaccttttgcgaaaggatagggaaaagtgagttcggcagactgccagatgttgtagagctaggcatttcatcaatatagttgatttccattttcttttgaatttgatttctttaagctccctttgttctctgtagaggcatggaaacataaaaaataagtgctcctgtatataaagtaccccagtatttatggtaaattttcattgtgaacataatattgtttccgttactttatgagatactctattgcttctgtgtttcaag

SEQ ID NO: 216482 - DNA, 3854 bp, Zea Mays
caaaagacaaatcggactcccctccccgcaatgtgatctacaaaaaccaaaagtacgggctgggtcaccctccaaatcctaccttctccatccgccattagagagaggatagagaatgccgagaatgagagagacaaggtagcggcagcggttggcgcgcgcggccacagtggcaaagcctccgtcgtcggcgaggaccgctgcatgcgctgttgccgggttggcatgcttctgcttccgcgtcttgaaggatttcaaggaagggaggatcggaaaagacaactgcgattcggttgcattcatacggttctgtaaaaaaggcagtttttttttggctgtgacctgtgagtatccgccggtttgctgtttatttattcattctcagttttggaggccgaaaattcgatcttggcgctggtctcagtgtttcgaggcctcgaggggttgctgtgaagaaccagaggaagataaaaagatgtggaggtttgtgtgctctgcgcgtttgttttggtgaagacaactagctggagtaaaaggaagaaaaaaaagttccgcttcctttcttttgcgtgttctgatccttctgagatatcccttcctgccgcttcagagtttcatttgtttccgactcggcatcggcatctcgtataaaccgaggagacacggcaatttcaagggccttcgtttgggaccaacagaataacctgttcctgcctgcaattttttggttctgaagactcaaagattggattgagtgatctttgaaaccaaatcttccttcggtgttttttggcattttgggcactatctgtgaagtgtagcaggaccgcctctgcttttatgctcggtagacttctgtgatcaagtattcaagtactggtaaaagattataagcttgtctaaagcaagcccttagaaggaaagttatctgaccatgttctcagctatcatggcaaagaagaattacaaacagcattccaaatctgagaaaattcaggggggttgtatgtctgggctgattcgcatgcttgatttccgtcgcagtccaaaacttctttcagacgggagagtcaaaagagataaaaaaggtcttgacgatatccatggaaacatatctgctaataatggaaaggaccacagggttgaattgatttatgttggtaggtcaagtattagaactttgatggaagaagagatggccagcagcacacagcccttgaagcaagcacaaagcaatgtcgctgggatatgctctgaagatattgatctaaacttggctggaagtctcatggaaatctacagatctcatactgaaggccaagaaaccaggaggtcgattgagtcaggtcgcagttccatttcgactgacgaagagaagaatactgaccctcctgctcatcactatcagatcccatctagtatccagagagctctagaagatgttgctgaagcagttataagacatcaatctgcaaacaaaaaatacataaacagcggtgatgaaactaggtccagagaattcgttgatgccctacagctactgagctcaaacaaggaattgtttgtgatgcttatgcaagatccaagctctaggttgttagaatgtctccaaaacctttacatgtcactaggaagtaccaggttagactctgaagaatatgacgaaggaactgagttgcaaggtacgacagatagtctagagcagtcagcgacttctccaagtaaggtgaaaagaaggcataattctttcttgaaggaggatgggttggtcacgaggaagccaccaaagttaaatgatggttctcgtggccttagcagaatagtaatcttgaagcccagtcctgcaagaggtcatagcagtcttatctcaggtagcgcaacttcatcaccactatcaaatcatattgattggcaagttcaggaaggcagtgataaacatgattgccatttctcgcttagagagcttaaaaggaggctaagaattgccattagcaataatcagaaggatcaccagttaaactccacgagtagtgatattcatgaagctgaggctgattctggcaaactgcttccagtcacaagtatgtcggagacggagagtctggcaagtacagattcttctgacagggctaaggaaccatctattgttgacgagaaaatagtcccggaagatagtgaaagtgggatgagaaatgatgttgctcatggtgtcggagtcagctctttctcatatgaaaaagctaagatgtatataattgagagactaaatgatcaaggcgaagaaagttgtcaaattgtacagaaatctgaatcttttgagagattgatttcactgcccgagaatggtacattttctccaattgatttccctcaagaggagaaaattagcatagcgcatgaagctacaaaaccattgaacttgcatactgttgagcaagaggatggttcagcaagcccttactcaacaatgcagtacgaggagacagaatcagccgacactagcaacttaggtacagaaacgttgattgagcccacgatagatcatggtagttattcacaaaatgagggcgctatctcacaggagttggtccgtgaaggggttaagatcatgctagatataatggagaactcatcgctctgtgctgagactggaacttcgcaggaaggagtgggagtgaaaaatccagatgaatgttcattggaggaaccacaatccatgaatttgttgccagaaccggcactgtattctccagatgacttcgttaatgaacaagagaaccatagtccgtcagaaattgttgaattagtcaaaccatctgtattgacatttccttactcgccggaaaatactaatgacaaagaggagaaattgagtccacaatccgttcttgatcccattgcagaagttaccagtcctagacacaaaactccaaagcaagatgaattctccatgcctacttccagagtgctattcaaagaggttgacgccccttcagcatccccaactttgtggaatgggccacaggtagccattttggatgacagagccacaagggtgtccttcatcaaggccgtgctagaagcttcaggattgctgtctgaggaaaattcgcaaatttggtacacagaagagccactgcttgatgtatctgtattggctgaagtaggaaactcgtactgcctgacagacgatgcagtgctcttgtttgactacgtggaagaggttcttctcgagataagggacaagttctttggtagcgacccttgggttaattctctgaaacacaatgtacggccagctccagtaggaagacggctggttcgagaggtggctaagggaatcgattctcttgtaggtaaagaatttccacacactttagaacaggtaatgatgaaagacttggacagtgggtcgtggctggatcttggaggcgatactggaagtgttgtagttgagttgtgggatggtttacttgatgacttgctggaggaactggtttttgatttgtggctttgatactgtagtgctttgtagtaatacatgcagaggcatattcgactagtactgacatggggttaatagatacagaaaccttttgcgaaaggatagggaaaagtgagttcggcagactgccagatgttgtagagctaggcatttcatcaatatagttgatttccattttcttttgaatttgatttctttaagctccctttgttctctgtagaggcatggaaacataaaaaataagtgctcctgtatataaagtaccccagtatttatggtaaattttcattgtgaacataatattgtttccgttactttatgagatactctattgcttctgtgtttcaag

SEQ ID NO: 216483 - DNA, 3352 bp, Zea Mays
caaaaaccaaaagtacgggctgggtcaccctccaaatcctaccttctccatccgccattagagagaggatagagaatgccgagaatgagagagacaaggtagcggcagcggttggcgcgcgcggccacagtggcaaagcctccgtcgtcggcgaggaccgctgcatgcgctgttgccgggttggcatgcttctgcttccgcgtcttgaaggatttcaaggaagggaggatcggaaaagacaactgcgattcggttgcattcatacggttctgtaaaaaaggcagtttttttttggctgtgacctgtgagtatccgccggtttgctgtttatttattcattctcagttttggaggccgaaaattcgatcttggcgctggtctcagtgtttcgaggcctcgaggggttgctgtgaagaaccagaggaagataaaaaggtggttttctcgccggttttccttggttttggggtactgaattctgagattgttctgaggcaggggtctgtcttgctggagaatgaagatgtggaggtagaacgtactttgagtacaaatgcttctggcatgatcaaaagagataaaaaaggtcttgacgatatccatggaaacatatctgctaataatggaaaggaccacagggttgaattgatttatgttggtaggtcaagtattagaactttgatggaagaagagatggccagcagcacacagcccttgaagcaagcacaaagcaatgtcgctgggatatgctctgaagatattgatctaaacttggctggaagtctcatggaaatctacagatctcatactgaaggccaagaaaccaggaggtcgattgagtcaggtcgcagttccatttcgactgacgaagagaagaatactgaccctcctgctcatcactatcagatcccatctagtatccagagagctctagaagatgttgctgaagcagttataagacatcaatctgcaaacaaaaaatacataaacagcggtgatgaaactaggtccagagaattcgttgatgccctacagctactgagctcaaacaaggaattgtttgtgatgcttatgcaagatccaagctctaggttgttagaatgtctccaaaacctttacatgtcactaggaagtaccaggttagactctgaagaatatgacgaaggaactgagttgcaaggtacgacagatagtctagagcagtcagcgacttctccaagtaaggtgaaaagaaggcataattctttcttgaaggaggatgggttggtcacgaggaagccaccaaagttaaatgatggttctcgtggccttagcagaatagtaatcttgaagcccagtcctgcaagaggtcatagcagtcttatctcaggtagcgcaacttcatcaccactatcaaatcatattgattggcaagttcaggaaggcagtgataaacatgattgccatttctcgcttagagagcttaaaaggaggctaagaattgccattagcaataatcagaaggatcaccagttaaactccacgagtagtgatattcatgaagctgaggctgattctggcaaactgcttccagtcacaagtatgtcggagacggagagtctggcaagtacagattcttctgacagggctaaggaaccatctattgttgacgagaaaatagtcccggaagatagtgaaagtgggatgagaaatgatgttgctcatggtgtcggagtcagctctttctcatatgaaaaagctaagatgtatataattgagagactaaatgatcaaggcgaagaaagttgtcaaattgtacagaaatctgaatcttttgagagattgatttcactgcccgagaatggtacattttctccaattgatttccctcaagaggagaaaattagcatagcgcatgaagctacaaaaccattgaacttgcatactgttgagcaagaggatggttcagcaagcccttactcaacaatgcagtacgaggagacagaatcagccgacactagcaacttaggtacagaaacgttgattgagcccacgatagatcatggtagttattcacaaaatgagggcgctatctcacaggagttggtccgtgaaggggttaagatcatgctagatataatggagaactcatcgctctgtgctgagactggaacttcgcaggaaggagtgggagtgaaaaatccagatgaatgttcattggaggaaccacaatccatgaatttgttgccagaaccggcactgtattctccagatgacttcgttaatgaacaagagaaccatagtccgtcagaaattgttgaattagtcaaaccatctgtattgacatttccttactcgccggaaaatactaatgacaaagaggagaaattgagtccacaatccgttcttgatcccattgcagaagttaccagtcctagacacaaaactccaaagcaagatgaattctccatgcctacttccagagtgctattcaaagaggttgacgccccttcagcatccccaactttgtggaatgggccacaggtagccattttggatgacagagccacaagggtgtccttcatcaaggccgtgctagaagcttcaggattgctgtctgaggaaaattcgcaaatttggtacacagaagagccactgcttgatgtatctgtattggctgaagtaggaaactcgtactgcctgacagacgatgcagtgctcttgtttgactacgtggaagaggttcttctcgagataagggacaagttctttggtagcgacccttgggttaattctctgaaacacaatgtacggccagctccagtaggaagacggctggttcgagaggtggctaagggaatcgattctcttgtaggtaaagaatttccacacactttagaacaggtaatgatgaaagacttggacagtgggtcgtggctggatcttggaggcgatactggaagtgttgtagttgagttgtgggatggtttacttgatgacttgctggaggaactggtttttgatttgtggctttgatactgtagtgctttgtagtaatacatgcagaggcatattcgactagtactgacatggggttaatagatacagaaaccttttgcgaaaggatagggaaaagtgagttcggcagactgccagatgttgtagagctaggcatttcatcaatatagttgatttccattttcttttgaatttgatttctttaagctccctttgttctctgtagaggcatggaaacataaaaaataagtgctcctgtatataaagtaccccagtatttatggtaaattttcattgtgaacataatattgtttccgttactttatgagatactctattgcttctgtgtttcaag

SEQ ID NO: 216484 - DNA, 3819 bp, Zea Mays
cttctccatccgccattagagagaggatagagaatgccgagaatgagagagacaaggtagcggcagcggttggcgcgcgcggccacagtggcaaagcctccgtcgtcggcgaggaccgctgcatgcgctgttgccgggttggcatgcttctgcttccgcgtcttgaaggatttcaaggaagggaggatcggaaaagacaactgcgattcggttgcattcatacggttctgtaaaaaaggcagtttttttttggctgtgacctgtgagtatccgccggtttgctgtttatttattcattctcagttttggaggccgaaaattcgatcttggcgctggtctcagtgtttcgaggcctcgaggggttgctgtgaagaaccagaggaagataaaaaggtggttttctcgccggttttccttggttttggggtactgaattctgagattgttctgaggcaggggtctgtcttgctggagaatgaagatgtggaggtttgtgtgctctgcgcgtttgttttggtgaagacaactagctggagtaaaaggaagaaaaaaaagttccgcttcctttcttttgcgtgttctgatccttctgagatatcccttcctgccgcttcagagtttcatttgtttccgactcggcatcggcatctcgtataaaccgaggagacacggcaatttcaagggccttcgtttgggaccaacagaataacctgttcctgcctgcaattttttggttctgaagactcaaagattggattgagtgatctttgaaaccaaatcttccttcggtgttttttggcattttgggcactatctgtgaagtgtagcaggaccgcctctgcttttatgctcggtagacttctgtgatcaagtattcaagtactggtaaaagattataagcttgtctaaagcaagcccttagaaggaaagttatctgaccatgttctcagctatcatggcaaagaagaattacaaacagcattccaaatctgagaaaattcaggggggttgtatgtctgggctgattcgcatgcttgatttccgtcgcagtccaaaacttctttcagacgggagagtcaaaagagataaaaaaggtcttgacgatatccatggaaacatatctgctaatgtcaagtattagaactttgatggaagaagagatggccagcagcacacagcccttgaagcaagcacaaagcaatgtcgctgggatatgctctgaagatattgatctaaacttggctggaagtctcatggaaatctacagatctcatactgaaggccaagaaaccaggaggtcgattgagtcaggtcgcagttccatttcgactgacgaagagaagaatactgaccctcctgctcatcactatcagatcccatctagtatccagagagctctagaagatgttgctgaagcagttataagacatcaatctgcaaacaaaaaatacataaacagcggtgatgaaactaggtccagagaattcgttgatgccctacagctactgagctcaaacaaggaattgtttgtgatgcttatgcaagatccaagctctaggttgttagaatgtctccaaaacctttacatgtcactaggaagtaccaggttagactctgaagaatatgacgaaggaactgagttgcaaggtacgacagatagtctagagcagtcagcgacttctccaagtaaggtgaaaagaaggcataattctttcttgaaggaggatgggttggtcacgaggaagccaccaaagttaaatgatggttctcgtggccttagcagaatagtaatcttgaagcccagtcctgcaagaggtcatagcagtcttatctcaggtagcgcaacttcatcaccactatcaaatcatattgattggcaagttcaggaaggcagtgataaacatgattgccatttctcgcttagagagcttaaaaggaggctaagaattgccattagcaataatcagaaggatcaccagttaaactccacgagtagtgatattcatgaagctgaggctgattctggcaaactgcttccagtcacaagtatgtcggagacggagagtctggcaagtacagattcttctgacagggctaaggaaccatctattgttgacgagaaaatagtcccggaagatagtgaaagtgggatgagaaatgatgttgctcatggtgtcggagtcagctctttctcatatgaaaaagctaagatgtatataattgagagactaaatgatcaaggcgaagaaagttgtcaaattgtacagaaatctgaatcttttgagagattgatttcactgcccgagaatggtacattttctccaattgatttccctcaagaggagaaaattagcatagcgcatgaagctacaaaaccattgaacttgcatactgttgagcaagaggatggttcagcaagcccttactcaacaatgcagtacgaggagacagaatcagccgacactagcaacttaggtacagaaacgttgattgagcccacgatagatcatggtagttattcacaaaatgagggcgctatctcacaggagttggtccgtgaaggggttaagatcatgctagatataatggagaactcatcgctctgtgctgagactggaacttcgcaggaaggagtgggagtgaaaaatccagatgaatgttcattggaggaaccacaatccatgaatttgttgccagaaccggcactgtattctccagatgacttcgttaatgaacaagagaaccatagtccgtcagaaattgttgaattagtcaaaccatctgtattgacatttccttactcgccggaaaatactaatgacaaagaggagaaattgagtccacaatccgttcttgatcccattgcagaagttaccagtcctagacacaaaactccaaagcaagatgaattctccatgcctacttccagagtgctattcaaagaggttgacgccccttcagcatccccaactttgtggaatgggccacaggtagccattttggatgacagagccacaagggtgtccttcatcaaggccgtgctagaagcttcaggattgctgtctgaggaaaattcgcaaatttggtacacagaagagccactgcttgatgtatctgtattggctgaagtaggaaactcgtactgcctgacagacgatgcagtgctcttgtttgactacgtggaagaggttcttctcgagataagggacaagttctttggtagcgacccttgggttaattctctgaaacacaatgtacggccagctccagtaggaagacggctggttcgagaggtggctaagggaatcgattctcttgtaggtaaagaatttccacacactttagaacaggtaatgatgaaagacttggacagtgggtcgtggctggatcttggaggcgatactggaagtgttgtagttgagttgtgggatggtttacttgatgacttgctggaggaactggtttttgatttgtggctttgatactgtagtgctttgtagtaatacatgcagaggcatattcgactagtactgacatggggttaatagatacagaaaccttttgcgaaaggatagggaaaagtgagttcggcagactgccagatgttgtagagctaggcatttcatcaatatagttgatttccattttcttttgaatttgatttctttaagctccctttgttctctgtagaggcatggaaacataaaaaataagtgctcctgtatataaagtaccccagtatttatggtaaattttcattgtgaacataatattgtttccgttactttatgagatactctattgcttctgtgtttcaag

SEQ ID NO: 216485 - DNA, 2144 bp, Zea Mays
atggagcctgtcaaggaaggggagtttgaagaggaaaggagaaaagggcagaatctgctccctgctctccacatgaattcagcagcacctgcacctataaagagagccggccggcctgcttcagccttgcttggcctcttgcttgcattgcatctcgccattgccaaggagcagtaccatgagttcgtggtgaaggaggcgactgtgacgcggctgtgcgggacgcagcagcagcggatcatgacggtgaacgggcagttccccggtccgacggtggaggtggccgagggcgacgccctcatcgtgcgcgtccgcaaccggggcagctacaacgtgacggtgcactggcacggcgtgcggcagatgcgcacggcctgggccgacggcccggagttcgtcacgcagtgccccatccgccccggcacctcctacacctaccgcttcaccgtcgccggacaggaaggcacgctctggtggcacgcgcacagctcctggctccgcgccaccgtccacggcgcgctgatcatccgcccgcgcgccggcgtcccgtacccgttcaacgccggcgacacgccagccagggagatcaccatcatactaggggaatggtggaacatgaaccccatcgacgtcgtgcgcaccgccacccgcaccggcgccgcgcccaacatctccgacgccttaaccgtcaacggccagcccggcgatctctacaagtgctcatccaacggcaccacgacgttctcggtcacgtccggcgagacgaacctgctgcgcttcatcaacgccgcgctcaacacggagctcttcgtctccctggccggccacaccatgacggtggtgggcgccgacgcctcctacaccaagccgtacgccacgcccgtcatcttggtcgcgcctggccagaccaccgacgtgctcgtcaccttcgaccagccccccagccgctactacctcgccgcgcgcgcctacgccagcgcccagggcgtccccttcgacaacaccaccaccacggccatcttcgactacggcaccggcgccagcaacagcagcagccccgcgatgcccacactcccggcctacaacgacaccgcgacggccacggcgttcaccacgagcctgcgcggcctccgcgcggcggaccttcccgcgcgcgtcgacgagagcctcttcttcaccgtcggcgtcggcctcttcaactgctccagcggccagacctgcggcgggcccaacaacacgcgcttcgcggccagcatcaacaacgtctccttcgtgctcccgtccaccacctccatcctgcaggcgcactacgcgtacgccgccggcggggcgacgccagcaggcgtgttcaccgccgacttcccggcgaacccgccggtgcggttcgactacacggcgccgaacgtcagccgcgcgctgtggcagcccgtgccgggcacccggctggtgctccagggcaccaacgtgttcgcggccgagaaccaccccatccacctccacggctacgacttctacatcctcgccgagggcttcggcaacttcgacgccgccgcggacaccgccagcttcaacatggacgacccgcccatgaggaacacggtgggcgtgccggtcaacggctgggcggtcatccgcttcgtggcggataatcccggggtgtggctcatgcactgccacctggacgtgcacatcacctggggtctcgccatggcgttcctggtggaggacggcgtcggggagctgcagtcactggaggcgccgccgtctgacctgcccatctgctagctcattgcatagggggcctcaactcatttattatgctcaaaattcgtcaaggaacattcttgccgatttataattaattcaatcatataatactattcaaacaaaagtactggcaccgtactcggctacaaagcttttgactacgggagtaatgtagaaattattttcagaccaagaaaggtctatatgacaggatgatccactgtcatcaagaaatgacagtgaatttaacaatatgccaatcaaaaatattttgtaggtattattcaggggaacacaatggctccattacagcactgtagtctgtgccaatcctcgaaatgaaatatatactatactgtttcaacattatattatgc

SEQ ID NO: 216486 - DNA, 2302 bp, Zea Mays
ctcacattcgctacgcgagggtttaattatctaaggctttaggcgaattagggtaataaagaggagattctgaccttctacagagacggcacttgaacggcgctcccaaaattcccgaaccatctgttccgttgcgtgctcctctctcactccacggtccacgactgccaccagcgcttcccgctttcccagccacccgtcgcctccgcgtgtcgccccatccagccatcagttccaccccagctgcgaatccggcgcgctactaaccgccgggggaccgaaatttccccagccgcaagtttcgggaccggaacaacaatggcagcagcagccgtcgcctccagttccaccccgcggccgctccggttggcgcagcgcggggcggtctctgcgcacgcgtcccaccacgtcagcgccccgccccaccgctcccgcaggccgcggctctccgtctcggcctcagccggggtggaggggaccagcgggtcggagcggttctacttcaacttcaccgggttccccttcccgctcggcccgttcctcaaccgccgcaccatccgcaccgaggcggtgaagggcagcatatggctgttcgagcaggagcaggcgctgggcttcagcagcgtctccaccaacatccgcatgacggtcatcaagctcaagtccggtgggctctgggtgcacgcgcccatcgcgcccacgaaggagtgcatccagatgctcaaggagctggacgcgccggtggagcacatcgtgctgccgaccttcgcatacgagcacaaaatcttcgtcgggcccttctccaggaagttccccaaggctcagatatgggtggcgcccaggcagtggagctggccaatcaacctgccgctcgagttcttcgggatcttccgggccaagccgctcaaagatgaggatgacgccacgccctgggtcgccgaaatcgagcagaaggtgctcagctctccggaagttgggattgggccatatgtggaggtggcgttctaccataagccttcacggacactactggtgaccgatgctgtcatatttgttcctcaacagccaccggagtgtatcagcaaagaatctctgttggcatctgcgaagaatggactggcagtgaagctattgagcaaagggaaggaggttcccgatgaaccagttgttgacaataagctaaaccgtcagaaagggtgggagagaatggtacttcaaatactatttcttggtccgtcaaatctacttgagccaaatgcaagttttgctcaaatgtcgcaaaaattgatcgtctcacctattgtcaagacgctcgttttcagcaaagttccagagaaggtgagggactgggttgacaggatcgctgccgactggcgattccgacggataatcccttgccacttcgcagccccaataaacgcgagccggtcagactttctggctgcctttgccttcctcgacgagttcctccccgaacgcgccgccgcggctcccggcctctcgctgctcctcgcctccttcatggggaaggcggccagctacttccctccggatgacatgaagacgctctcgtctctggacgagttcctggtctccgttggcgctgtcaagaaaaccgtctctgggaggaagaggtgacgccggtggattggatgtgcatgggtttttatatgaagggacagttgctgcagtgcgtgcttgaagcgtgggtacactgtcaaattttaatgtggttattagtggaggaaattactgtaggccctccctacagtacattcacttcaaaaaaaaaatagtgggggaaatggtacattaggctaaaatctaggagagcccatatgtcttgctgccttcaatagaaagccagatttttacagcatatggaatttaccagcttggagcataccggagtaggtatattctgtcgtgtttgaggctagtctggaagccacaaaactggagatgattgatgattgtaggggctaaaatctctgtcttattaaaaaattggataagaaagagattttagcacctccagtcccctccggttttgtggctatcaaactagcctataacgtgtgtcccctccggttttgtggctatcaaactagcctataacgtgttcgtttaccacgggatggtgaattctgtgttcctcataattcaggctgcagtgcagtgtgcacaagactgagggtgagggccatcggcaaggagttatggagtgtttggtttgaggaatgatgtagttcatcatcttctctctcctcacttttttgtttggtttgtggaatgaagtgag

SEQ ID NO: 216487 - DNA, 2233 bp, Zea Mays
caaaattcccgaaccatctgttccgttgcgtgctcctctctcactccacggtccacgactgccaccagcgcttcccgctttcccagccacccgtcgcctccgcgtgtcgccccatccagccatcagttccaccccagctgcgaatccggcgcgctactaaccgccgggggaccgaaatttccccagccgcaagtttcgggaccggaacaacaatggcagcagcagccgtcgcctccagttccaccccgcggccgctccggttggcgcagcgcggggcggtctctgcgcacgcgtcccaccacgtcagcgccccgccccaccgctcccgcaggccgcggctctccgtctcggcctcagccggggtggaggggaccagcgggtcggagcggttctacttcaacttcaccgggttccccttcccgctcggcccgttcctcaaccgccgcaccatccgcaccgagtgtttctcgcgttggtgcgcgccggccgttggatcaggcggtgaagggcagcatatggctgttcgagcaggagcaggcgctgggcttcagcagcgtctccaccaacatccgcatgacggtcatcaagctcaagtccggtgggctctgggtgcacgcgcccatcgcgcccacgaaggagtgcatccagatgctcaaggagctggacgcgccggtggagcacatcgtgctgccgaccttcgcatacgagcacaaaatcttcgtcgggcccttctccaggaagttccccaaggctcagatatgggtggcgcccaggcagtggagctggccaatcaacctgccgctcgagttcttcgggatcttccgggccaagccgctcaaagatgaggatgacgccacgccctgggtcgccgaaatcgagcagaaggtgctcagctctccggaagttgggattgggccatatgtggaggtggcgttctaccataagccttcacggacactactggtgaccgatgctgtcatatttgttcctcaacagccaccggagtgtatcagcaaagaatctctgttggcatctgcgaagaatggactggcagtgaagctattgagcaaagggaaggaggttcccgatgaaccagttgttgacaataagctaaaccgtcagaaagggtgggagagaatggtacttcaaatactatttcttggtccgtcaaatctacttgagccaaatgcaagttttgctcaaatgtcgcaaaaattgatcgtctcacctattgtcaagacgctcgttttcagcaaagttccagagaaggtgagggactgggttgacaggatcgctgccgactggcgattccgacggataatcccttgccacttcgcagccccaataaacgcgagccggtcagactttctggctgcctttgccttcctcgacgagttcctccccgaacgcgccgccgcggctcccggcctctcgctgctcctcgcctccttcatggggaaggcggccagctacttccctccggatgacatgaagacgctctcgtctctggacgagttcctggtctccgttggcgctgtcaagaaaaccgtctctgggaggaagaggtgacgccggtggattggatgtgcatgggtttttatatgaagggacagttgctgcagtgcgtgcttgaagcgtgggtacactgtcaaattttaatgtggttattagtggaggaaattactgtaggccctccctacagtacattcacttcaaaaaaaaaatagtgggggaaatggtacattaggctaaaatctaggagagcccatatgtcttgctgccttcaatagaaagccagatttttacagcatatggaatttaccagcttggagcataccggagtaggtatattctgtcgtgtttgaggctagtctggaagccacaaaactggagatgattgatgattgtaggggctaaaatctctgtcttattaaaaaattggataagaaagagattttagcacctccagtcccctccggttttgtggctatcaaactagcctataacgtgtgtcccctccggttttgtggctatcaaactagcctataacgtgttcgtttaccacgggatggtgaattctgtgttcctcataattcaggctgcagtgcagtgtgcacaagactgagggtgagggccatcggcaaggagttatggagtgtttggtttgaggaatgatgtagttcatcatcttctctctcctcacttttttgtttggtttgtggaatgaagtgag

SEQ ID NO: 216488 - DNA, 1255 bp, Zea Mays
atctgttccgttgcgtgctcctctctcactccacggtccacgactgccaccagcgcttcccgctttcccagccacccgtcgcctccgcgtgtcgccccatccagccatcagttccaccccagctgcgaatccggcgcgctactaaccgccgggggaccgaaatttccccagccgcaagtttcgggaccggaacaacaatggcagcagcagccgtcgcctccagttccaccccgcggccgctccggttggcgcagcgcggggcggtctctgcgcacgcgtcccaccacgtcagcgccccgccccaccgctcccgcaggccgcggctctccgtctcggcctcagccggggtggaggggaccagcgggtcggagcggttctacttcaacttcaccgggttccccttcccgctcggcccgttcctcaaccgccgcaccatccgcaccgaggcggtgaagggcagcatatggctgttcgagcaggagcaggcgctgggcttcagcagcgtctccaccaacatccgcatgacggtcatcaagctcaagtccggtgggctctgggtgcacgcgcccatcgcgcccacgaaggagtgcatccagatgctcaaggagctggacgcgccggtggagcacatcgtgctgccgaccttcgcatacgagcacaaaatcttcgtcgggcccttctccaggaagttccccaaggctcagatatgggtggcgcccaggcagtggagctggccaatcaacctgccgctcgagttcttcgggatcttccgggccaagccgctcaaagatgaggatgacgccacgccctgggtcgccgaaatcgagcagaaggtgctcagctctccggaagttgggattgggccatatgtggaggtggcgttctaccataagccttcacggacactactggtgaccgatgctgtcatatttgttcctcaacagccaccggagtgtatcagcaaagaatctctgttggcatctgcgaagaatggactggcagtgaagctattgagcaaagggaaggaggttcccgatgaaccagttgttgacaataagctaaaccgtcagaaagggtgggagagaatggtacttcaaatactatttcttggtccgtcaaatctacttgagccaaatgcaagttttgctcaaatgtcgcaaaaattgatcgtctcacctattgtcaagacgctcgttttcagcaaagttccagagaaggacgtagaaggcctgaattgggacgacgaaggatggat

SEQ ID NO: 216489 - DNA, 1270 bp, Zea Mays
atctgttccgttgcgtgctcctctctcactccacggtccacgactgccaccagcgcttcccgctttcccagccacccgtcgcctccgcgtgtcgccccatccagccatcagttccaccccagctgcgaatccggcgcgctactaaccgccgggggaccgaaatttccccagccgcaagtttcgggaccggaacaacaatggcagcagcagccgtcgcctccagttccaccccgcggccgctccggttggcgcagcgcggggcggtctctgcgcacgcgtcccaccacgtcagcgccccgccccaccgctcccgcaggccgcggctctccgtctcggcctcagccggggtggaggggaccagcgggtcggagcggttctacttcaacttcaccgggttccccttcccgctcggcccgttcctcaaccgccgcaccatccgcaccgaggcggtgaagggcagcatatggctgttcgagcaggagcaggcgctgggcttcagcagcgtctccaccaacatccgcatgacggtcatcaagctcaagtccggtgggctctgggtgcacgcgcccatcgcgcccacgaaggagtgcatccagatgctcaaggagctggacgcgccggtggagcacatcgtgctgccgaccttcgcatacgagcacaaaatcttcgtcgggcccttctccaggaagttccccaaggctcagatatgggtggcgcccaggcagtggagctggccaatcaacctgccgctcgagttcttcgggatcttccgggccaagccgctcaaagatgaggatgacgccacgccctgggtcgccgaaatcgagcagaaggtgctcagctctccggaagttgggattgggccatatgtggaggtggcgttctaccataagccttcacggacactactggtgaccgatgctgtcatatttgttcctcaacagccaccggagtgtatcagcaaagaatctctgttggcatctgcgaagaatggactggcagtgaagctattgagcaaagggaaggaggttcccgatgaaccagttgttgacaataagctaaaccgtcagaaagggtgggagagaatggtacttcaaatactatttcttggtccgtcaaatctacttgagccaaatgcaagttttgctcaaatgtcgcaaaaattgatcgtctcacctattgtcaagacgctcgttttcagcaaagttccagagaaggtcttagcattaggcagttctccagccctggtatagttcgcacaagggacaat

SEQ ID NO: 216490 - DNA, 2219 bp, Zea Mays
atctgttccgttgcgtgctcctctctcactccacggtccacgactgccaccagcgcttcccgctttcccagccacccgtcgcctccgcgtgtcgccccatccagccatcagttccaccccagctgcgaatccggcgcgctactaaccgccgggggaccgaaatttccccagccgcaagtttcgggaccggaacaacaatggcagcagcagccgtcgcctccagttccaccccgcggccgctccggttggcgcagcgcggggcggtctctgcgcacgcgtcccaccacgtcagcgccccgccccaccgctcccgcaggccgcggctctccgtctcggcctcagccggggtggaggggaccagcgggtcggagcggttctacttcaacttcaccgggttccccttcccgctcggcccgttcctcaaccgccgcaccatccgcaccgaggtgtttctcgcgttggtgcgcgccggccgttggatcaggcggtgaagggcagcatatggctgttcgagcaggagcaggcgctgggcttcagcagcgtctccaccaacatccgcatgacggtcatcaagctcaagtccggtgggctctgggtgcacgcgcccatcgcgcccacgaaggagtgcatccagatgctcaaggagctggacgcgccggtggagcacatcgtgctgccgaccttcgcatacgagcacaaaatcttcgtcgggcccttctccaggaagttccccaaggctcagatatgggtggcgcccaggcagtggagctggccaatcaacctgccgctcgagttcttcgggatcttccgggccaagccgctcaaagatgaggatgacgccacgccctgggtcgccgaaatcgagcagaaggtgctcagctctccggaagttgggattgggccatatgtggaggtggcgttctaccataagccttcacggacactactggtgaccgatgctgtcatatttgttcctcaacagccaccggagtgtatcagcaaagaatctctgttggcatctgcgaagaatggactggcagtgaagctattgagcaaagggaaggaggttcccgatgaaccagttgttgacaataagctaaaccgtcagaaagggtgggagagaatggtacttcaaatactatttcttggtccgtcaaatctacttgagccaaatgcaagttttgctcaaatgtcgcaaaaattgatcgtctcacctattgtcaagacgctcgttttcagcaaagttccagagaaggtgagggactgggttgacaggatcgctgccgactggcgattccgacggataatcccttgccacttcgcagccccaataaacgcgagccggtcagactttctggctgcctttgccttcctcgacgagttcctccccgaacgcgccgccgcggctcccggcctctcgctgctcctcgcctccttcatggggaaggcggccagctacttccctccggatgacatgaagacgctctcgtctctggacgagttcctggtctccgttggcgctgtcaagaaaaccgtctctgggaggaagaggtgacgccggtggattggatgtgcatgggtttttatatgaagggacagttgctgcagtgcgtgcttgaagcgtgggtacactgtcaaattttaatgtggttattagtggaggaaattactgtaggccctccctacagtacattcacttcaaaaaaaaaatagtgggggaaatggtacattaggctaaaatctaggagagcccatatgtcttgctgccttcaatagaaagccagatttttacagcatatggaatttaccagcttggagcataccggagtaggtatattctgtcgtgtttgaggctagtctggaagccacaaaactggagatgattgatgattgtaggggctaaaatctctgtcttattaaaaaattggataagaaagagattttagcacctccagtcccctccggttttgtggctatcaaactagcctataacgtgtgtcccctccggttttgtggctatcaaactagcctataacgtgttcgtttaccacgggatggtgaattctgtgttcctcataattcaggctgcagtgcagtgtgcacaagactgagggtgagggccatcggcaaggagttatggagtgtttggtttgaggaatgatgtagttcatcatcttctctctcctcacttttttgtttggtttgtggaatgaagtgag

SEQ ID NO: 216491 - DNA, 1392 bp, Zea Mays
atctgttccgttgcgtgctcctctctcactccacggtccacgactgccaccagcgcttcccgctttcccagccacccgtcgcctccgcgtgtcgccccatccagccatcagttccaccccagctgcgaatccggcgcgctactaaccgccgggggaccgaaatttccccagccgcaagtttcgggaccggaacaacaatggcagcagcagccgtcgcctccagttccaccccgcggccgctccggttggcgcagcgcggggcggtctctgcgcacgcgtcccaccacgtcagcgccccgccccaccgctcccgcaggccgcggctctccgtctcggcctcagccggggtggaggggaccagcgggtcggagcggttctacttcaacttcaccgggttccccttcccgctcggcccgttcctcaaccgccgcaccatccgcaccgaggagcaggcgctgggcttcagcagcgtctccaccaacatccgcatgacggtcatcaagctcaagtccggtgggctctgggtgcacgcgcccatcgcgcccacgaaggagtgcatccagatgctcaaggagctggacgcgccggtggagcacatcgtgctgccgaccttcgcatacgagcacaaaatcttcgtcgggcccttctccaggaagttccccaaggctcagatatgggtggcgcccaggcagtggagctggccaatcaacctgccgctcgagttcttcgggatcttccgggccaagccgctcaaagatgaggatgacgccacgccctgggtcgccgaaatcgagcagaaggtgctcagctctccggaagttgggattgggccatatgtggaggtggcgttctaccataagccttcacggacactactggtgaccgatgctgtcatatttgttcctcaacagccaccggagtgtatcagcaaagaatctctgttggcatctgcgaagaatggactggcagtgaagctattgagcaaagggaaggaggttcccgatgaaccagttgttgacaataagctaaaccgtcagaaagggtgggagagaatggtacttcaaatactatttcttggtccgtcaaatctacttgagccaaatgcaagttttgctcaaatgtcgcaaaaattgatcgtctcacctattgtcaagacgctcgttttcagcaaagttccagagaagttattgctgtagggctgcctccacgagcaggcgcacgccaaggtttgcttcacgcggcagggcgtcgaacagcaagctcattatgaccacaggcatcgcagttcaacacttcacaggccgaaacgcctgctgcgtcgcttactattgtctgacactgacagaagttccatattgcacgggcggacgtctcgaaaccagccgagcctcg

SEQ ID NO: 216492 - DNA, 2365 bp, Zea Mays
atctgttccgttgcgtgctcctctctcactccacggtccacgactgccaccagcgcttcccgctttcccagccacccgtcgcctccgcgtgtcgccccatccagccatcagttccaccccagctgcgaatccggcgcgctactaaccgccgggggaccgaaatttccccagccgcaagtttcgggaccggaacaacaatggcagcagcagccgtcgcctccagttccaccccgcggccgctccggttggcgcagcgcggggcggtctctgcgcacgcgtcccaccacgtcagcgccccgccccaccgctcccgcaggccgcggctctccgtctcggcctcagccggggtggaggggaccagcgggtcggagcggttctacttcaacttcaccgggttccccttcccgctcggcccgttcctcaaccgccgcaccatccgcaccgaggcggtgaagggcagcatatggctgttcgagcaggagcaggcgctgggcttcagcagcgtctccaccaacatccgcatgacggtcatcaagctcaagtccggtgggctctgggtgcacgcgcccatcgcgcccacgaaggagtgcatccagatgctcaaggagctggacgcgccggtggagcacatcgtgctgccgaccttcgcatacgagcacaaaatcttcgtcgggcccttctccaggaagttccccaaggctcagatatgggtggcgcccaggcagtggagctggccaatcaacctgccgctcgagttcttcgggatcttccgggccaagccgctcaaagatgaggatgacgccacgccctgggtcgccgaaatcgagcagaaggtgctcagctctccggaagttgggattgggccatatgtggaggtggcgttctaccataagccttcacggacactactggtgaccgatgctgtcatatttgttcctcaacagccaccggagtgtatcagcaaagaatctctgttggcatctgcgaagaatggactggcagtgaagctattgagcaaagggaaggaggttcccgatgaaccagttgttgacaataagctaaaccgtcagaaagggtgggagagaatggtacttcaaatactatttcttggtccgtcaaatctacttgagccaaatgcaagttttgctcaaatgtcgcaaaaattgatcgtctcacctattgtcaagacgctcgttttcagcaaagttccagagaaggtacaatgtgtttggttaacagggagcctgagcgatgagatacaaacgcacgtgcagagagacgcaggcagaatacggctgtggtacaaggttcagaatctcagttcttgaagcaaggaaactggagtagaagacttgcactcttgctctactaatgagaaaatcgagcaaaagatctgccccattcttgactgagagtaatgttgagcaagaaaacagttgttgcgacaggaacattttgctcaaatttccttcagatgaagcatggcagaaataaaaagttggtccgctgatgacagaaacgagcaagatatctgtcccttccaaaattgacatcaatgttgagcaagaaacggttgtggtggcagaaacttttttgaactaatttccttaatggcagtgcggtaaaaagcaaacggaaaatctgcggcaaaaccatagcagttggcagtaataatacttgggcaccttcaaatgcagcacagcagaaggggaaaaaaaagagcctgagtcaggcaggcctgacaggaacgatcctctacaggacaaaggaatcagcattaaaccaaatcctgactgttaatcacgctctggcccacaggtcattgacacatcaaccaggcttaaagtgcttgcctccttaggctgtctccagcagcgtcctctaaattccatcccctaaaggaatattctctgtcctttacagcacactctaaaagattctgtcctctatatattctcagtctccagcagtgtcccctaaattcggtctcctaaagctacagtgttaacagattccttttttccatttgtttttctgttttctttggtttgttcccatttcacgctatacaaatgatacgcaaaaaagtgtatttatcaattttcgaattgtcaaatttaattaacattgttattttgtgtgtaattgttattttgtgtgtaatttaattaacattgttatttcgtccagccccccttttttccatttgtttttctgttttctttggtttgttcccatttcacgctatacaaatgatacgcaaaaaagtgtatttatcaattttcgaattgtcaaatttaattaacattgttattttgtgtgtaattgttattttgtgtgtaatttaattaacattgttatttcg

SEQ ID NO: 216493 - DNA, 1678 bp, Zea Mays
gttagggcctgtagatccctcaaatccctaaccgacccgcgaccccgacccgattgccgtacctccttccgtgtggcatataaatccgacgcgccgacgcctcgattcctcgcctccccgagagcccccgtttctgtcacaaatcgccactaaaaccctagccttccgccatggccacctcccctgccgcctcgtcctcctccgctccgaccgcctccgcggtggctgcggctacgatggctgttgaggccaccgacgggccggtgctcagcgtagtatcgaagcgtctccgcgcactgcggaagaagtacaaccgaatcacgcagatggaggagtcgctcgccgccggcaagacgctcaaccgagagcaggaggaggttctccgctccaagcccgtcgtcgccgctctgatcgacgagctcgagcgcctccgccctccgctcgcctccgccctcgcggaggagctctcctcccgccccgcccccgccccctccgccgcttcctcctccgactcagattcgtcagtccaggacttgcttgcgctcgtctacttcggctccctctttgacgtcaagcagcaaagcgacttcgtctctttggtttacacgcgcgaactcgagcggagcagctgcctcacttatgactacgtcggggatgatccggaggacagtctcgcggagaccgatctgaacgcggtttctgcccttgcctccctcgccgcgttgcgccctcctgctgcagccggagtctcgcaccgtgacgcccttcaggcttgtgctcatcacgcccgcctctggctctgccgtgcggatgaacccatccatcctgactccaccatcacatatgctggggtgagggcaaagctggataggatcatggcatcgggctacttcacagcgcagctagaaatgaggacaccattggatctggctgctgcagtggcaagttttggagctggaggtgtgcaggtgcaagagagcatggttgtgtcacctcaggcaccggaagcagtggaggagagccaggctgttgaaggacacaagaatgagaaggaagattctcaggctacagaaatctacaatgatcatcctgttgttgactctgaacatgtggaggatgaagtcctggtgcatccaactgatgaagttcctccagctgagacagagcaggagcaggagacatttgatgctgatgtgaaggatcaggagcaaaaggaccaacaattcatccagcggcggtcttaccagaaccagcgtggtggtggtcgtggtggcagcaggagaggctatcctaatggtcgtggaggacgtggtggccgaggtggcgggtaccagaatggccgtggtggataccagaatggtcgtggcggtgctggcgggtactactacgaatctggatactaccagccgaggaactacaacagaggccggggtggtcgctccggcggtggcaactcttactacaacagccatggtggaggtgcacaggggcatcatcctgggagtgttgagctgggcgcaaacgcctagcttcgctgactgttctgtttgataatgaggagcgacatttggaggtgattgttgacctgttcgttggcctcgaagtgtttttttttgttgcaacgcctaccaatccgaaccgctggtactacgggagacgaatggttggtgccttgatg

SEQ ID NO: 216494 - DNA, 4129 bp, Zea Mays
catgttgctgcggcgctaggatctcctatgacaactggtgacattgatcctgcagtattggcttcccttcctccatcgatgcagttagatcttcttgttcagatgagggagagagtgatggctgaaaacaggcagaagtaccagaaaataaaaaaggaacctgcaaagttttcagagcttcaaatacagtcctatctcaaaacagttgctttccgtcgagagatagaccaagttcagaagtcttcgtcagggaagggtagtggaggtgtccagacatcaaaaatagcatcagaagctaatagagagtttattttctcatcatcattcactggtgataaacagatgctggcacaaagaggtgaaaaggagcataatgttgaaaacactagatcaaaaaaggaaattcattcttctgtcttcgcatctaaccccacaagtagtttgggaacaatgaagcctcccaacagcaaaactttgagcgattttgggcctgatgttgagacctatcgtgatgagagaggacggattagagtaagcagggtcagagcaatgggaattcgtatgactcgtgacattcaaaggaatttagattttattaaagagaatgaacaggttaaaagtaagggacagacacagaccaattttcacaatggatcaacaggcaatgaagagcctccagattttccagaacatctttttgaaagtaacaagctccagagttcttgtagtcctgatgtggatctttctgaaactgacagagacaaccatcagacctcgtcacaaataggaacagatatcatttctgagagttcttgttatggaaacaaggaagcaatagagatatctttctcggttgatcaaactgaagtgaaggatggcgatgaagatatatttttgcaattagtgtccgggatggcacccaacaacatattttctggaaataattgtttggttaaaaagatggaagaatctgtagattctgagtgtatttgggaagatggtgttattgaagcaggaacttctcctgtgaaaattgacatgaaggatcataagtcatctctgccagagaattgcagcgatgatgagatggagtgggaggaaggtgatagctttgtacctggagttgcttctagtagtgaacataatccatgtaatgcaccaaagggggatctggaagaagcagctcttgtacaggaagcaataaggaggagtttagaggattttgagaagaaggcatctgagaatgtgagtactggagatatacaagcatctgttgaagatagatctttgcagttctccaacaatgttcctaagatatctgaatctcttggtgaaaatgattcacattctggagtacctgttgttgacgagataaacaatgaaacaagaacagaaatcaattatgataaggatgatatggtacaaggcactggactacttggaactgagagacaagaatctgaatcacaacccccactggtgaataatgattggcatgccgatatgcacagagctcatcctctggggtctgtgcctccatgtactacattcacgagtgatctggctgaaaaaccatctgtcagtgcagaaactaacggtgaagatgtaatgatatttacaacaaaaattcctggaacagctttaggcgattgtgataaaacttccaacctaaacattatgaattctgatcaatcaaaatgcagcaaagatattgcttcaactggagaatccttgtcacaccaaaagaaccttttaattgatgaactactagccgtcactgccgaacaaaaagaaaatgctacccaggtagatttgaagtttgccacatctgaggtagattatacacaaatttgtggcaacgatgacaaccatacaatatcagcgagttatgttgacgcggagctatctcgtcttagacaagaacagatatatcttggacatgaaaggcgaaaacttgaaagtcatgcagagtctgtaagcagtgagatgtttgccgaatgccaggagttgctccaaatgtttgggttgccatatattattgcaccaatggaagctgaagctcaatgtgcatacatggaaataaataacctcgttgatggagttgtcaccgatgattcagacgtatttctgtttggagcaaggaatgtttacaagaacatatttgatgataggaagtatgtagaaacatattttatgaaggacattgagtctgagcttgggttatcacgagaacagttaatccgcatggctctgcttcttggaagtgattacactgaaggtgttagtggtatcggcatcgtgaatgctattgaagttgtacatgcatttcctgaagaagatggactgcagaagtttaaagaatggattgaatcaccagatccatcaatatttggtaaactgcatatggaaataagtggtagatcgaagaaaagaaaactcgatgaaaatgattcagatggaaaggggaaaggcctggaacctgaatgcattcaaggttctgatgataaacaatcttctaatgaggatgaacatgtcaaggaaatatttatgagtaaacataggaatgtgagcaagaactggcatgtccctgcaacttttcctagtgagaaagttgtaaatgcatatatttctccacaagttgacagttcaacggagcctttttcctggggaagaccagatttaggcctactacgtaggttatgttgggaaaggtttgggtggggcaaagagaaagctgatgaactgctgcttccagttttgagagagtataataaacacgagactcagctgcgcatggaggcattttattcattcaatgagagatttgcaaaaattcgcagcaaaaggattaagaaagccatcaagggcattacaggcaaaagctttcttgacgcagatgaatctgagcaggataatcccagtactagcaagacgatcaagaagaaagaggccagctcctcaagccatgccagaggtagagaaaaaaggaaaaacgattatggagtcatgggaagtcaagaagataatataattgacaataccaacagtttggcagagacagttgagaatactagagaaaataacaatactactaagataaaaagagggagttcctgtggtcgccccaaaggtagaggacgaagcaggacaactgcgggaagtgatgcaacaataaatcaggaggattatgaaatagaatattctacttcagcttcagatgaggattcatgtaaaaggcattccaacagttacggatcggaaggaagggcattgcgaaggtcaagtaggaaacggaaacaggtgacatacatggaagatggtcacgaagcatatggcaatgatgttccaatgcatcaaaacgatgaaaataacccaggccaacctgctgcagccgcagacgtggctggagaagacacaggatttaatatttaccatcaggatacaagtgaactaaacagcagtcagatgcatacaggtgcaggcattaccgaagatatcaatgaagattcccagcgttttgagttacgggaggacaatcaggtggattcaacaccgaaagactatttgttcaatggtggtggtttttgtatggagggcgagggcgatgaacaagaaccagcgtgtgatcaatctggtgcagaagtagaacctggaccaagtggtccatgtggcgccatggatgaagtttcagagagtgcaagcatatcgacggctatggagtgtaccgagaatgcaagaatggaggcacgcggtgcatcttcgtcgcagcaaagacgcaaggcaagccgaggtttgagtgccatgccgacgcttatcaagcgtaggagaaaatcgtgatttatttgcagtttcactgcatgtatagcacgccattacggcctctgtttggttcaagcgcttatgatttcgcatcagtctttggccaccagtgacgagcgctgtttcgcggacgcaaaatgcacgtctgtgctgtgatttagttccgtctttttttctcgtctgattggttgctcatcgtctcatcctgagcgcattgattttatctgagcttctgtttggttaagagcctgctgggttcgccttttacttaacacgcgatgcggtatgagagccgtggtatgtaaaatca

SEQ ID NO: 216495 - DNA, 5063 bp, Zea Mays
tggccaagcgcgtccacataaccaaacacgcagaaagagattttgagtctaaatcgtagatcgtcgaatccctcctcaacgcattcgtttcgacgaatcataatgtgtgttttataatgacaaaaatctcgcgagtcgtaggctcgtggtcgtgggtcgtggccctagcgacaggcacaacaggcccctccgctcctggcctcctcctcggcgtcgcgtcaacgttgcgcctctccagagtcgccggccgccgagggcactctccacctcttccgtcggcgcccgggagaaggagatgggagttcacggtctgtgggaactactggctccggttgggcgacgcgtctcagtggagacccttgcgggcaagcgggtggcggtggacgcgagcatctggatggtgcagttcatgcgggcgatgcgggacgacagcggcgagatggtccgggacgcgcacctcctagggttcctccgtcgcatctgcaagctcctcttcctccgtgttcgccccgtattcgtcttcgatggcgccacgccggcgctcaagcgccgcaccctcgctgcccgccgcaggcaccgtgacgccgcgcaggccaaggtccgaaagaccgccgagaaactcctgctctcccatctcaaagctagaaagcttgaagaattggcagaacaaatcaggagtgacagagctaagcatgatgccaagggcaagcaagttgagagcagtaatggaggagaaactgagaaaacaagtcaaaaccaaatcggtgataccaacaacagtgagggaaatgttgcatcgatcaatcaggagaaagtggatggaatgctggccgcatcgcttgctgcagaggaagacacagatttcactgacgagggaacacaccatcttacaagtgctccattgccagaaggagatgaaattgatgaggatgaagatgatgatgaagggatgatcttccctatgacaactggtgacattgatcctgcagtattggcttcccttcctccatcgatgcagttagatcttcttgttcagatgagggagagagtgatggctgaaaacaggcagaagtaccagaaaataaaaaaggaacctgcaaagttttcagagcttcaaatacagtcctatctcaaaacagttgctttccgtcgagagatagaccaagttcagaagtcttcgtcagggaagggtagtggaggtgtccagacatcaaaaatagcatcagaagctaatagagagtttattttctcatcatcattcactggtgataaacagatgctggcacaaagaggtgaaaaggagcataatgttgaaaacactagatcaaaaaaggaaattcattcttctgtcttcgcatctaaccccacaagtagtttgggaacaatgaagcctcccaacagcaaaactttgagcgattttgggcctgatgttgagacctatcgtgatgagagaggacggattagagtaagcagggtcagagcaatgggaattcgtatgactcgtgacattcaaaggaatttagattttattaaagagaatgaacaggttaaaagtaagggacagacacagaccaattttcacaatggatcaacaggcaatgaagagcctccagattttccagaacatctttttgaaagtaacaagctccagagttcttgtagtcctgatgtggatctttctgaaactgacagagacaaccatcagacctcgtcacaaataggaacagatatcatttctgagagttcttgttatggaaacaaggaagcaatagagatatctttctcggttgatcaaactgaagtgaaggatggcgatgaagatatatttttgcaattagtgtccgggatggcacccaacaacatattttctggaaataattgtttggttaaaaagatggaagaatctgtagattctgagtgtatttgggaagatggtgttattgaagcaggaacttctcctgtgaaaattgacatgaaggatcataagtcatctctgccagagaattgcagcgatgatgagatggagtgggaggaaggtgatagctttgtacctggagttgcttctagtagtgaacataatccatgtaatgcaccaaagggggatctggaagaagcagctcttgtacaggaagcaataaggaggagtttagaggattttgagaagaaggcatctgagaatgtgagtactggagatatacaagcatctgttgaagatagatctttgcagttctccaacaatgttcctaagatatctgaatctcttggtgaaaatgattcacattctggagtacctgttgttgacgagataaacaatgaaacaagaacagaaatcaattatgataaggatgatatggtacaaggcactggactacttggaactgagagacaagaatctgaatcacaacccccactggtgaataatgattggcatgccgatatgcacagagctcatcctctggggtctgtgcctccatgtactacattcacgagtgatctggctgaaaaaccatctgtcagtgcagaaactaacggtgaagatgtaatgatatttacaacaaaaattcctggaacagctttaggcgattgtgataaaacttccaacctaaacattatgaattctgatcaatcaaaatgcagcaaagatattgcttcaactggagaatccttgtcacaccaaaagaaccttttaattgatgaactactagccgtcactgccgaacaaaaagaaaatgctacccaggtagatttgaagtttgccacatctgaggtagattatacacaaatttgtggcaacgatgacaaccatacaatatcagcgagttatgttgacgcggagctatctcgtcttagacaagaacagatatatcttggacatgaaaggcgaaaacttgaaagtcatgcagagtctgtaagcagtgagatgtttgccgaatgccaggagttgctccaaatgtttgggttgccatatattattgcaccaatggaagctgaagctcaatgtgcatacatggaaataaataacctcgttgatggagttgtcaccgatgattcagacgtatttctgtttggagcaaggaatgtttacaagaacatatttgatgataggaagtatgtagaaacatattttatgaaggacattgagtctgagcttgggttatcacgagaacagttaatccgcatggctctgcttcttggaagtgattacactgaaggtgttagtggtatcggcatcgtgaatgctattgaagttgtacatgcatttcctgaagaagatggactgcagaagtttaaagaatggattgaatcaccagatccatcaatatttggtaaactgcatatggaaataagtggtagatcgaagaaaagaaaactcgatgaaaatgattcagatggaaaggggaaaggcctggaacctgaatgcattcaaggttctgatgataaacaatcttctaatgaggatgaacatgtcaaggaaatatttatgagtaaacataggaatgtgagcaagaactggcatgtccctgcaacttttcctagtgagaaagttgtaaatgcatatatttctccacaagttgacagttcaacggagcctttttcctggggaagaccagatttaggcctactacgtaggttatgttgggaaaggtttgggtggggcaaagagaaagctgatgaactgctgcttccagttttgagagagtataataaacacgagactcagctgcgcatggaggcattttattcattcaatgagagatttgcaaaaattcgcagcaaaaggattaagaaagccatcaagggcattacaggcaaaagctttcttgacgcagatgaatctgagcaggataatcccagtactagcaagacgatcaagaagaaagaggccagctcctcaagccatgccagaggtagagaaaaaaggaaaaacgattatggagtcatgggaagtcaagaagataatataattgacaataccaacagtttggcagagacagttgagaatactagagaaaataacaatactactaagataaaaagagggagttcctgtggtcgccccaaaggtagaggacgaagcaggacaactgcgggaagtgatgcaacaataaatcaggaggattatgaaatagaatattctacttcagcttcagatgaggattcatgtaaaaggcattccaacagttacggatcggaaggaagggcattgcgaaggtcaagtaggaaacggaaacaggtgacatacatggaagatggtcacgaagcatatggcaatgatgttccaatgcatcaaaacgatgaaaataacccaggccaacctgctgcagccgcagacgtggctggagaagacacaggatttaatatttaccatcaggatacaagtgaactaaacagcagtcagatgcatacaggtgcaggcattaccgaagatatcaatgaagattcccagcgttttgagttacgggaggacaatcaggtggattcaacaccgaaagactatttgttcaatggtggtggtttttgtatggagggcgagggcgatgaacaagaaccagcgtgtgatcaatctggtgcagaagtagaacctggaccaagtggtccatgtggcgccatggatgaagtttcagagagtgcaagcatatcgacggctatggagtgtaccgagaatgcaagaatggaggcacgcggtgcatcttcgtcgcagcaaagacgcaaggcaagccgaggtttgagtgccatgccgacgcttatcaagcgtaggagaaaatcgtgatttatttgcagtttcactgcatgtatagcacgccattacggcctctgtttggttcaagcgcttatgatttcgcatcagtctttggccaccagtgacgagcgctgtttcgcggacgcaaaatgcacgtctgtgctgtgatttagttccgtctttttttctcgtctgattggttgctcatcgtctcatcctgagcgcattgattttatctgagcttctgtttggttaagagcctgctgggttcgccttttacttaacacgcgatgcggtatgagagccgtggtatgtaaaatca

SEQ ID NO: 216496 - DNA, 3905 bp, Zea Mays
cgcttccctcccttgttcgtccatccgtcacaatggtcacacggcggctcccaaaccctaaacagcggtggtgcccctacgcttcagcctcgactcagtattcccccttccccgcttcgacaagtctcgtcccccgcccccttattccattacaagcaactccgccggtgccaccgctgctggtgggacaggccgccgccgccgctgctggtgggacctaccgcctcgcgctccgcatccagcgccgcctcatcccgcccaaccaccccaggatacgggacttcgtctacaggtactgccttcgccgagccccgctgtcgtgcgtccgcgctcaggacgccgtcggtcactgccagccaaacaggatcagcgcgagcagccagtgcaggcacatctcctactcctacgccccgttcccgtcggtcactgccaggaggaagggtgtcttccgcgaggacattgcacagctgatggtatgtctgatgtgtcttggtttaataataaagaagcgagcgagcgcagaggaaattgtcactgctgctgcggtttaggatggagtaatattttagccttgattttgacatccttttttgcagagtagtggatcaacattattcaaaattttgctcatgacgtctgatatgtggacagttgccattcaagttttactctatcatcaataggtgaagattcctgatccagaatacttgtgtaagattattaacatgttacccaataataatcttacataatttggcccaacccaaagatacgttaatttaaactccctagattattttgtggaatcccaacagagtttattcatttgcttgtactctatgaagtggaagttcttgagatgccaaaaagcagggaagtgcggacataacagtcaagatgagctacttaaaagtgaggataattcaaaggagcgtggtatcccgagaatatgaacactccagagatgcaatatttgaggttagtatgcagtagtcgagcctgttcatagtttattgttcctgttttctaatcttggtcttatgactaataatttttaatgagtggttctaactggactgcatccaaatgtagtcattggctaagccaaaatttgaatttcataaagtaactaagatcggtgtttgtccggattgtgacaaggctgtagctttccccttaatcgatcagaccatatcctaggattaaggatgtgcaacagaacccttttgttgtcgacgatatcaatgagcttcggtttttttcacatccataactatataccaagcctttctgccacatttgcaagccacaccatcgctatgaatagaaaaactattatgctagatccatcttctatccgcatatcataaccataacgggtccttcaaaatttatttgtgacctttatgctttgatatttgattggtaagggtctacaggatcttatgaccttatttaccatcgctctgagttcgcaaggcataaatattatggttcttgtgaactcatcctcctacatgtaacatgtcgagtgaagcccaagcctggcccaacaaggagtcatgttctttgcagaacaacaatagatagatgccatttaaactaagttgatggttgtttcaatataacacttgaaagaacagacccaaggatgtaaactcaagtgttactacccctcatgcaaaactcaaactaacaagaagatggtctccccaaaggcagttgctcacagaaaatttttgggcaactcaatctggtataccatcacatgtcaccaaggtgctatttcaaatcaaaacaagttaaaaatgtacatctaacaaagataccattgtcagatctttatacaacacaacacaccaatgttgctattcaaaaactgttgctacctgcctagagcccagttctccaacctttccatgtccggggctgggtgcctgggtctgcgttaatgctggacagcagcttgtgattgtttagtgtctgaaaactctagcaaaagtctggtggcaaacaaggttctcaatttagacatatcactgtgtggtagcgtttgctccttaattctatttctaaaacatctgcttattggtgtccatgtgctggttcatatgcaatgatgttctttgtttgtgatggaatcttatgattttgctaaaatgtgcattgttttagtggtacttccaaacagtggccactaaccatcatggtgaggatgcatcatcagtagcagtcagaagtaagaaaggcttaaagacgattagacataccactatgtttatttactatactattattttgatgtactaaatgatttcatttgagttattttggtgttttgatggcatatggaggcctccaagatgaaccggattctcccattatattctttggatccttgcagcccatatttgatttcaatggctaattgggttattggtcagcttgcgatatgcctaccagaggacatgagttctagtatttatcagtccttaatgaaggcgttgaccatggagtatgtggaggacataacttgttatccggtttgtgcctctgcttctggtgctattgcagaactcatcgagaatagttatgttccacctgactggctcattcttctgcaagtggttctgaaaagaataagtactggagatgaaaatgagtctgctcttctgttcaagcttctgggcacaatagttgagggtggacaggaaaaagttgtttcatattcctgaaattgtatccaacattgcgagtactataatggagctcctgccccctgtcccagatccttggcctcagaaatgcatgtttccccagtcatgcttggacgatcacctttcatcatatcccattattcctggtgtattttattccttgaggaaatcccaaccacactatttaatatatctgccatgtaggttgttgaacagggtttcacagccctcgtagcaatggtgcaagcttgggagagctctgcaccagatgaaaacaagacacctaaaaagaggttctggcagtcaggccagtctgctattgcccaaacaatttcattactgttacaaaaagcttggttgtttcaagctgacaatatggagggctctgcattaccacctctgtcatgcgtaaacgatgcttctgtgttacttgagtttgtcatgagttctgtcacttgcatggaagaaactgaaagtctgaaggtctttgagctggtagctacatgggctaacgctgttgccaactgggactcctgggagatggaggatcagggtgttttcaacacaattaaagaagctgtcaatttccaccagagatttgacctcgacggtctcttcctgaaaacgcactttgtgagatgtcattccactaggtattcattctgtcatggttctgttttaatacacgcaggtcactcaagcagatctaaagttattcttagtccatatatggtgaggttggtcgttctttactccaaacacaatctcccttctgtatagctaaaagtttgcagaaatggcaccatcaagatcggtctggagaccaacaagatcatggacttcatcaagtttgatgtcggcaacgtggtcatgatgaccggtgggaggaacaccaggcgtgtaggagtgatcaagaacagggagaagcacaagggcaacttcgagaccatccacgtgctgcttagagctttttgctatgtctagttttctcctatttgttgtataggaaaacatagaatggaattcaaatttggtggccgcaaaatatggagacttgaattcatataaagttaggcttaacattagtgcaaacaattgtattttagtttagatttagagtacacttatgtatgtgttgtttgacaatgcttatttatgatatattgaatggtacttatttatattata

SEQ ID NO: 216497 - DNA, 2071 bp, Zea Mays
agaaaaccaacccaaccaacagcgccgctgcctgccatcccctcccccgacctcccctgccatgctggcccacgccacacgtgagactcccaaccagggcccacctcgccctaggtgctggtgcttctgccgctgccgaccacaccgcatccgaccctccgcccacgtctccagagccatctcggccgtccgatcctcccgcgccttcctcgtatgcgccgccctcctctatataaagtacgcgttggcacgaagcgagcagataagatcgagcagcgagagacgggcaggggagagggaaaaaaaaatctaaccctagcatccgcagcgctagggttcgggggttgcgatggcggcggcggcgagacagcgggggacggtgaagtggttcaacgacaccaagggcttcgggttcatctcccccgaggacggcagcgaagatctcttcgtgcaccagtcgtcgatcaagtcggagggcttccgctcgctcgcggagggcgaggaggtggagttttccgtctcggagggtgacgacggccgcactaaggccgtcgacgtgaccggccccgacggatccttcgtcaggggcggcggaggcggaggaggaggcggcggcggctacggcggcggcggcggtggctgcttcaagtgtggcgagcctggccacatggccagggactgctccagcggcggctgctacaactgcggccaggccggccacatggccagggactgccccagcggtggcggcggtggcggagggaggttcggcggcggcggcgggggtggcggcgaccgctcctgctacaactgcggcgaggccggccacatcgcccgcgactgccccacgtgaggtgtgtccgcgtccgtccgtccagccagatcagatcggatcgctccaccacctgctggtctgatggcgccgcccccttctagatctcgcttaaaaaacacccccctctcgctgtgtgtcggagtaccgctttagttttgccgatccgggcacgagtgcccgctgcctctttcctctcatgcgtaagaggatcccgtccgccgttttcagatttcgttcggttcgtagaagaactctcaagttaagttaagttatcatggtgtgtgcttggtcgttgttcgtcgtcgtcgttaaggttttaagagatgatttggtcctgtgttgccgaggggaagtcgaatctgcttttttctttttttgtggtttgttccaccagactgaggaaggagatgagatgattattctcccagattataatcctgcctgcttgtgcttgatttggttaccacatatgccttcaccactaccgctcgatttgatttgattatgcgcaacgcacgggcggttcttgtgatattgcggtgggtggttggttagatcacacggcccgttgtttggtacggaatggaattgctggcacctaccagtagtacacaactacacgtctgcctgttgttttgttgtggatggatgtggtgatgatgataatgatgatggcatgatgctttccagcgagtgatttgtttctgtgcaacacagagaaaggaggaaagcttttctgctgctgcggggcgtgggaatgtgggtgacactggtgtcagtcccccctgctgctacctgtttttctcaaaccatgtgtgccattggccctgctcctgctaataatccgtattagtaccactaattgtcatccttcgtctgattcgtcctgccaaggagcaggaagtacgcactaatctgggcctcatgccgcagcaatcagcatctgccaatatagtcatgttctaaccgcttttgaggagaaaaatttagcactcatcatgttctagctgctttgagaacagagacgcactcgcatctaagctggctgtggtctgcttaagcgttaagcccagcagatctaaaaagatttagctttgattccggcatggctgagaaggatttatactacttggcagcttgcaccccccctgctttgacagggtatcctgctgcctgtagtggatggacgaatactggtagcctgtggtacggtttatatataaaagaaagttctgg

SEQ ID NO: 216498 - DNA, 2784 bp, Zea Mays
ccgcaaccatctggccaccattcgtggctcaacgcggttttgtgtctctcaaacaacatggctagggtaggcgaagggcagggccaaggaagccgccgtagtcatggacaaattctttgcctcggatgaaatttgacaaataagagaccatggagagacttgaggtggacggggatttcattgccgctggcaattggaaggctgttacagcagaaagcgttctaacaaaatttgagaattcaagacaaggacttctggaaagccttcaccaagtagaagaaacaattccggaagcagtcggttctaagatcactatgattgcacaagagctggaaaaggctggttttgtcttggaccagtccgaaaagcaagttggtgatgaagtgagtgaactaatccagaacgagccaaaatccaatggattccttgatgagaatgagcttgaatttctccaccaaattgctttccgggttggtattacatcatccgtggcagctctcactgaaagaagagcacttaggaggcttcttgagagagcccatgcagaggaggacttgaaaaaggaatcaattgcagcctatctactgcaccttattaggaaatactcgaatatatttaagagtgaaacaaacgatagtaccaactccctgtgctcaagcccttcctgctcctccagtaaactgtccagctcaactgatctccatggaaactgtcagatcctcgagaagcggctcccaagtgttggctccttaagtccgaagcagattggagggttatcagggacagggagtatgcccttgccacctgaggagctgaggtgtccaatctccctgcagctcatgtatgaccctgttgtcattgcatccggtcagacatatgaacgagcttgcatcgagaagtggttccacagtggcaacacaacctgcccgaaaactcgcaagcagctgtcccagctcttgagaacacctaattactgcattaagggtctgatagcatcttggtgcgaacagaacggggttccagttccagctgggccgccagaatctcccaagctagaacatctgagcatctcatcgctggaaagcaccacatgtgcggcgactgatggcgctaacactaacactgtcttgtttgaagacacaacagccaaggatgacgccaagtcggagagtgaagtttccaaggagatgttctctcgtcaaaactccggagaggccacgtccaaactacgtatacacgaagaagtctcaccggagaactgctctgctcttcagagctccaaggaggctgcacctgacgcatgtggggttgaagactccgtggacgtggagaagggcaagggctctcaccaagactccaaagacgatgtacctgtcagtgagagatgtgaacagtggctccatgtgctgaacaagaacgatgctgagagcatgagtgagaaacataagttggttgagcagatcaggatcctgttgaagaacgacgacgaacttcggaactatgcaggtgctaatggtattactgagccactaatccattttctgaagatggctatccacagaggaggtgtgcaatctcaggaggttgctacaatggctctgttcaatcttgctgtcaacaatgacgggaacaagagactgctcctgtcagctggagtcatcccgctgatggaacagatgatacagaaacatgaaacctgcgaggctgccatcgcaatgtacctgaacctctcctgcatccccgaggcacaggcgatcatcggctcgagcgtcgccatccatttcctcgtcaacagcctaggggaaggtggcccccggagcgacacctgccgcatggacgcgctgctcaccctgtacaacctgtccctgcacgcgcccaacatcccacccctcatggcgtccggcatcatcgagaacctccgccgcgtgctggtgccgtcctccccgtggacggacaaggccctagcggtcctgctgaacctggcgctgacccggagaggcaaggaggagatcgcggccagcgcggccatggtgggcgccatcgtgctcatcgtggacaacggcgagccgggggagaaggagaaggccgtgtcgtgcctgtatgtgatctgcagtggcgacgagggcagcagccagacagtgctccaggagggcgtgatcccggcgctggtgtccgtgacggccaacggcacggccagggcccgggacaaggcgcagcggctgctgaggctgttccgggagcagcggcagcgggagctggagctggaggagatgcagccgcgggtggagctgcacgaggtggcgagccgggcggccgtgcagcagcagcgggaggaggaagaggaagagatggcgctggccgtgttgccggccgccgcgcccagtaagccgagcggcggcggcaaaaagccacgactgtgcaggtcagggtccaggaggttcaccaaggtcttcacgtgcctgctcaagaagtggagtctgcgttgaaccgagaaggatcgggcagtcgaccggtgcaactgagctgtgctcaaactgtagagctgtaattatccgtctttgacaagcgcgttgcgttcgcagtgattaatgatggtttcttgaaatgagcatgagcaaacgaaagcaaaacgaccaatttccttcgaattaggcatgggcgagaaatttgatattttgtcactctcaattttggatgtctatgatctgtgggtctgattacataccgataaaactcataaatgataatagcaaaattgtcaatgactcggcatgagcattgggt

SEQ ID NO: 216499 - DNA, 2918 bp, Zea Mays
gtgctcagcggcagggcggggtggtcagttggaggattggagcacttgagccatagccatggtgttgcttctgatttgaagaggctacatgcgtccggacgtgtaccaggcctgacgctactgcagagattgaacattgctgtcaatgtcgccgacgctatggactatttgcataacaactgcgagcccccaatagtccactgcgacctgaagccgggcaacgttcttcttaacgcggactttgttgcctgtgttggagacttcggcattgcaaagattctttcagattcagatggtgatcctgtgaccaattcgagtaccttcaccggaataagaggaacagttggatatgtgcctccagaatacggggagtgccgccaggtctcctcgtgcggagatgtcttcagctttggagtcacgctccttgagatgttcacagggaaggcccccaccgacgccatgtttgaggacggattgaccttacagggcttcgtggagatagcgtttccagagaagctgatggacatcgttgatccagtactgctgtccactgatgagaggttcgcaagaaagccgcgacacagaagcgttggaggggaagagattgagaacgccatagcttctgtcactaagctcgcgctgtcctgcaccaagctaacaccatcagagagaaagcccatgggtgatgccgcagccgagatgcgcaagataagggactgctatctcgcagacctaacaagggcaaacaattaagtgatcatatatgtaactgataggggacaagttttgcactctatttatgtattttagacatacagtatgctgctgaactggcttggtgccctgcccccagcattgccgagactattttgttttcattagaactttggtttcattgcagctatgtatttgtgtctttattgaaatgaagaaaatgcatggaactgcggtctggaggcgtatacttcccgtttcctgtctttttgtgtcctccaacaggcaatgagtggtggacaacatccagctgaaatgactggttccgaccacgctgagtgtcaccgtcgcagtgatttcatttgcatgtcctccaacactcgccgtacgttacgcttacacatttatcatccttgattcatgtccacgtcatacatggctcactagaatataccaacgcctgtacagactgtaccgtatgtgctctatagaatagaactgtgagaaagccacgtcagttctagtgccatggctgcagcagcgccgcacttcgtgctcgtgccgatgctggcgcagggccacttgctccccatgctggacctggcgcgcctcatcgccagccacggcgctcgtgccacggtggtgctgacgcccatcaacgccgcgcgcaacagggccttcctggagcaggccgcgcgggcggggctcaccatcaacttcgccgagctcgcgttcccggggccagcgctcggcctcgccgcgggctgcgagagggtcgacatgctggacgacatctccctcatcatcccgttctacgatgccgtgtggctgctcgccgagccgctcgaggcgtacctccgctcgctgccccggctgccggactgcctcgtctccgactcgtgcatgccgtggactgccagcgtcacgcggcggcacggcatccttcggttcgtggtccatttcccgtccgcgttctacatcctcgccgcgcacatcctcgaaaagcgcggcctctacgaccgcgccgacgacgacgacgacttcgaaccgttcgaggtgccggagttccccgtacgcgccgtggtgagcagggcgacggcgcaagggctcttccagtggcctgcaggcatggagaggttccggcgtgacacgctcgatgccgaggccaccgccgacgggatactgttcaacacgtgcgccgccctggagggcgcgttcgtggagcgcctcgcttcggagctcggcaagaagatttgggtggtcgggccgctgtgcctcctcagttccgactccgacgccggcgcgatggccgggagaggcaaccgcgcggcggtggacgccgaccgaatcgtgtcctggcttgacgcgcggccggcggcgtccgtgctctacatcagcttcggtagcatcgcccgtctgttcccggctcaggtcgccgagctcgccgccggactggaggcgtcgcgccggccgttcatctggtcggccaaggagacggcgcccgccctcgacgcggagttcgaggagcgcgtgaaggaccggggcctcgtcgtccgtgggtgggcgccgcagatgaccatcctgtcgcaccctgccgcgggcggcttcctgacgcactgcggctggaactccatcctggagagcctctgctacggcgtgccgctcatgacctggccgcagttcgtcgaccagttcctgaacgaggcgttgatcgtggacgtgctcggcaccggcgtccgctccggcgccaaggtgccggcgacgcacgtgacggtcgttaagccaggggaggtgctggaggtgcaggtctggagggacggcgtcgacagggcggtcaccgacctcatggacgagggccccgcgggcgcggcgaggcgggcgagggccaaggagctcgggcaacagatgagggccgcaatggcgaagggtgggtcgtcggacaccgatgtgagggacttggttcgccacgtcgttgaggtcgcgcggaaaaagggggagcacgaggacacagctcttgcagtcttgctggagtcgagcacgtgagcaagagcaaggaaaagacaatgaaaggcactggtggcaaacactactgttgaaattcgtgtggtactatcgttctcgccagcttcaaagagaatctctcgagtgttagctggtagccacgcgaaaaaaattctctggggaagtaaaaccaccccacacat

SEQ ID NO: 216500 - DNA, 1527 bp, Zea Mays
gtcggagaacctcccggctccccgcagtccccctggcctcgcagatccgcggcctgcttcgttgctgccttgccagcaagcagccgcgctcatcctcgcggacgccagcggcggggcagccccctctcctgtgatccactccggcgcccgtggccgcggttgctcccgtaggtgccgccgcctcctcctccccctcttcatcctcctcccagatctatccccgtgcccgcggcacctgccggcgtcgtgaaatcaagtgcgccaggtctcagggagcgacctaccccaaggtggggagttcgttccttttccagtaacgaggagggcaaactcatattccatcatgatggaagaggacatggaaaatggaaggtcgtatcaagaaagaccaaggactttttcaacagtacgaagcaagtcatctatcccgctggccttacgtttgttgatgaggataaatccccgtgccttgattattctttctcttttggtattcagtggtgtgctatatgtgggagccagtacatcaccaattgtggtctttgtgttctgtatatgtactctcagtctattcttctctctctaccttacaaagtgggttcttgctaaggacgaaggaccaccagaaatgtctgagatatctgatgccataagagatggtgctgaagggttttttaagacacaatatggaactatttctaaaatggcatttattctggcctttgtcatccttggcatttatctctttcgcactactaccccacagcaggaggcgtctggcttgggaagggcaacactagcctatattacagttgcttcttttcttcttggagcattatgttctggaatagctggctttgttggaatgtgggtgtctgtgcgtgcaaatgtacgagtttcaagtgctgctcggcgctctgcaagggaagcattgcagattgctgtccgtgctggtggtttctcagccatcgtagttgtttgcatggctgtatttggcgtggcaatattgtactcaacattttatgtttggcttggagtagattcacctgggtcaatgaaggttactgacttgcctcttctccttgtgggatatggttttggtgcctcttttgttgccctttttgctcagttgggtggtggaatatacaccaaagctgctgatgttggagctgatctggtcggaaaagttgagcagggaatacccgaagatgatcctcgtaacccagctgtcattgctgacttggttggtgacaatgttggagattgtgctgcccgaggcgctgatctttttgagagcatagcagcagaaattatcagtgcaatgatacttggaggaactatggcacaacgctgtaaaattgaagatccctctggctttattttgtttcctcttgtcgtccattcatttgatttggtggtgtcatcagttggaattctctcaatcagaggaacacgtgactctggactcatttctcctatcgaagatcccatggcaattatgcaaaaaggctactctgttactattat

SEQ ID NO: 216501 - DNA, 1432 bp, Zea Mays
gtttctgtttgtttgtgtgtcggagaacctcccggctccccgcagtccccctggcctcgcagatccgcggcctgcttcgttgctgccttgccagcaagcagccgcgctcatcctcgcggacgccagcggcggggcagccccctctcctgtgatccactccggcgcccgtggccgcggttgctcccgcttgacggcaaaaggaccctttcaatcaaagagaatttggtcgctgaggctggaaaaaatctggatgtgtttaacttttagggcttactatttttgagaggtggtctgacatagactatccacaattcagcgccaggtctcagggagcgacctaccccaaggtggggagttcgttccttttccagtaacgaggagggcaaactcatattccatcatgatggaagaggacatggaaaatggaaggtcgtatcaagaaagaccaaggactttttcaacagtacgaagcaagtcatctatcccgctggccttacgtttgttgatgaggataaatccccgtgccttgattattctttctcttttggtattcagtggtgtgctatatgtgggagccagtacatcaccaattgtggtctttgtgttctgtatatgtactctcagtctattcttctctctctaccttacaaagtgggttcttgctaaggacgaaggaccaccagaaatgtctgagggcaacactagcctatattacagttgcttcttttcttcttggagcattatgttctggaatagctggctttgttggaatgtgggtgtctgtgcgtgcaaatgtacgagtttcaagtgctgctcggcgctctgcaagggaagcattgcagattgctgtccgtgctggtggtttctcagccatcgtagttgtttgcatggctgtatttggcgtggcaatattgtactcaacattttatgtttggcttggagtagattcacctgggtcaatgaaggttactgacttgcctcttctccttgtgggatatggttttggtgcctcttttgttgccctttttgctcagttgggtggtggaatatacaccaaagctgctgatgttggagctgatctggtcggaaaagttgagcagggaatacccgaagatgatcctcgtaacccagctgtcattgctgacttggttggtgacaatgttggagattgtgctgcccgaggcgctgatctttttgagagcatagcagcagaaattatcagtgcaatgatacttggaggaactatggcacaacgctgtaaaattgaagatccctctggctttattttgtttcctcttgtcgtccattcatttgatttggtggtgtcatcagttggaattctctcaatcagaggaacacgtgactctggactcatttctcctatcgaagatcccatggcaattatgcaaaaaggctactctgttactattat

SEQ ID NO: 216502 - DNA, 1425 bp, Zea Mays
ccaatacaagtctttgggtaattgggcacagaagaggagacagagagacggagaggggagacccggtcactgccaatgccaagaacaagaaaccagagaggacagtcgtcaatccaatccgagtctcctccaaaaacccatcaatctgcaggaacgagagcagcaggagagcatcctaggaaaaaagttaggaccaactgaccgagcaaaaaaggtgatgtccatggccagtactctgatctcctgaggctattcgattatggtggctatccgcctcaggccaactaccttttcttgggtgattatgtggatcgtggaaagcaaagcttggaaacaatatgtcttcttttggcctacaaggtcaagtacccagagaacttctttcttctaaggggaaaccatgaatgcgcatcagtaaatcgcatctatggtttttatgacgagtgcaaacgcagattcagtgtaaagctgtggaaaacattcactgactgttttaactgcttgccagtgtcagcattgatagacgaaaagatcctctgtatgcatggtggtctatctccagagttgaacaagctcgaacaaatacttaatctgagtcgccccacagacgtgcctgatactggattgctctgtgaccttctttggtctgatccttctaatgaagcaacaggatgggccataaatgatcgaggtgtttcatatacatttggtcctgataaagtttctgaattccttgagaagcatgatttggacctcatctgccgagcccatcaggttgtcgaagatggatatgagtttttcgctagccgccaactcgtaacaatgttttcagcccctaactactgtggagaatttgataacgctggtgccatgatgagtgtagatgagacattgatgtgctccttccaaatactgaaacctgcgaggaaggtgttgggtggttcaactaataacaaatcaggcttccagtcatcgagaggatggtgacaatggcaagcctgatatcaggttggttggtgagcagcacgccagtggtcgacggggggttgttccatcataatcatattacagcggctgcaactgacaggcccaatgcatcttctcttccatgttggatcaacactcttgtaatgtattatttactgtgcggatctgagaggatgtgaatgatttcatttgcgtcctcaagttcaaaagattcaggaaggcatgcttgaaataaaaatagccagaaacatgcaaggtgctccacgacgcagcacggcatttccagtgttttctttttgctgtctagttctgaatatattttaccgccagaccagcacgtaagcttgcctggcaatggtttttatttgttgctatgccatctcaaaagtcaaaaccatggatttatatcaaaagtcaaaagactttgagaagtattta

SEQ ID NO: 216503 - DNA, 1585 bp, Zea Mays
ccaatacaagtctttgggtaattgggcacagaagaggagacagagagacggagaggggagacccggtcactgccaatgccaagaacaagaaaccagagaggacagtcgtcaatccaatccgagtctcctccaaaaacccatcaatctgcaggaacgagagcagcaggagagcatcctaggaaaaaagttaggaccaactgaccgagcaaaaaaggtagcatctctgtatcaccaaggcaccgccgatcacagaccaaatccctcccccctcctctggtccatcccacacgtagagcagccgtttcgacaagagtggtgtgagtgttgaagagctcctcaacatgatggatccggccttgcttgacgacgtcatacgccggctgctggaggtgaagaatctcaagcctgggaagaacgcgcagttgtcggagtcggagatcaagcagctctgcgctgccgccaaggagatcttcctgcaccagcccaacctgctggagctcgaggcgcccatcaaaatctgcggtgatgtccatggccagtactctgatctcctgaggctattcgattatggtggctatccgcctcaggccaactaccttttcttgggtgattatgtggatcgtggaaagcaaagcttggaaacaatatgtcttcttttggcctacaagtgtcagcattgatagacgaaaagatcctctgtatgcatggtggtctatctccagagttgaacaagctcgaacaaatacttaatctgagtcgccccacagacgtgcctgatactggattgctctgtgaccttctttggtctgatccttctaatgaagcaacaggatgggccataaatgatcgaggtgtttcatatacatttggtcctgataaagtttctgaattccttgagaagcatgatttggacctcatctgccgagcccatcaggttgtcgaagatggatatgagtttttcgctagccgccaactcgtaacaatgttttcagcccctaactactgtggagaatttgataacgctggtgccatgatgagtgtagatgagacattgatgtgctccttccaaatactgaaacctgcgaggaaggtgttgggtggttcaactaataacaaatcaggcttcaagtcatcgagaggatggtgacaatggcaagcctgatatcaggttggttggtgagcagcacgccagtggtcgacggggggttgttccatcataatcatattacagcggctgcaactgacaggcccaatgcatcttctcttccatgttggatcaacactcttgtaatgtattatttactgtgcggatctgagaggatgtgaatgatttcatttgcgtcctcaagttcaaaagattcaggaaggcatgcttgaaataaaaatagccagaaacatgcaaggtgctccacgacgcagcacggcatttccagtgttttctttttgctgtctagttctgaatatattttaccgccagaccagcacgtaagcttgcctggcaatggtttttatttgttgctatgccatctcaaaagtcaaaaccatggatttatatcaaaagtcaaaagactttgagaagtattta

SEQ ID NO: 216504 - DNA, 1721 bp, Zea Mays
ccaatacaagtctttgggtaattgggcacagaagaggagacagagagacggagaggggagacccggtcactgccaatgccaagaacaagaaaccagagaggacagtcgtcaatccaatccgagtctcctccaaaaacccatcaatctgcaggaacgagagcagcaggagagcatcctaggaaaaaagttaggaccaactgaccgagcaaaaaaggtagcatctctgtatcaccaaggcaccgccgatcacagaccaaatccctcccccctcctctggtccatcccacacgtagagcagccgtggtgtgagtgttgaagagctcctcaacatgatggatccggccttgcttgacgacgtcatacgccggctgctggaggtgaagaatctcaagcctgggaagaacgcgcagttgtcggagtcggagatcaagcagctctgcgctgccgccaaggagatcttcctgcaccagcccaacctgctggagctcgaggcgcccatcaaaatctgcggtgatgtccatggccagtactctgatctcctgaggctattcgattatggtggctatccgcctcaggccaactaccttttcttgggtgattatgtggatcgtggaaagcaaagcttggaaacaatatgtcttcttttggcctacaaggtcaagtacccagagaacttctttcttctaaggggaaaccatgaatgcgcatcagtaaatcgcatctatggtttttatgacgagtgcaaacgcagattcagtgtaaagctgtggaaaacattcactgactgttttaactgcttgccagtgtcagcattgatagacgaaaagatcctctgtatgcatggtggtctatctccagagttgaacaagctcgaacaaatacttaatctgagtcgccccacagacgtgcctgatactggattgctctgtgaccttctttggtctgatccttctaatgaagcaacaggatgggccataaatgatcgaggtgtttcatatacatttggtcctgataaagtttctgaattccttgagaagcatgatttggacctcatctgccgagcccatcaggttgtcgaagatggatatgagtttttcgctagccgccaactcgtaacaatgttttcagcccctaactactgtggagaatttgataacgctggtgccatgatgagtgtagatgagacattgatgtgctccttccaaatactgaaacctgcgaggaaggtgttgggtggttcaactaataacaaatcaggcttcaagtcatcgagaggatggtgacaatggcaagcctgatatcaggttggttggtgagcagcacgccagtggtcgacggggggttgttccatcataatcatattacagcggctgcaactgacaggcccaatgcatcttctcttccatgttggatcaacactcttgtaatgtattatttactgtgcggatctgagaggatgtgaatgatttcatttgcgtcctcaagttcaaaagattcaggaaggcatgcttgaaataaaaatagccagaaacatgcaaggtgctccacgacgcagcacggcatttccagtgttttctttttgctgtctagttctgaatatattttaccgccagaccagcacgtaagcttgcctggcaatggtttttatttgttgctatgccatctcaaaagtcaaaaccatggatttatatcaaaagtcaaaagactttgagaagtattta

SEQ ID NO: 216505 - DNA, 561 bp, Zea Mays
acgatgcagccacgttttccagtcgtagcgtgaaaggttttaagggcaaaagccctcggagcgtcactgggagaagagaaacgcccggcggcgcgaagcggagggtgagaatatcggagttcggcgatgtcgaagcggcagggaccgccgaaacaccagaaccgctacgcgtggaagccgaaccttggtcagaagatcaacgaaaccgagcccgggggcaggttccgacctctgtcagaaatcaccggcgtctgtcagcgctgccgggatcaaatcgactggaaacgcagatacggaaaatacaagcccattgttgagccagcaaaatgccagaagtgtaataagcgaaacgtccggcaagcataccataacgtatgcagagattgctccaaggacctcggcatatgtgctaagtgctgcacatgtgttaatgagcttgtcggaagggatgcgaatgaggaggaaagtgaacgcaagtcactagaagaggctgtcagaggtgctagggagagggaacgacgtacacttcttcgtattaaactgaattaacataagactttg

SEQ ID NO: 216506 - DNA, 3331 bp, Zea Mays
atcggctgtggccgaaccgtcgtcgaattctccccgtggcagcccgatcatggcgtcgccgccggcggatccgcacccgaagaaacgtagggtcgccgacgcccaggacccaagctcctcctccaatcctgcacccacgcggcgtccttcccctgctccgcctcctcccgaaaccctaggtgctgtggcgtcttcaacctcctccccacctccgacagaaaccgcatcgctgccgccggagggggtgaggcttcaaaagcttcgcaaccaagaggagttgagaaatgtcttccagcgctacagccgtatccgcaagtacatacaggagcataaagacggcggcctcacgcccgagctggagcaggactatctctacctcatctccgcctcccgaggttgtgaaagtgtacagtgttttctatctttgccaatccctcgatttgcctcacgctgtcctactgcactcgaggcggcgactaaagttaccatcaacatgtacaattgcaacatggccactgtaaagagaggggaggatttgaaaagtgtgccatacaagacagctaaagcatgtatcattggcttaacttacatatgctctgcagcatcttctgaagaactcaagtcatctgttatgaaaggaatctgctctgtcgtttatagaactgtcctctccttcttcatttcaaccttggaggggaaggatatctatcgtatggactatacaaaacgtgcaatgcttcaggaccctgtgacgttgttagacactttaaaattggagttggacaatgctaagcaaccaacaattgataatttgtctgagctgggagctatttgcttgctttgcacattccttttgttcccagagaatatactagaagcctgttttaagctgcttgattctgcagaatgtgatgatgtaaaaggagaagggttataccttttaaatcagctgacctgtcatctgacctgtaatgctgcaaatgatgctatgggtgataagatcgatgagcagtgtcctgtgatggaaggaaatttgtccgacaccaataaatttgttgattcaaatcctgttgtttcggaaaatgccatggagccaaatgagtgttacatcacaatggccatctctaggcatccatttctgagacgttggatattatcaaggtacaagaaattatgtgattcctgtaaacctgccgtggtttctgaggtgtcatcttgtttgaaagttttgggctctttgtcagaaccttccgatgataaaagtcacacgggcaatgagtcatcagtgctggagaaacttgataacaatgtcagagaaaatatgcgaccagatgaactaatttcttcatctgagcagggagcacttgcaaaaactgagagtgtcgataattatggaaataagttttcacagaataagaatgtggacatggttcgttctgataatcagaaatctgatgagctcacggacgcaaaattggatgacttcaaaggaggaactgttgtctctgatgcacagcatcaaggttcaagatctgatttgcttatgccaaaatctgtgtatgattctgctggaggatctacatcacttacttctccaggacaacattttggaagggcaaagcatttattttctgaaccatttgatatttatggcacttatgttgcgagggatgtgatttcagtttcaaaggaactttgggttggttcactgggaaatagagcaactgaggcactagtcagatctaagtttgaggagtttggcccattagtaaattttttgttctatccatccagaaaattttctttagttgagtatagaaacatattacatgctgtgcatgcatgtggatatatgcagggttcatctatttggggcggttttcttcaagtaaagtatttagacaggcttataggtagtaagggagttattcgtggtatagctattggtgaaagccgtcatgtttatgttgctaaagtcaagaataaaaaagacaaagatgaggtctttgatgatttaaagatggcagggctgaagtggccatctgggattactgatattcctggagaaaatgctttgcttcttgaattcgagacggcagttgatgcagctactgcaaaattctatattaggcaccaagctcgtccaaatgtttgttccagggatatgaatctacctggtcatcaacttttggtgcaaaatatagaccactcagtccctgacatcgacttaatcaacgccttctctcaattcggtgaggtcatcaggtggcaaatcaatagggctgatagtaactgctttatagtttatagatcacaagatgctgctgcccgtgcgaaatcacacttgcatggagcgcggtttgggttgaagtcaattagtattgaatcaaggacatacagtgcaggatctgttcatgataaaacagtgtcacctgttgctccgttgttaggccagagtgttcctgacaacagcgtgcgccatgagatcaggaatccaatagtcccaggatatcatgcaggatatgcagcaccaggggatcgacctatttatggtccgccacctccaaatacaagcagagctccacaaggaaattttccttgccctcctgtttccacacaccatggttctgtgatgccaccgccacctattcaaacctcttttgttcgtcctatgtatcctggtccagggagtccctgggagaacactactccaaatccaccgcccttcagccacgtttctcctcgcatgatgcctggaagtaacttccgtgttaatccagcttctcttccttttgtaccctcttgtgttacccctgtttcacagcttcctggaggatcagcacagcattctgagaaaatgccaccatcactacctctgccaactgtagctcccccaccatttacacctctagatatgccaccaacacaccctccgccactacctatttcccagccaccttcagtgccgccacccccaaattctcctcctccgcaaccttttgctgattcgtctgactcacaaaagccaagttctcatcctcaatggcagggtcctcttttaaaaagtggcttgcattactgcagaatctatgcaagcagaatagagtttggatgcctgcagatatgaaaatactgtttctgaaccggcagaatggccttcagcgctagatgtgacaaagcgcacagctttccagcatgtgaagacaactttcaacaatacaccgcctaataagcttttgttggatttcttgatggctgatttggtgaacaaaagctcatcactgaacttgttgtcttataaacttttggcacctaattcagctcactttta

SEQ ID NO: 216507 - DNA, 4180 bp, Zea Mays
cgccaatcggctgtggccgaaccgtcgtcgaattctccccgtggcagcccgatcatggcgtcgccgccggcggatccgcacccgaagaaacgtagggtcgccgacgcccaggacccaagctcctcctccaatcctgcacccacgcggcgtccttcccctgctccgcctcctcccgaaaccctaggtgctgtggcgtcttcaacctcctccccacctccgacagaaaccgcatcgctgccgccggagggggtgaggcttcaaaagcttcgcaaccaagaggagttgagaaatgtcttccagcgctacagccgtatccgcaagtacatacaggagcataaagacggcggcctcacgcccgagctggagcaggactatctctacctcatctccgcctcccgaggttgtgaaagtgtacagtgttttctatctttgccaatccctcgatttgcctcacgctgtcctactgcactcgaggcggcgactaaagttaccatcaacatgtacaattgcaacatggccactgtaaagagaggggaggatttgaaaagtgtgccatacaagacagctaaagcatgtatcattggcttaacttacatatgctctgcagcatcttctgaagaactcaagtcatctgttatgaaaggaatctgctctgtcgtttatagaactgtcctctccttcttcatttcaaccttggaggggaaggatatctatcgtatggactatacaaaacgtgcaatgcttcaggaccctgtgacgttgttagacactttaaaattggagttggacaatgctaagcaaccaacaattgataatttgtctgagctgggagctatttgcttgctttgcacattccttttgttcccagagaatatactagaagcctgttttaagctgcttgattctgcagaatgtgatgatgtaaaaggagaagggttataccttttaaatcagctgacctgtcatctgacctgtaatgctgcaaatgatgctatgggtgataagatcgatgagcagtgtcctgtgatggaaggaaatttgtccgacaccaataaatttgttgattcaaatcctgttgtttcggaaaatgccatggagccaaatgagtgttacatcacaatggccatctctaggcatccatttctgagacgttggatattatcaaggtacaagaaattatgtgattcctgtaaacctgccgtggtttctgaggtgtcatcttgtttgaaagttttgggctctttgtcagaaccttccgatgataaaagtcacacgggcaatgagtcatcagtgctggagaaacttgataacaatgtcagagaaaatatgcgaccagatgaactaatttcttcatctgagcagggagcacttgcaaaaactgagagtgtcgataattatggaaataagttttcacagaataagaatgtggacatggttcgttctgataatcagaaatctgatgagctcacggacgcaaaattggatgacttcaaaggaggaactgttgtctctgatgcacagcatcaaggttcaagatctgatttgcttatgccaaaatctgtgtatgattctgctggaggatctacatcacttacttctccaggacaacattttggaagggcaaagcatttattttctgaaccatttgatatttatggcacttatgttgcgagggatgtgatttcagtttcaaaggaactttgggttggttcactgggaaatagagcaactgaggcactagtcagatctaagtttgaggagtttggcccattagtaaattttttgttctatccatccagaaaattttctttagttgagtatagaaacatattacatgctgtgcatgcatgtggatatatgcagggttcatctatttggggcggttttcttcaagtaaagtatttagacaggcttataggtagtaagggagttattcgtggtatagctattggtgaaagccgtcatgtttatgttgctaaagtcaagaataaaaaagacaaagatgaggtctttgatgatttaaagatggcagggctgaagtggccatctgggattactgatattcctggagaaaatgctttgcttcttgaattcgagacggcagttgatgcagctactgcaaaattctatattaggcaccaagctcgtccaaatgtttgttccagggatatgaatctacctggtcatcaacttttggtgcaaaatatagaccactcagtccctgacatcgacttaatcaacgccttctctcaattcggtgaggtcatcaggtggcaaatcaatagggctgatagtaactgctttatagtttatagatcacaagatgctgctgcccgtgcgaaatcacacttgcatggagcgcggtttgggttgaagtcaattagtattgaatcaaggacatacagtgcaggatctgttcatgataaaacagtgtcacctgttgctccgttgttaggccagagtgttcctgacaacagcgtgcgccatgagatcaggaatccaatagtcccaggatatcatgcaggatatgcagcaccaggggatcgacctatttatggtccgccacctccaaatacaagcagagctccacaaggaaattttccttgccctcctgtttccacacaccatggttctgtgatgccaccgccacctattcaaacctcttttgttcgtcctatgtatcctggtccagggagtccctgggagaacactactccaaatccaccgcccttcagccacgtttctcctcgcatgatgcctggaagtaacttccgtgttaatccagcttctcttccttttgtaccctcttgtgttacccctgtttcacagcttcctggaggatcagcacagcattctgagaaaatgccaccatcactacctctgccaactgtagctcccccaccatttacacctctagatatgccaccaacacaccctccgccactacctatttcccagccaccttcagtgccgccacccccaaattctcctcctccgcaaccttttgctgattcgtctgactcacaaaagccaagttctcatcctcaatggcagggtcctcttttaaaaagtggcttgcattactgcagaatctatgcaagcagaatagagtttggatgcctgcagatatgaaaatactgtttctgaaccggcagaatggccttcagcgctagatgtgacaaagcgcacagctttccagcatgtgaagacaactttcaacaatacaccgcctaataaggactctggtgcagtggtgagagttgtctcactgagtcaccgggtcatgggtttgaagcagtctctccatatttgcgaggaaagacttgtctcggtttatgccttcctcagaccacacttatgtgggagcctctggtattgggtttgcccttttttatgaaataggaaagagtgttttattcatgagtacttagagcatctccaagagctccccagaagtctcacctaaatcaagttttttttgggaaaaacacaaaaacgtgtctccaacagttcccccaaaagttctcacaactttttcatagcctttaaaactccctcatttgtaggtacaaatgtgttttttttgggctcctcagaaacaatctgctgctttaagggatctgttggagaaaggattaaaatctacccccactcattttttagatgccccttaaaactgattttcagtagtcattttctggggagctcttggagatgctcttacaacaacaaagcctttaatcccttaatgcacaaatttcacattccatgtaaagtatacatgaagaatcagacccatgttgcttgaacgatatgattttggtgctcagatactcctacttaatactggtgctgcgtgttggtaaatctgttatatttttatttgcataatggtaaaccgtttacttccaaatgatggcactgaaatcgaactagttagatctttgtttctctagtctgaattgaacacaaattttggagtacactattatgagattgctgatgcagaactatatttgttttcatgcttcatgtcttgatatgattatggaccattttgacacctgtatattttaatttagcttttgttggatttcttgatggctgatttggtgaacaaaagctcatcactgaacttgttgtcttataaacttttggcacctaattcagctcactttta

SEQ ID NO: 216508 - DNA, 1454 bp, Zea Mays
cttaacactccatatgcttatgaggacatgcaagctcttattagcaagatcacaaagtcgatagtatcaccattgcccacgagatattctggttcctttaggggacttatcaagagcatgctacggaaaagtccagaacaccgaccaagcgctgcagaactgctaaagcatgtgcaccttcagccttatgtgcttcaggtccagttgaagtccagtccctctcgcaacatgtctccaatctatcaagctctgacagacaaagttaagaagatgacatttcctagtgatataactgattccgccagaagagtggcaagaagaaactcgcttggaaatgagaggactgtaacattctgcaaaccctctcctgagcggaactctattagctctacacggagcatcaaagaatatacaactacccagagtgtcaaagagctatctgttgacagcagtcaaattgatgatgaggttacaagtaaagccattagaacaaagacaacaggcattctaaggacgcccaagagtaccccagccaagacattgactactagaaatcggttggatcctccaaaaacttcttacagcagaacaaaccatagtgagttgacctcaagaacacctctgaacaagagtgctgtgacagcaagaagagcatcgctcccgctgccgacatacagagcacccaacagccgtgccgccagcgtccttgaccaactggactccccagacgtgtccgtcaacgcgcctcggatcgacaggatcgcagaattccctctagcttcatccgaggaccccctggcgcccatgaagaagaacctgtcctcggcgcccggccacgacggctcatgctccacgcctcccttcatcaaccggtccatcacgaaggacaagtacacggtgcaggtgctgcacaggggcgacggggacaacgcgagcgactcgtcggggcgcaacgccaccgccgcgtcgagcggggggtccaacgactcgaggcagcagcggttcgacacctcgtcgtaccagcagcgcgccgaggccctggagggcctgctggagttcagcgcgcagctgctgcagcaggagcggtacgaggagctgggcatcctgctgaagccgttcggccccgagaaggcgtcgccgagagagactgccatctggctcaccaagagcttcaaggagacggcgtcatagcggagggagggagggagggagtcatagcggagggagggagggagggagtcatagcggagggagggagacgtagctgccagttttgtaacgtgcaatgtagttcaggtagtttaagctatgttaggaccccccaggtgtaggtgctggaaggaaggcaacaccagctcagtgttgccctaacttaaaagaagttcccatgttgtttagccattctccggtttaccagtaggaaactgagcaatcgatggtagcattaggactag

SEQ ID NO: 216509 - DNA, 2255 bp, Zea Mays
gttttcgaacccacaccttttccattctattttcctcgcagagtagttttttttcctcactgcaagtgtaccggaaccatggtttttaatggatgatgatgatgctgctgctgcttgcgtcctcagaatagtcttgactcttgagctagggcaagtagaaggaaaaggaaacaagcttgctgcgtgtgacctgcagaccccaagaggatggatcagtatgaggtgctggagcagattggaaaaggagcatttggttctgcgcttttggtgaggcacaaggtcgagaagaagaagtatgtgctcaagaagatacggctcgcacggcaaaccgaccgcacacgccggtctgcccaccaggagatgcagctcatcgcgactgtccggaatccattcattgtggagtacaaagattcatgggtggaaaagggctgctacgtttgcattgttattggctactgtgagggaggagacatggctgaggttatcaaaagagccaatggaaaccatttctctgaggagaaactttgcaagtggctcgtgcaacttctcatggctcttgattatctacatgcaaatcacattcttcatcgagacgtgaagtgctctaatatatttattgccagagatcaaagcatacgccttggtgactttggccttgcaaagatattgacatcagatgaccttgcctcatctgtggtagggactccaagttatatgtgcccagaacttcttgctgatataccatatggtactaaatccgatatttggtctctaggatgttgcatttatgaaatgactgctctcaggcctgcatttaaagcttttgacatgcaagctcttattagcaagatcacaaagtcgatagtatcaccattgcccacgagatattctggttcctttaggggacttatcaagagcatgctacggaaaagtccagaacaccgaccaagcgctgcagaactgctaaagcatgtgcaccttcagccttatgtgcttcaggtccagttgaagtccagtccctctcgcaacatgtctccaatctatcaagctctgacagacaaagttaagaagatgacatttcctagtgatataactgattccgccagaagagtggcaagaagaaactcgcttggaaatgagaggactgtaacattctgcaaaccctctcctgagcggaactctattagctctacacggagcatcaaagaatatacaactacccagagtgtcaaagagctatctgttgacagcagtcaaattgatgatgaggttacaagtaaagccattagaacaaagacaacaggcattctaaggacgcccaagagtaccccagccaagacattgactactagaaatcggttggatcctccaaaaacttcttacagcagaacaaaccatagtgagttgacctcaagaacacctctgaacaagagtgctgtgacagcaagaagagcatcgctcccgctgccgacatacagagcacccaacagccgtgccgccagcgtccttgaccaactggactccccagacgtgtccgtcaacgcgcctcggatcgacaggatcgcagaattccctctagcttcatccgaggaccccctggcgcccatgaagaagaacctgtcctcggcgcccggccacgacggctcatgctccacgcctcccttcatcaaccggtccatcacgaaggacaagtacacggtgcaggtgctgcacaggggcgacggggacaacgcgagcgactcgtcggggcgcaacgccaccgccgcgtcgagcggggggtccaacgactcgaggcagcagcggttcgacacctcgtcgtaccagcagcgcgccgaggccctggagggcctgctggagttcagcgcgcagctgctgcagcaggagcggtacgaggagctgggcatcctgctgaagccgttcggccccgagaaggcgtcgccgagagagactgccatctggctcaccaagagcttcaaggagacggcgtcatagcggagggagggagggagggagtcatagcggagggagggagggagggagtcatagcggagggagggagacgtagctgccagttttgtaacgtgcaatgtagttcaggtagtttaagctatgttaggaccccccaggtgtaggtgctggaaggaaggcaacaccagctcagtgttgccctaacttaaaagaagttcccatgttgtttagccattctccggtttaccagtaggaaactgagcaatcgatggtagcattaggactag

SEQ ID NO: 216510 - DNA, 2493 bp, Zea Mays
cgtgggtcccgcaaaacccctgtctctctcctcactgatcactcttcttcttcagactcagagccatcgcgccgcggcatcctccctccgttcctgccccctctttctctagcgagctccttttctctctcctagagaggcttctcccttcctcctcgcttgcccccattgcctttgggctatatagagcgggattggattggaaacggagcccccggcgagtttgaaacccaaccaaaacccccacctttctcgcctcgtactcgcgcgctccccaccgcctgccaccgacgccgcgtctggtctagaaccaaatgccgtgagatctgcgcgcgtgacgccttcccccgccggagactccctccgagctccgggccacggagcgcttcgtcccggatccctctggtggctcagggcaagtagaaggaaaaggaaacaagcttgctgcgtgtgacctgcagaccccaagaggatggatcagtatgaggtgctggagcagattggaaaaggagcatttggttctgcgcttttggtgaggcacaaggtcgagaagaagaagtatgtgctcaagaagatacggctcgcacggcaaaccgaccgcacacgccggtctgcccaccaggagatgcagctcatcgcgactgtccggaatccattcattgtggagtacaaagattcatgggtggaaaagggctgctacgtttgcattgttattggctactgtgagggaggagacatggctgaggttatcaaaagagccaatggaaaccatttctctgaggagaaactttgcaagtggctcgtgcaacttctcatggctcttgattatctacatgcaaatcacattcttcatcgagacgtgaagtgctctaatatatttattgccagagatcaaagcatacgccttggtgactttggccttgcaaagatattgacatcagatgaccttgcctcatctgtggtagggactccaagttatatgtgcccagaacttcttgctgatataccatatggatgttgcatttatgaaatgactgctctcaggcctgcatttaaagcttttgacatgcaagctcttattagcaagatcacaaagtcgatagtatcaccattgcccacgagatattctggttcctttaggggacttatcaagagcatgctacggaaaagtccagaacaccgaccaagcgctgcagaactgctaaagcatgtgcaccttcagccttatgtgcttcaggtccagttgaagtccagtccctctcgcaacatgtctccaatctatcaagctctgacagacaaagttaagaagatgacatttcctagtgatataactgattccgccagaagagtggcaagaagaaactcgcttggaaatgagaggactgtaacattctgcaaaccctctcctgagcggaactctattagctctacacggagcatcaaagaatatacaactacccagagtgtcaaagagctatctgttgacagcagtcaaattgatgatgaggttacaagtaaagccattagaacaaagacaacaggcattctaaggacgcccaagagtaccccagccaagacattgactactagaaatcggttggatcctccaaaaacttcttacagcagaacaaaccatagtgagttgacctcaagaacacctctgaacaagagtgctgtgacagcaagaagagcatcgctcccgctgccgacatacagagcacccaacagccgtgccgccagcgtccttgaccaactggactccccagacgtgtccgtcaacgcgcctcggatcgacaggatcgcagaattccctctagcttcatccgaggaccccctggcgcccatgaagaagaacctgtcctcggcgcccggccacgacggctcatgctccacgcctcccttcatcaaccggtccatcacgaaggacaagtacacggtgcaggtgctgcacaggggcgacggggacaacgcgagcgactcgtcggggcgcaacgccaccgccgcgtcgagcggggggtccaacgactcgaggcagcagcggttcgacacctcgtcgtaccagcagcgcgccgaggccctggagggcctgctggagttcagcgcgcagctgctgcagcaggagcggtacgaggagctgggcatcctgctgaagccgttcggccccgagaaggcgtcgccgagagagactgccatctggctcaccaagagcttcaaggagacggcgtcatagcggagggagggagggagggagtcatagcggagggagggagggagggagtcatagcggagggagggagacgtagctgccagttttgtaacgtgcaatgtagttcaggtagtttaagctatgttaggaccccccaggtgtaggtgctggaaggaaggcaacaccagctcagtgttgccctaacttaaaagaagttcccatgttgtttagccattctccggtttaccagtaggaaactgagcaatcgatggtagcattaggactag

SEQ ID NO: 216511 - DNA, 2514 bp, Zea Mays
cgtgggtcccgcaaaacccctgtctctctcctcactgatcactcttcttcttcagactcagagccatcgcgccgcggcatcctccctccgttcctgccccctctttctctagcgagctccttttctctctcctagagaggcttctcccttcctcctcgcttgcccccattgcctttgggctatatagagcgggattggattggaaacggagcccccggcgagtttgaaacccaaccaaaacccccacctttctcgcctcgtactcgcgcgctccccaccgcctgccaccgacgccgcgtctggtctagaaccaaatgccgtgagatctgcgcgcgtgacgccttcccccgccggagactccctccgagctccgggccacggagcgcttcgtcccggatccctctggtggctcagggcaagtagaaggaaaaggaaacaagcttgctgcgtgtgacctgcagaccccaagaggatggatcagtatgaggtgctggagcagattggaaaaggagcatttggttctgcgcttttggtgaggcacaaggtcgagaagaagaagtatgtgctcaagaagatacggctcgcacggcaaaccgaccgcacacgccggtctgcccaccaggagatgcagctcatcgcgactgtccggaatccattcattgtggagtacaaagattcatgggtggaaaagggctgctacgtttgcattgttattggctactgtgagggaggagacatggctgaggttatcaaaagagccaatggaaaccatttctctgaggagaaactttgcaagtggctcgtgcaacttctcatggctcttgattatctacatgcaaatcacattcttcatcgagacgtgaagtgctctaatatatttattgccagagatcaaagcatacgccttggtgactttggccttgcaaagatattgacatcagatgaccttgcctcatctgtggtagggactccaagttatatgtgcccagaacttcttgctgatataccatatggtactaaatccgatatttggtctctaggatgttgcatttatgaaatgactgctctcaggcctgcatttaaagcttttgacatgcaagctcttattagcaagatcacaaagtcgatagtatcaccattgcccacgagatattctggttccttattgttttactctaataaaaacatttcgcataactggcatatgcaggctgcagaactgctaaagcatgtgcaccttcagccttatgtgcttcaggtccagttgaagtccagtccctctcgcaacatgtctccaatctatcaagctctgacagacaaagttaagaagatgacatttcctagtgatataactgattccgccagaagagtggcaagaagaaactcgcttggaaatgagaggactgtaacattctgcaaaccctctcctgagcggaactctattagctctacacggagcatcaaagaatatacaactacccagagtgtcaaagagctatctgttgacagcagtcaaattgatgatgaggttacaagtaaagccattagaacaaagacaacaggcattctaaggacgcccaagagtaccccagccaagacattgactactagaaatcggttggatcctccaaaaacttcttacagcagaacaaaccatagtgagttgacctcaagaacacctctgaacaagagtgctgtgacagcaagaagagcatcgctcccgctgccgacatacagagcacccaacagccgtgccgccagcgtccttgaccaactggactccccagacgtgtccgtcaacgcgcctcggatcgacaggatcgcagaattccctctagcttcatccgaggaccccctggcgcccatgaagaagaacctgtcctcggcgcccggccacgacggctcatgctccacgcctcccttcatcaaccggtccatcacgaaggacaagtacacggtgcaggtgctgcacaggggcgacggggacaacgcgagcgactcgtcggggcgcaacgccaccgccgcgtcgagcggggggtccaacgactcgaggcagcagcggttcgacacctcgtcgtaccagcagcgcgccgaggccctggagggcctgctggagttcagcgcgcagctgctgcagcaggagcggtacgaggagctgggcatcctgctgaagccgttcggccccgagaaggcgtcgccgagagagactgccatctggctcaccaagagcttcaaggagacggcgtcatagcggagggagggagggagggagtcatagcggagggagggagggagggagtcatagcggagggagggagacgtagctgccagttttgtaacgtgcaatgtagttcaggtagtttaagctatgttaggaccccccaggtgtaggtgctggaaggaaggcaacaccagctcagtgttgccctaacttaaaagaagttcccatgttgtttagccattctccggtttaccagtaggaaactgagcaatcgatggtagcattaggactag

SEQ ID NO: 216512 - DNA, 2684 bp, Zea Mays
gcgaaagccgagcggccggacaagttaagcgcggccacgatcgaccggccccggccccatcgtcgcaccccaccccatccatcccattcccccacgagccctaggcgcgcccacgacggcacgggcccggagatggaggagagcgacgcggcggagggggtggcggtgcagctgatcgatggcgagggcgagttcgcggccgcggcggcggagcgattcatggcagccgcgggagtcgccggatgcgggctctcctacgccgtcgtctccatcatggggccacagagcagcggaaagagtaccttattgaaccaactatttggaaccaattttagggagatggatgcattcaggggaaggagccaaactactaaaggtatctggatagcacgttgtgttggtgttgaaccttgtactgttgtattggatctggagggtactgatggaagagagagaggagaggatgacactgcatttgagaagcaaagttcgttatttgcacttgcaatttcagacatagttctaattaacatgtggtgccatgatattggccgtgaacaagctgccaataaaccacttctaaagactgtatttcaggtcatgatgcgtttgtttagtcctcggaagacaacactactatttgttatacgtgataaaaccaggactccacttgaacatctagaaccagttctaagggaggatattcaaaagatatggaattctgttgccaagccagaggcacacaaagacacccctatcagtgaatttttcaatgtacaagttactgcattgtccagttttgaagaaaaagaggagcagtttagagaacaggttcaacaacttaggcagagattttcaaattcaattgcaccaggaggtcttgcaggtgatagaagaggagtagttcctgcttcaggttttctgtttagttcacaacagatttggaaagttatccgagagaacaaggatcttgatcttcctgctcacaaggtaatggttgctacggttaggtgtgatgaaattgcaaacgagaagtttggatgcataacctcggacacagaatggttagatgtggagagtgctgtccaatctggtccagtacctggttttgggaaaaaacttagcaatatcgtggaagttcacttgcaagagtatgacaaagaagctttctattttgatgaagctgttaggaaaggaaaacgacaacatttggagtccagaatactgaatcttgtccaacctgcattccagaaaatgttgactcatctgcgcatgaaggctttagaaaaatttaaagctggtcttaattcatctttggagagtggaaaagaattcgcgatatctgcaagagacaatactgaatgctctctcaaagactttgaacaaggatgtgctgatgctataatcaagcaggcgaactgggactgctctaaaatactagagaaagtacggcgtgatattgaagatcatgcactttcaattcgtgaaagaaagctatcagaattgacaacccatgctaaggttatgagaaactaagaaaagcactagctgaacctgtggagtctctatttgatgctgcagaccaaacaacctggacatcaataagaaacatttacaaacgcgagacagaggccatcctaccggagtttctgaaaaccatttgtggctttgaaatggaatatgctcaagcagaagaaatggtatccaaattaagggattatgcccggagtgttgtgcaaagtaaagctaaagaggaatctagcaaagtattgatccatatgaaagagaggttcacaacagtgtttagccatgacaaggattcaattccaagggtctggacaggaaaggaagatgttcatgcgatagcaaaggaagctcgagctgcggctctcaaacttctgtctgtaatggcggccattcgctgggatgatgagccagataggattgaaagcatcatcacttcaacacttctggaaggctctgttgtatcaaagattgcaagtgctgcttctgctgacccacttgcttctaccacttgggaacagattcctccagagcatacaatgattactccttctcagtgcaagttactgtggaagcaattcaaatcagaaactgagttcaccattacacaagcagtatccacacagcaagctcacaggcgtggtaatagtaagctgcctcctccttgggcaattgtggccattgctattcttggtttcaatgagatcatgacgcttcttaggaatcccatttatgtgtttttgctatttgtgggctacttgatggtcaaagctttggcagtacaactagatgtcagcagagaattccaaaatggagtggttcctgggataatctctgtgtcagcgaagctcctgccgacgatacagaacctggtgaacaaagtggcagccgagcagcaggatgagcaccggcaccctcaccagcagcaccctcaggtagcagaacccctacagccacagatgcagccgccgccgctgctcctgagcccgagaagccccatgagcgagctgcggaggctgcacatgccgtcaagcccgcgcaaggtagcgtcttcctcctcgtcgccgtcgtcgtcctcctcgtctgccgtatcgtcccctaggcacgttggcgaggatcagaagccaagaccaggggcagctgcgcctgagaaccagtcc

SEQ ID NO: 216513 - DNA, 2607 bp, Zea Mays
cccattcccccacgagccctaggcgcgcccacgacggcacgggcccggagatggaggagagcgacgcggcggagggggtggcggtgcagctgatcgatggcgagggcgagttcgcggccgcggcggcggagcgattcatggcagccgcgggagtcgccggatgcgggctctcctacgccgtcgtctccatcatggggccacagagcagcggaaagagtaccttattgaaccaactatttggaaccaattttagggagatggatgcattcaggggaaggagccaaactactaaaggtatctggatagcacgttgtgttggtgttgaaccttgtactgttgtattggatctggagggtactgatggaagagagagaggagaggatgacactgcatttgagaagcaaagttcgttatttgcacttgcaatttcagacatagttctaattaacatgtggtgccatgatattggccgtgaacaagctgccaataaaccacttctaaagactgtatttcaggtcatgatgcgtttgtttagtcctcggaagacaacactactatttgttatacgtgataaaaccaggactccacttgaacatctagaaccagttctaagggaggatattcaaaagatttgatcagatatggaattctgttgccaagccagaggcacacaaagacacccctatcagtgaatttttcaatgtacaagttactgcattgtccagttttgaagaaaaagaggagcagtttagagaacaggttcaacaacttaggcagagattttcaaattcaattgcaccaggaggtcttgcaggtgatagaagaggagtagttcctgcttcaggttttctgtttagttcacaacagatttggaaagttatccgagagaacaaggatcttgatcttcctgctcacaaggtaatggttgctacggttaggtgtgatgaaattgcaaacgagaagtttggatgcataacctcggacacagaatggttagatgtggagagtgctgtccaatctggtccagtacctggttttgggaaaaaacttagcaatatcgtggaagttcacttgcaagagtatgacaaagaagctttctattttgatgaagctgttaggaaaggaaaacgacaacatttggagtccagaatactgaatcttgtccaacctgcattccagaaaatgttgactcatctgcgcatgaaggctttagaaaaatttaaagctggtcttaattcatctttggagagtggaaaagaattcgcgatatctgcaagagacaatactgaatgctctctcaaagactttgaacaaggatgtgctgatgctataatcaagcaggcgaactgggactgctctaaaatactagagaaagtacggcgtgatattgaagatcatgcactttcaattcgtgaaagaaagctatcagaattgacaacccatgctaaggagaaactaagaaaagcactagctgaacctgtggagtctctatttgatgctgcagaccaaacaacctggacatcaataagaaacatttacaaacgcgagacagaggccatcctaccggagtttctgaaaaccatttgtggctttgaaatggaatatgctcaagcagaagaaatggtatccaaattaagggattatgcccggagtgttgtgcaaagtaaagctaaagaggaatctagcaaagtattgatccatatgaaagagaggttcacaacagtgtttagccatgacaaggattcaattccaagggtctggacaggaaaggaagatgttcatgcgatagcaaaggaagctcgagctgcggctctcaaacttctgtctgtaatggcggccattcgctgggatgatgagccagataggattgaaagcatcatcacttcaacacttctggaaggctctgttgtatcaaagattgcaagtgctgcttctgctgacccacttgcttctaccacttgggaacagattcctccagagcatacaatgattactccttctcagtgcaagttactgtggaagcaattcaaatcagaaactgagttcaccattacacaagcagtatccacacagcaagctcacaggcgtggtaatagtaagctgcctcctccttgggcaattgtggccattgctattcttggtttcaatgagatcatgacgcttcttaggaatcccatttatgtgtttttgctatttgtgggctacttgatggtcaaagctttggcagtacaactagatgtcagcagagaattccaaaatggagtggttcctgggataatctctgtgtcagcgaagctcctgccgacgatacagaacctggtgaacaaagtggcagccgagcagcaggatgagcaccggcaccctcaccagcagcaccctcaggtagcagaacccctacagccacagatgcagccgccgccgctgctcctgagcccgagaagccccatgagcgagctgcggaggctgcacatgccgtcaagcccgcgcaaggtagcgtcttcctcctcgtcgccgtcgtcgtcctcctcgtctgccgtatcgtcccctaggcacgttggcgaggatcagaagccaagaccaggggcagctgcgcctgagaaccagtcc

SEQ ID NO: 216514 - DNA, 1753 bp, Zea Mays
ctcagatatgaagtttactcttgaacatggtctaaaaattgtaatgtcctccccttctatgcttgtaatggttgctacggttaggtgtgatgaaattgcaaacgagaagtttggatgcataacctcggacacagaatggttagatgtggagagtgctgtccaatctggtccagtacctggttttgggaaaaaacttagcaatatcgtggaagttcacttgcaagagtatgacaaagaagctttctattttgatgaagctgttaggaaaggaaaacgacaacatttggagtccagaatactgaatcttgtccaacctgcattccagaaaatgttgactcatctgcgcatgaaggctttagaaaaatttaaagctggtcttaattcatctttggagagtggaaaagaattcgcgatatctgcaagagacaatactgaatgctctctcaaagactttgaacaaggatgtgctgatgctataatcaagcaggcgaactgggactgctctaaaatactagagaaagtacggcgtgatattgaagatcatgcactttcaattcgtgaaagaaagctatcagaattgacaacccatgctaaggagaaactaagaaaagcactagctgaacctgtggagtctctatttgatgctgcagaccaaacaacctggacatcaataagaaacatttacaaacgcgagacagaggccatcctaccggagtttctgaaaaccatttgtggctttgaaatggaatatgctcaagcagaagaaatggtatccaaattaagggattatgcccggagtgttgtgcaaagtaaagctaaagaggaatctagcaaagtattgatccatatgaaagagaggttcacaacagtgtttagccatgacaaggattcaattccaagggtctggacaggaaaggaagatgttcatgcgatagcaaaggaagctcgagctgcggctctcaaacttctgtctgtaatggcggccattcgctgggatgatgagccagataggattgaaagcatcatcacttcaacacttctggaaggctctgttgtatcaaagattgcaagtgctgcttctgctgacccacttgcttctaccacttgggaacagattcctccagagcatacaatgattactccttctcagtgcaagttactgtggaagcaattcaaatcagaaactgagttcaccattacacaagcagtatccacacagcaagctcacaggcgtggtaatagtaagctgcctcctccttgggcaattgtggccattgctattcttggtttcaatgagatcatgacgcttcttaggaatcccatttatgtgtttttgctatttgtgggctacttgatggtcaaagctttggcagtacaactagatgtcagcagagaattccaaaatggagtggttcctgggataatctctgtgtcagcgaagctcctgccgacgatacagaacctggtgaacaaagtggcagccgagcagcaggatgagcaccggcaccctcaccagcagcaccctcaggtagcagaacccctacagccacagatgcagccgccgccgctgctcctgagcccgagaagccccatgagcgagctgcggaggctgcacatgccgtcaagcccgcgcaaggtagcgtcttcctcctcgtcgccgtcgtcgtcctcctcgtctgccgtatcgtcccctaggcacgttggcgaggatcagaagccaagaccaggggcagctgcgcctgagaaccagtcc

SEQ ID NO: 216515 - DNA, 2034 bp, Zea Mays
gtgactatggatgctaccattccaagatcacaaaaaaagcttttgctgagggaacccttcttactaagaactgggacactgaaccactatttcctttgcctgaaagtgttgtgggcatggctggagcaagcagtgatttaagtcccttcttgtcagtatctaccccaaggaaacgtgtgaaaagtagatgggagcctgttgtggatgaaaatgttaccaataaggtggaacaaatagcaaaaggattgatcagcagtaatgtccacagtactttggaccctaaaaatagaattccaaatcctgtgcggggtagcagttgggatcgtgggaagtttctccagtcttgtcaagcatcatcaaataaagtcaatcagaggcctgccaagaagcaaaaaatggctagtaatttgagtcaaatacagaatggaagtgcttcaagtgacagtgagaaggaacatgatctaaccaaacattatgccagtgcaactgcactagcaaactcgcctgaggaaaagaaacgtagggagcatagatccaagcgttttgaaaagagtaaagattcatcattaaaatcaagaaatgcttctgcaaataacgatggtatggctagttttcgtgcaagaagggcaatttcgtctcttcgtactagaacctatgaagaaggcactttggctgtggaggatatggattgggatgcactgacagtcaaaggaacatgtcaggaaattgagaaacgctatctacgacttacagaagcacctgatcctgccaaagtaaggccagaagatgttctggagaaggcccttgcaatggttgaaacatcagaaaagaattacctttacaagtgtgatcaactaaaatctatccggcaagatcttacagttcagagaatccagaatgaactgactgtaaaggtttatgaaacccatgcccgattagctatgcaagctggcgatttacccgaatttaaccagcttgtcaaaagaagccaaacaagatgcagctgttaagcattcccttgcagttcatgcttctgttttatcttgcaattacgttcaatttttcaaactatacaagaaggcacccaatttgaactcatgcctcatggatctatatgtggagcggatgcgctttgaagctatgaaatgcatgtctaggtcatatcgcccaactgtacctgtgggatatgttgcacagattttggggttcttgagaacagatacaggctgtgcaaccaatggggatgatggattagaaggatgcgaaaaatggttgaaagcgcatgggacagttctttcagaagatagcagtggggaattgcagatagatacgaaggcctcttcttctacactctacatgccagagccagagaacgccgttgcacatggtgatgcatcacttgctgttgatgacttttttgcacggactgacggacaacttaaaaggggcagcagcgatggaccaacagtggatactccgtagtagtattgggggctgccgtggcagtagtgctgaggtggcttcttccgtagaaattacaacagggggcatgaaatggaactgaccaacgatgccagcggagctacagtcggaacatgggtgctctaactgatccagtcatcgggttctggcatttgcctcaaagtgatctagtcatccagagttgcaccgcgatgagcttcgttgagaaggcagataagaaagcagcattacaagtttttaatgtcttggtggtttactcacccctaactttaagcgtagaaagaactgtgaaaaaacaactacaggtctacagctttgaagcatacacgtatgttttccggggctcctttttttctggctgccccttagtccgtgaagattgtaaaaatatttttaatgcacataaatttgctttcctatcctatcgaataacaacatttatgtacgtactaatactcctatagttatatctctcgctcgctcgagccgaaccgtttactgatactaagtctttcatatatatgatgatgcgatagcccgaaatggcttgtt

SEQ ID NO: 216516 - DNA, 2111 bp, Zea Mays
acatcagtgactatggatgctaccattccaagatcacaaaaaaagcttttgctgagggaacccttcttactaagaactgggacactgaaccactatttcctttgcctgaaagtgttgtgggcatggctggagcaagcagtgatttaagtcccttcttgtcagtatctaccccaaggaaacgtgtgaaaagtagatgggagcctgttgtggatgaaaatgttaccaataaggtggaacaaatagcaaaaggattgatcagcagtaatgtccacagtactttggaccctaaaaatagaattccaaatcctgtgcggggtagcagttgggatcgtgggaagtttctccagtcttgtcaagcatcatcaaataaagtcaatcagaggcctgccaagaagcaaaaaatggctagtaatttgagtcaaatacagaatggaagtgcttcaagtgacagtgagaaggaacatgatctaaccaaacattatgccagtgcaactgcactagcaaactcgcctgaggaaaagaaacgtagggagcatagatccaagcgttttgaaaagagtaaagattcatcattaaaatcaagaaatgcttctgcaaataacgatggtatggctagttttcgtgcaagaagggcaatttcgtctcttcgtactagaacctatgaagaaggcactttggctgtggaggatatggattgggatgcactgacagtcaaaggaacatgtcaggaaattgagaaacgctatctacgacttacagaagcacctgatcctgccaaagtaaggccagaagatgttctggagaaggcccttgcaatggttgaaacatcagaaaagaattacctttacaagtgtgatcaactaaaatctatccggcaagatcttacagttcagagaatccagaatgaactgactgtaaagtgccagtcacaactgaagaggctatatgcacaaggaatcaagggttgctattttgaattttctgcttacaatttgttgtgtgtcatgctacactctaataataaacgagacttgctgtcatcaatggcaagcttgtcaaaagaagccaaacaagatgcagctgttaagcattcccttgcagttcatgcttctgttttatcttgcaattacgttcaatttttcaaactatacaagaaggcacccaatttgaactcatgcctcatggatctatatgtggagcggatgcgctttgaagctatgaaatgcatgtctaggtcatatcgcccaactgtacctgtgggatatgttgcacagattttggggttcttgagaacagatacaggctgtgcaaccaatggggatgatggattagaaggatgcgaaaaatggttgaaagcgcatgggacagttctttcagaagatagcagtggggaattgcagatagatacgaaggcctcttcttctacactctacatgccagagccagagaacgccgttgcacatggtgatgcatcacttgctgttgatgacttttttgcacggactgacggacaacttaaaaggggcagcagcgatggaccaacagtggatactccgtagtagtattgggggctgccgtggcagtagtgctgaggtggcttcttccgtagaaattacaacagggggcatgaaatggaactgaccaacgatgccagcggagctacagtcggaacatgggtgctctaactgatccagtcatcgggttctggcatttgcctcaaagtgatctagtcatccagagttgcaccgcgatgagcttcgttgagaaggcagataagaaagcagcattacaagtttttaatgtcttggtggtttactcacccctaactttaagcgtagaaagaactgtgaaaaaacaactacaggtctacagctttgaagcatacacgtatgttttccggggctcctttttttctggctgccccttagtccgtgaagattgtaaaaatatttttaatgcacataaatttgctttcctatcctatcgaataacaacatttatgtacgtactaatactcctatagttatatctctcgctcgctcgagccgaaccgtttactgatactaagtctttcatatatatgatgatgcgatagcccgaaatggcttgtt

SEQ ID NO: 216517 - DNA, 4189 bp, Zea Mays
acgaaatcacgaccatgtacatctgatatgttcctacccttgttcgccaccgtattcgccggctgtctccgcccatctcgcctgagaactaaggcggccgccagtcgcagccctcggtggtcggcacctcctcagcccgtttcccctaacgctcacactctacgccgccgcgtcgtcggcctcgccctccctctcgacgaactaagccatccccggccgagcttccgacgcattcccgggccacttccctcccttccggccttcctactccctccacgcaccgcaactgtgacactccgctccgacgcgggcgccgcaggccgttgacgacacccgaacccaaccggcaacgcgcccgaaaggggcagggactccttttgcttgtccttcgcccctcttctcgctttctgcggagggaaaaactttcccagtcaattaaaaaaaaaatcgacggacggctttacgcacgcgattcgctgctcgcccccaaatttctcctctgcttctggttcctttgacgcatctgatcatttccccctcctctacgcgggtcgaatcgcgagagtgtggcggcggctgtggtggttgactggtgcttagggttggagctccaggaggatggcgagccacggcatcggggcggccgctggatctgacgccccgcacgctgaggtcgtcactatgggacagacaaatccatctccttatcctcctgtatcttccagtcatcattcatggtcctctgcaactgggtcagtttcatggaacaatacagtggacaaacttagccaagatacagtttattatgatccacaaagggatgtatcggtttcaggagggaatcaaaatgtaggaagcagtgcgcctcatgttgcccaggcgagtatggggataacagacgcagctcattcccatgtaccttactctagttcagatcaacatggctataaccctgtagaatatgccaattattattatagctacccacaagcggcaaatgattcttctgtccagcaaggagcaaaccaacatccaggtgcagcttatcagcctcttacttcatttcaaaattcagggtcttacattgatcctacaagtaacacatattacaatgctggggatcatcagactgtgccaggatatggaagcagcagctactattttcagaacaacacatggaatggtggaagcacagggaataattttgctcaatcataccagaactactcaccatctgatacaaatgcacaacagagctctacttcagtgcctgccaattctttaccgtatcagcagcagtataaccagtggccgtactattacaatcaatctgtgccaagtgcttctagcaatccagttgctgggaacagtactacagataacttagctgttaacaccccttctagctactcctatcctaatagccagccacctccaccaggaacaacatcatggaaaagtaattcaagtgcttctgttgcgcctcctatgcaggtaccaggtgttttggaacatcaaaatcaatatggcaaccaggcggaaggtcattataaccagggaccaggtgtccaatggtctcaaaaccattacgcctaccagacacagccataccctcagaagattaattccaattattcgcaactaagcaaccctgaagatcaactgaggactgtagattctaacggtccaagcacaaatctttcgtctaaccatgtttctgaaaattttaaaccaaacttgctggattctgtgacaatgaacacttccagcgaaagcaaaatacaagttcctataaatcctcgaattgcccaaggtttctctatggtgataccaaagaatgagaagaaaagttctggacttgatttatcaaggaaacctgcctatgttagtgtgtccatgccggcgaacgatgctaaagcaagtcaagttggtcctgatgctagatcgatacccttttcactccgtaactatgctatgaggaacctcaatcgttgcaagaatgatacccagagggcagcctgccgaagcataatggaggagatcacaaaaaaagcttttgctgagggaacccttcttactaagaactgggacactgaaccactatttcctttgcctgaaagtgttgtgggcatggctggagcaagcagtgatttaagtcccttcttgtcagtatctaccccaaggaaacgtgtgaaaagtagatgggagcctgttgtggatgaaaatgttaccaataaggtggaacaaatagcaaaaggattgatcagcagtaatgtccacagtactttggaccctaaaaatagaattccaaatcctgtgcggggtagcagttgggatcgtgggaagtttctccagtcttgtcaagcatcatcaaataaagtcaatcagaggcctgccaagaagcaaaaaatggctagtaatttgagtcaaatacagaatggaagtgcttcaagtgacagtgagaaggaacatgatctaaccaaacattatgccagtgcaactgcactagcaaactcgcctgaggaaaagaaacgtagggagcatagatccaagcgttttgaaaagagtaaagattcatcattaaaatcaagaaatgcttctgcaaataacgatggtatggctagttttcgtgcaagaagggcaatttcgtctcttcgtactagaacctatgaagaaggcactttggctgtggaggatatggattgggatgcactgacagtcaaaggaacatgtcaggaaattgagaaacgctatctacgacttacagaagcacctgatcctgccaaagtaaggccagaagatgttctggagaaggcccttgcaatggttgaaacatcagaaaagaattacctttacaagtgtgatcaactaaaatctatccggcaagatcttacagttcagagaatccagaatgaactgactgtaaagcttatttcaggtttatgaaacccatgcccgattagctatgcaagctggcgatttacccgaatttaaccagtgccagtcacaactgaagaggctatatgcacaaggaatcaagggttgctattttgaattttctgcttacaatttgttgtgtgtcatgctacactctaataataaacgagacttgctgtcatcaatggcaagcttgtcaaaagaagccaaacaagatgcagctgttaagcattcccttgcagttcatgcttctgttttatcttgcaattacgttcaatttttcaaactatacaagaaggcacccaatttgaactcatgcctcatggatctatatgtggagcggatgcgctttgaagctatgaaatgcatgtctaggtcatatcgcccaactgtacctgtgggatatgttgcacagattttggggttcttgagaacagatacaggctgtgcaaccaatggggatgatggattagaaggatgcgaaaaatggttgaaagcgcatgggacagttctttcagaagatagcagtggggaattgcagatagatacgaaggcctcttcttctacactctacatgccagagccagagaacgccgttgcacatggtgatgcatcacttgctgttgatgacttttttgcacggactgacggacaacttaaaaggggcagcagcgatggaccaacagtggatactccgtagtagtattgggggctgccgtggcagtagtgctgaggtggcttcttccgtagaaattacaacagggggcatgaaatggaactgaccaacgatgccagcggagctacagtcggaacatgggtgctctaactgatccagtcatcgggttctggcatttgcctcaaagtgatctagtcatccagagttgcaccgcgatgagcttcgttgagaaggcagataagaaagcagcattacaagtttttaatgtcttggtggtttactcacccctaactttaagcgtagaaagaactgtgaaaaaacaactacaggtctacagctttgaagcatacacgtatgttttccggggctcctttttttctggctgccccttagtccgtgaagattgtaaaaatatttttaatgcacataaatttgctttcctatcctatcgaataacaacatttatgtacgtactaatactcctatagttatatctctcgctcgctcgagccgaaccgtttactgatactaagtctttcatatatatgatgatgcgatagcccgaaatggcttgtt

SEQ ID NO: 216518 - DNA, 1472 bp, Zea Mays
gccacctttccatcgattttttttatttttttgtaatttttttgaataaacgactcagttaaatttgatgaaaaagtcaaataaattgtcaattgagtgatacagagtgagtagttgtgagcatgatggaggtgaagtaacaggtccaggtccgggtccggatccgggtccggcggcccgcctgcggcgccgagaagaacgcgcgtttcggtcggtggtaggcttggcctagtggctgtgcaagcattagttgcgcatgcatgcccggccggcctcgaccatccatccctcccacgactgcgcctttgtctctccggccatctcatcttcaccaccacctccaccacccagttctttgcagcatgcgtttgggtttgggattgatagatacactcattcacttgcgtgcgtttgctactgggactggctggatcggttccaattgagacggacctgacgacgacgatggccgcaagcaccgcgcggtggcaactgctggccggccaggtgaaacggcaagcgtcggggttcctgcaggacaagtacaagcaggcgaggctggcgctgggcgacgtgacgccggcagagctgaggcaaccaacaacgagccctgcgtccccgacgccaagaccctggcgtgcatcgccgactcggccttcgacatggacgacttctggaggatcgccaaggtgctgcaccagaggctgagccgcgctgccgactggaaggagtggcgccccgtgtacaaggcgctggtggtcctcgagttcctgctcacccacggccccgaggacgtgccctccgagttcctagctgacatgcgcgccatgcacgacctccgcagcttcaactacgtcgacgacaagggcttcaactggggcacctgcatgcagcgccggaccgacagcgtcctgttgctgctcacagacgccgaccgtctcagagaggcgcggcgcagggccattagagtctcccacgaggtgcgcggtggcggcgttggcggcggcagcccgacgtcgtcgtcctccccgtcctcggcctcgtcctccgcctcctccaggacctcgcgcacctggtccttcggcgggtcctcccactactccgatggccctgccatgtgcctcacctgtgcctccgacgccgactaccgccacgacaagaaatgcgacgcgtacacagccgacgacgactgctgggcctcgtcgaatcacaagagcagcaggtgggcggccaggttggacgaaagcgacggcgaggaccagcaccagggcctcatggacgacgcctgggacgcccacttggtggaggacagcaccagcacttggtccgccaggttgctcggttccttgtccttgagcaccagcagggcgtcaggcttccagagtctgtcgcaaccggagcagcgaaggtcatccaagaagctgcaggggcagctccagcgccagctttccgccgattacacacgtccttga

SEQ ID NO: 216519 - DNA, 1076 bp, Zea Mays
atgcacaatctacggtccgtttcaaagcccaacgcgaagctctatttgggccttccgtttacgcccaaccgacaatgcgaagccttatttggcccaaccgaaggcccaacgcggtcagctgatgtctctttgactctttccaccacacgaccacactgctcgtgctctctcgatgcggtcaccagtcgaatggacggcgcggatatcccctcccactccgccgccgatggcgaccggcctccggagaacgcggacgacggcggcgtggaggacgagcgtgccgccgcgccccctccggagcggtgcggggcgttggcttccgcaatcgcaggggtgctggccggcgcgctgcgggagcacgaggagcgggcggccgccaccgcccggagccaggacgaggtcgccgctgccatcgaccgcctcaacggagagctagacaggctattagagaatgcacccacaatggtaataatgcatcattcagcaaggatttccagcatccgcaagaggatttcagcaatgaacatgctgctcaagtccatacaacgacgcatagatagcatggatagaattatttctactgaccattcatctcctgtacagaaagccggtaatgaagttggaacaagttatggctttcaatatcacgaagttagtggtggagaggtgagcttttcctgggctttggtgctgtggttctagcagaattctggtggtgtcccatcaattgcgcaccatttctgttttggtagagctgccatccaacaatcacacggtgctgtgcatagaagtgagacgtcataatgtcgattttttccccagagatgtgtcatcaaaatatttcaatcctttttgtagcatattggagtggggaaagtcttttgtactggatggtcaatgttgcagacaacgaatcgtgctttcagctttggcgtttacccttgtattcaaacatgaaattgtcttcagaaatattatcatattgtcactgttgagcggttttgatgtatacttgcttgttgaagatggcaacatctggaattcgtgttgttatattttatcataaatgcttctag

SEQ ID NO: 216520 - DNA, 2223 bp, Zea Mays
atcacactccaccacacgcctagcttctctttccaaaagcatggcgttcactgccctctcattgctataccacctctcgatcactgtatcgcttgtcctagctcgtggcattatcatagccggtgttgttgacatagctccacgtcccactcctctacctcttcctccgcagccacttcttgcaccctctccgactcctcgtcctccaggtcttggggcccctactcgcactcctcctcttcctcttcctcttccttcccctaggccaccacgcactccgcctacaacgactcctcttccacgtccatggttgggggcaccttctcctgcccgtgttcctcgtcctccacggctcggagcaccccctcgtactcctgttcttccgtctcctcgagtaggtgctccatctcccgcacctcctcctgttcgtcctccacagttgggagctccccttcctacccctgttgctcctactcctcagttggaggatccctctagaggtcctattcttcctcgaccgcctctcaagggtgttccaccttctactcctccacttgtggcaccacggttaggggcacccctcccatcccctcctgttccttcagctcggaagggcactccacctcctccaccacagtttagggtacctattcgatctcctgttattcctcctcctcagaagggcattccaccttccgctcctctaattcccgcaccacgattaggggtacctcttccatctcctcctgttcagcagccccctcggactcctattctaccaccctctcgaaagggtgctccaccatctatccctccactttctccaccaaagttaggagcaccacttccgtctccactttttcctccgcctcgactaggagctccccctcgcactcctattcttgctcctcctcctcaagttcgtgccgtatttcctagtcctcgtagccctcctccgcgtttgggtgcacctcttccaactcctcttctacctcctcagtatgcggccgctcctcctcctcctccgtctccatctccacctatggtggtgcctagtgggcctaaggtgccagccttgctcgcgtttggagattcaatcgtggacacaggaaacaacaactacctggtgaccgttgtgaaggccaacttcccgccgtacggcagggagtaccctaaccacaaggctactggcaggttctccgacggcaagatcaccgtggactttctagcgtctgcgcttgggttgaaggagacgctcccgccatacctgaacaagagcctcaccctggaggacctcaagaccggcgtcagcttcgcgtcggcggggagcggctacaacaacgccacgtgccggacgtcgtcgaccatgacgatcgagcggcagctgcagttgttctccgagtacaaggcgaaggtggggggcatccacgagagggccctcttcgtggtctgctccggcagcaacgacattgtggagcacttcaccctcgccgacggcgctgatcggccaaggcgcgcggcagatcgcgctgaccggggcgccgccggtggggtgcgtgccctcgcagcggcgcatcgccggcggggttcggatgcagtgcgccacggaccgcaaccagctggcgctcttgttcaaccggaagctgagcctggaggtggccaagctgtccgggaagtaccgcggcgtcaacatcttctacgtcgacctctactccgtcctcgccgacgtggtccagcgctaccaggctctcgggttcaaggacggcaaggacgcctgctgcggctacgtcggcctggcggtgggcccgctctgcaacatcggcagccgtacctgcccggacccctccaagtacgtgttctgggacagctaccaccccaccgagagggcgtacaagctcatgatggacgacttcctcacaagatacatgagatacatacactagctagctagagctagtcgatccgccatgttaatttgcgctttaattatagcttgttgctagccgctcgctttatattttcttatcatatatacttaggttctttaatttaacgaataagtatgtaatcgaatcgataggcatacaggcgctcgcgcatcatatgaagttctgtatgggttttccccttaatgtactgcttaatttgctcccaataaaattggatggttagggaccgtttggcatagctctagaagtttaagtaaagattttctactcaaac

SEQ ID NO: 216521 - DNA, 3733 bp, Zea Mays
cgctttttctcttgcgcatgcaacgtccgcgttgtgcttgctgcgcattggcattctcatgccgctggacacaacctaacaagcagcacttgtgctgaatgcatcaaggcgctttaggtacactcttgatttgaaaaaggaggaacaaaaggaggagatcaggagaaaaatccgtgcacaggcacatgttataagggccgcttttcgtttcaaagaggctggccgaatccatgtacagtccgaagaaacaaaagtaccatgtgctgatggtgcacttggcttcggaatcaaagaagaccagattacagcactgacaagggatcacaactactctggtctgcagcaatatggaggggtttctggtgtagcacatatgctaaaaaccgatacacagaaggggattagtggagatgactcagatttgctggcaaggaaaaatgcatttggatcaaacacatatcctcgtaagaaaggaagaagctttttggctttcgtatgggatgcttgtaaagacttgacgctaatcatcctcatggttgctgctgctgtttcactggccttgggcataacaacagagggcataaaagaaggctggtatgatggagcgagcattgcctttgctgttcttctagttgtatttgttacagctatcagtgactacaagcaatcactgcaattccaaaatcttaatgaagaaaaacagaacattcgtttggaggttgttagaggcggaaggcgaatcacggtatcaatatatgatttggttgtcggtgatgttgtccctctcaaaattggtgaccaggtccccacagatggtatccttatcagtggtcactccctttccatagatgaatcaagcatgactggagaaagtaaaattgtacacaaagatcagaaatcaccatttctaatgtcaggttgcaaagttgccgatggatatggaacaatgctggtaactgctgttggaattaacactgaatgggggttgctaatggcaagcatatctgaagattcgggtgaagagacaccacttcaggttcgtttgaatggtgtcgctacttttattggaatggttggactttctgttgcccttgcagttcttgttgtacttttggccaggtacttcactgggcatacttataatcctgatggatctgtgcaatatgtgaaagggaatatgggtgtaggccagacgattcgtggaatagttaaaatattcacagtggctgtcaccattgtggtcgtggctgttccagaaggacttccattagctgtcacacttacgcttgctttctcaatgcgcaaaatgatgaaagacaaggctctggtgaggaggctttctgcatgcgaaacgatgggttctgccacaacaatctgcagtgacaagactggcaccttgacgttaaatcagatgactgttgttgaggcatattttggtggaaagaagatggactcacctgataatgctcagatgttatctgctgatgtcacatcgctgattgttgaaggaattgcacagaacacttctggaagcatatttgagcccgagcagggtggtcaagaaccagaggtgactggatcacctacagaaaaggctatcctgtcttggggactaaagctgggtatgaaattcagtgaaacaagatcgaagtcatctattcttcatgtatttcctttcaactcagagaaaaagcgaggcggggttgcggtgtacctggctggctctgaggtccatatacactggaaaggagcagctgaaattattttggattcatgcacaagctgggttgacactggtggttcgaagcattcaatgactcctgaaaaagttgccgaattcaagaaattcattgaagatatggctgctgctagcctccgctgtgttgcgtttgcctatagaactcatgagatggatgatgttccagacgaagatcggagagaagagtggcaacttcctgaagataacctgattatgcttggaattgtgggaataaaggatccctgccgtccaggagttcgagattctgttcgtttatgtcaggcagctggcattaaggtgcgcatggttactggtgataatcttcaaactgcaagagccattgccctggagtgcgggatacttgatgatcccaatgtgtcagagcctgtcatcattgaagggaaaacattccgggcgctgtcagacttggaaagggaggatgctgctgaaaaaatctcagtgatggggaggtcttcaccaaatgataaacttttacttgttaaggcactgagggcaagaggtcacgttgttgctgttactggagatggcacaaatgatgccccagcactgcatgaggcagatattggtctatcaatggggattcagggaactgaagttgctaaggagagttctgatattattatcttggatgacaattttgcctcggtcgtgagggttgtcaggtggggccgatcggtgtatgcaaacatacaaaagtttatacagttccaactaacagtcaacgtcgcagctctgataatcaatgtagttgctgccgtcagttccggaaacgtgccattgaatgctgttcagttgttgtgggttaacctaattatggacactttgggtgcccttgcattggcgacagaaccacctacaaaccatcttatggagagacccccagtagggagaagggagccattggtaacaaatatcatgtggagaaacttgattatcatggctacgtttcaagtttcagtcctccttagtctcaacttcaaggggataagcctcctgcagttgaaaaatgatgatccagcacatgcagataaagtgaaaaataccttcatattcaacacatttgttctctgccaggtgttcaacgaattcaattcacgtaaaccagatgagctgaatatattcaagggcatttcagggaaccatctttttattggcatcatagtaataacagttatactccaggcgcttatcgttgagttcctcggcaagtttgcctcaacagttaggctaagttggcagctgtggttggtatcgataggtcttgctttcttcagctggccactggcattcgtgggaaagcttattcctattcctaaacgtccattaggagaattctttgcgtgctgctgtaactgtaaggggagcaaacaaggccctgatgacgcaacctctaatggtaaggaagacaacaagcttgagccatgagatatcgcaaggtttggtggctggcaacgatggccttctgctgtttcttgccagggtttgacgtgttggatttgtaattgcccctgattgcgattgtatatatatatacacacacgggttgctcctaggatctgttatacgggcaacatcaatttcataatcatagagattttcctcttagtcttcatttaccgagttcattgcgaatatgattaaacttgtcttgtctgaatctgaatctataacgagagttgggctatggtacccttctggagctgaccatgagtaggatgtcctgagatcttggacatcctgtgatgaaagtctgggaagattttagggccggttttaggttggcttcaaagcttgagctgacctcaattgtctattaaggagagtagcatttacgagtctagtgatgaatttatttggtctataaactggttagaagacaatctgtaatttgtagtctcctgacatccaatagaattcaggagtggtgtaccgactctgcctctcgttctcaac

SEQ ID NO: 216522 - DNA, 3949 bp, Zea Mays
cgaaacgcccctcgccggtaaccttctacactcttgctgtgcggcagccgtcccataaccggagttcggaggcggtgtcgtgggttcgcggcgcctgggttcagggttttggccggcgcctctctcgccagcgagcacgggtcgggatggagtccttgtcgtcgggcggcgagctggcgcggcgccagagtagcggcggcggcagcagcggatggggtagcttcagtggcgacgccgacccgttcgatatccccgcgaagggtgcccctctcgagcggctcaggaagtggcggcaagcagcacttgtgctgaatgcatcaaggcgctttaggtacactcttgatttgaaaaaggaggaacaaaaggaggagatcaggagaaaaatccgtgcacaggcacatgttataagggccgcttttcgtttcaaagaggctggccgaatccatgtacagtccgaagaaacaaaagtaccatgtgctgatggtgcacttggcttcggaatcaaagaagaccagattacagcactgacaagggatcacaactactctggtctgcagcaatatggaggggtttctggtgtagcacatatgctaaaaaccgatacacagaaggggattagtggagatgactcagatttgctggcaaggaaaaatgcatttggatcaaacacatatcctcgtaagaaaggaagaagctttttggctttcgtatgggatgcttgtaaagacttgacgctaatcatcctcatggttgctgctgctgtttcactggccttgggcataacaacagagggcataaaagaaggctggtatgatggagcgagcattgcctttgctgttcttctagttgtatttgttacagctatcagtgactacaagcaatcactgcaattccaaaatcttaatgaagaaaaacagaacattcgtttggaggttgttagaggcggaaggcgaatcacggtatcaatatatgatttggttgtcggtgatgttgtccctctcaaaattggtgaccaggtccccacagatggtatccttatcagtggtcactccctttccatagatgaatcaagcatgactggagaaagtaaaattgtacacaaagatcagaaatcaccatttctaatgtcaggttgcaaagttgccgatggatatggaacaatgctgtccaggtaactgctgttggaattaacactgaatgggggttgctaatggcaagcatatctgaagattcgggtgaagagacaccacttcaggttcgtttgaatggtgtcgctacttttattggaatggttggactttctgttgcccttgcagttcttgttgtacttttggccaggtacttcactgggcatacttataatcctgatggatctgtgcaatatgtgaaagggaatatgggtgtaggccagacgattcgtggaatagttaaaatattcacagtggctgtcaccattgtggtcgtggctgttccagaaggacttccattagctgtcacacttacgcttgctttctcaatgcgcaaaatgatgaaagacaaggctctggtgaggaggctttctgcatgcgaaacgatgggttctgccacaacaatctgcagtgacaagactggcaccttgacgttaaatcagatgactgttgttgaggcatattttggtggaaagaagatggactcacctgataatgctcagatgttatctgctgatgtcacatcgctgattgttgaaggaattgcacagaacacttctggaagcatatttgagcccgagggtggtcaagaaccagaggtgactggatcacctacagaaaaggctatcctgtcttggggactaaagctgggtatgaaattcagtgaaacaagatcgaagtcatctattcttcatgtatttcctttcaactcagagaaaaagcgaggcggggttgcggtgtacctggctggctctgaggtccatatacactggaaaggagcagctgaaattattttggattcatgcacaagctgggttgacactggtggttcgaagcattcaatgactcctgaaaaagttgccgaattcaagaaattcattgaagatatggctgctgctagcctccgctgtgttgcgtttgcctatagaactcatgagatggatgatgttccagacgaagatcggagagaagagtggcaacttcctgaagataacctgattatgcttggaattgtgggaataaaggatccctgccgtccaggagttcgagattctgttcgtttatgtcaggcagctggcattaaggtgcgcatggttactggtgataatcttcaaactgcaagagccattgccctggagtgcgggatacttgatgatcccaatgtgtcagagcctgtcatcattgaagggaaaacattccgggcgctgtcagacttggaaagggaggatgctgctgaaaaaatctcagtgatggggaggtcttcaccaaatgataaacttttacttgttaaggcactgagggcaagaggtcacgttgttgctgttactggagatggcacaaatgatgccccagcactgcatgaggcagatattggtctatcaatggggattcagggaactgaagttgctaaggagagttctgatattattatcttggatgacaattttgcctcggtcgtgagggttgtcaggtggggccgatcggtgtatgcaaacatacaaaagtttatacagttccaactaacagtcaacgtcgcagctctgataatcaatgtagttgctgccgtcagttccggaaacgtgccattgaatgctgttcagttgttgtgggttaacctaattatggacactttgggtgcccttgcattggcgacagaaccacctacaaaccatcttatggagagacccccagtagggagaagggagccattggtaacaaatatcatgtggagaaacttgattatcatggctacgtttcaagtttcagtcctccttagtctcaacttcaaggggataagcctcctgcagttgaaaaatgatgatccagcacatgcagataaagtgaaaaataccttcatattcaacacatttgttctctgccaggtgttcaacgaattcaattcacgtaaaccagatgagctgaatatattcaagggcatttcagggaaccatctttttattggcatcatagtaataacagttatactccaggcgcttatcgttgagttcctcggcaagtttgcctcaacagttaggctaagttggcagctgtggttggtatcgataggtcttgctttcttcagctggccactggcattcgtgggaaagcttattcctattcctaaacgtccattaggagaattctttgcgtgctgctgtaactgtaaggggagcaaacaaggccctgatgacgcaacctctaatggtaaggaagacaacaagcttgagccatgagatatcgcaaggtttggtggctggcaacgatggccttctgctgtttcttgccagggtttgacgtgttggatttgtaattgcccctgattgcgattgtatatatatatacacacacgggttgctcctaggatctgttatacgggcaacatcaatttcataatcatagagattttcctcttagtcttcatttaccgagttcattgcgaatatgattaaacttgtcttgtctgaatctgaatctataacgagagttgggctatggtacccttctggagctgaccatgagtaggatgtcctgagatcttggacatcctgtgatgaaagtctgggaagattttagggccggttttaggttggcttcaaagcttgagctgacctcaattgtctattaaggagagtagcatttacgagtctagtgatgaatttatttggtctataaactggttagaagacaatctgtaatttgtagtctcctgacatccaatagaattcaggagtggtgtaccgactctgcctctcgttctcaac

SEQ ID NO: 216523 - DNA, 4009 bp, Zea Mays
ccgcagcagcccgttccaaaaataaaactgcagcccccctccagaatccaaacacaaaaggcacaaacgcgaaacgcccctcgccggtaaccttctacactcttgctgtgcggcagccgtcccataaccggagttcggaggcggtgtcgtgggttcgcggcgcctgggttcagggttttggccggcgcctctctcgccagcgagcacgggtcgggatggagtccttgtcgtcgggcggcgagctggcgcggcgccagagtagcggcggcggcagcagcggatggggtagcttcagtggcgacgccgacccgttcgatatccccgcgaagggtgcccctctcgagcggctcaggaagtggcggcaagcagcacttgtgctgaatgcatcaaggcgctttaggtacactcttgatttgaaaaaggaggaacaaaaggaggagatcaggagaaaaatccgtgcacaggcacatgttataagggccgcttttcgtttcaaagaggctggccgaatccatgtacagtccgaagaaacaaaagtaccatgtgctgatggtgcacttggcttcggaatcaaagaagaccagattacagcactgacaagggatcacaactactctggtctgcagcaatatggaggggtttctggtgtagcacatatgctaaaaaccgatacacagaaggggattagtggagatgactcagatttgctggcaaggaaaaatgcatttggatcaaacacatatcctcgtaagaaaggaagaagctttttggctttcgtatgggatgcttgtaaagacttgacgctaatcatcctcatggttgctgctgctgtttcactggccttgggcataacaacagagggcataaaagaaggctggtatgatggagcgagcattgcctttgctgttcttctagttgtatttgttacagctatcagtgactacaagcaatcactgcaattccaaaatcttaatgaagaaaaacagaacattcgtttggaggttgttagaggcggaaggcgaatcacggtatcaatatatgatttggttgtcggtgatgttgtccctctcaaaattggtgaccaggtccccacagatggtatccttatcagtggtcactccctttccatagatgaatcaagcatgactggagaaagtaaaattgtacacaaagatcagaaatcaccatttctaatgtcaggttgcaaagttgccgatggatatggaacaatgctggtaactgctgttggaattaacactgaatgggggttgctaatggcaagcatatctgaagattcgggtgaagagacaccacttcaggttcgtttgaatggtgtcgctacttttattggaatggttggactttctgttgcccttgcagttcttgttgtacttttggccaggtacttcactgggcatacttataatcctgatggatctgtgcaatatgtgaaagggaatatgggtgtaggccagacgattcgtggaatagttaaaatattcacagtggctgtcaccattgtggtcgtggctgttccagaaggacttccattagctgtcacacttacgcttgctttctcaatgcgcaaaatgatgaaagacaaggctctggtgaggaggctttctgcatgcgaaacgatgggttctgccacaacaatctgcagtgacaagactggcaccttgacgttaaatcagatgactgttgttgaggcatattttggtggaaagaagatggactcacctgataatgctcagatgttatctgctgatgtcacatcgctgattgttgaaggaattgcacagaacacttctggaagcatatttgagcccgagggtggtcaagaaccagaggtgactggatcacctacagaaaaggctatcctgtcttggggactaaagctgggtatgaaattcagtgaaacaagatcgaagtcatctattcttcatgtatttcctttcaactcagagaaaaagcgaggcggggttgcggtgtacctggctggctctgaggtccatatacactggaaaggagcagctgaaattattttggattcatgcacaagctgggttgacactggtggttcgaagcattcaatgactcctgaaaaagttgccgaattcaagaaattcattgaagatatggctgctgctagcctccgctgtgttgcgtttgcctatagaactcatgagatggatgatgttccagacgaagatcggagagaagagtggcaacttcctgaagataacctgattatgcttggaattgtgggaataaaggatccctgccgtccaggagttcgagattctgttcgtttatgtcaggcagctggcattaaggtgcgcatggttactggtgataatcttcaaactgcaagagccattgccctggagtgcgggatacttgatgatcccaatgtgtcagagcctgtcatcattgaagggaaaacattccgggcgctgtcagacttggaaagggaggatgctgctgaaaaaatctcagtgatggggaggtcttcaccaaatgataaacttttacttgttaaggcactgagggcaagaggtcacgttgttgctgttactggagatggcacaaatgatgccccagcactgcatgagatattggtctatcaatggggattcagggaactgaagttgctaaggagagttctgatattattatcttggatgacaattttgcctcggtcgtgagggttgtcaggtggggccgatcggtgtatgcaaacatacaaaagtttatacagttccaactaacagtcaacgtcgcagctctgataatcaatgtagttgctgccgtcagttccggaaacgtgccattgaatgctgttcagttgttgtgggttaacctaattatggacactttgggtgcccttgcattggcgacagaaccacctacaaaccatcttatggagagacccccagtagggagaagggagccattggtaacaaatatcatgtggagaaacttgattatcatggctacgtttcaagtttcagtcctccttagtctcaacttcaaggggataagcctcctgcagttgaaaaatgatgatccagcacatgcagataaagtgaaaaataccttcatattcaacacatttgttctctgccaggtgttcaacgaattcaattcacgtaaaccagatgagctgaatatattcaagggcatttcagggaaccatctttttattggcatcatagtaataacagttatactccaggcgcttatcgttgagttcctcggcaagtttgcctcaacagttaggctaagttggcagctgtggttggtatcgataggtcttgctttcttcagctggccactggcattcgtgggaaagcttattcctattcctaaacgtccattaggagaattctttgcgtgctgctgtaactgtaaggggagcaaacaaggccctgatgacgcaacctctaatggtaaggaagacaacaagcttgagccatgagatatcgcaaggtttggtggctggcaacgatggccttctgctgtttcttgccagggtttgacgtgttggatttgtaattgcccctgattgcgattgtatatatatatacacacacgggttgctcctaggatctgttatacgggcaacatcaatttcataatcatagagattttcctcttagtcttcatttaccgagttcattgcgaatatgattaaacttgtcttgtctgaatctgaatctataacgagagttgggctatggtacccttctggagctgaccatgagtaggatgtcctgagatcttggacatcctgtgatgaaagtctgggaagattttagggccggttttaggttggcttcaaagcttgagctgacctcaattgtctattaaggagagtagcatttacgagtctagtgatgaatttatttggtctataaactggttagaagacaatctgtaatttgtagtctcctgacatccaatagaattcaggagtggtgtaccgactctgcctctcgttctcaac

SEQ ID NO: 216524 - DNA, 4095 bp, Zea Mays
tgtacgcacagtgtgtccggactccggacggcaactccatctccacgctgcacggtgttggcactctttttatggctgcagcccgcagcagcccgttccaaaaataaaactgcagcccccctccagaatccaaacacaaaaggcacaaacgcgaaacgcccctcgccggtaaccttctacactcttgctgtgcggcagccgtcccataaccggagttcggaggcggtgtcgtgggttcgcggcgcctgggttcagggttttggccggcgcctctctcgccagcgagcacgggtcgggatggagtccttgtcgtcgggcggcgagctggcgcggcgccagagtagcggcggcggcagcagcggatggggtagcttcagtggcgacgccgacccgttcgatatccccgcgaagggtgcccctctcgagcggctcaggaagtggcggcaagcagcacttgtgctgaatgcatcaaggcgctttaggtacactcttgatttgaaaaaggaggaacaaaaggaggagatcaggagaaaaatccgtgcacaggcacatgttataagggccgcttttcgtttcaaagaggctggccgaatccatgtacagtccgaagaaacaaaagtaccatgtgctgatggtgcacttggcttcggaatcaaagaagaccagattacagcactgacaagggatcacaactactctggtctgcagcaatatggaggggtttctggtgtagcacatatgctaaaaaccgatacacagaaggggattagtggagatgactcagatttgctggcaaggaaaaatgcatttggatcaaacacatatcctcgtaagaaaggaagaagctttttggctttcgtatgggatgcttgtaaagacttgacgctaatcatcctcatggttgctgctgctgtttcactggccttgggcataacaacagagggcataaaagaaggctggtatgatggagcgagcattgcctttgctgttcttctagttgtatttgttacagctatcagtgactacaagcaatcactgcaattccaaaatcttaatgaagaaaaacagaacattcgtttggaggttgttagaggcggaaggcgaatcacggtatcaatatatgatttggttgtcggtgatgttgtccctctcaaaattggtgaccaggtccccacagatggtatccttatcagtggtcactccctttccatagatgaatcaagcatgactggagaaagtaaaattgtacacaaagatcagaaatcaccatttctaatgtcaggttgcaaagttgccgatggatatggaacaatgctggtaactgctgttggaattaacactgaatgggggttgctaatggcaagcatatctgaagattcgggtgaagagacaccacttcaggttcgtttgaatggtgtcgctacttttattggaatggttggactttctgttgcccttgcagttcttgttgtacttttggccaggtacttcactgggcatacttataatcctgatggatctgtgcaatatgtgaaagggaatatgggtgtaggccagacgattcgtggaatagttaaaatattcacagtggctgtcaccattgtggtcgtggctgttccagaaggacttccattagctgtcacacttacgcttgctttctcaatgcgcaaaatgatgaaagacaaggctctggtgaggaggctttctgcatgcgaaacgatgggttctgccacaacaatctgcagtgacaagactggcaccttgacgttaaatcagatgactgttgttgaggcatattttggtggaaagaagatggactcacctgataatgctcagatgttatctgctgatgtcacatcgctgattgttgaaggaattgcacagaacacttctggaagcatatttgagcccgagggtggtcaagaaccagaggtgactggatcacctacagaaaaggctatcctgtcttggggactaaagctgggtatgaaattcagtgaaacaagatcgaagtcatctattcttcatgtatttcctttcaactcagagaaaaagcgaggcggggttgcggtgtacctggctggctctgaggtccatatacactggaaaggagcagctgaaattattttggattcatgcacaagctgggttgacactggtggttcgaagcattcaatgactcctgaaaaagttgccgaattcaagaaattcattgaagatatggctgctgctagcctccgctgtgttgcgtttgcctatagaactcatgagatggatgatgttccagacgaagatcggagagaagagtggcaacttcctgaagataacctgattatgcttggaattgtgggaataaaggatccctgccgtccaggagttcgagattctgttcgtttatgtcaggcagctggcattaaggtgcgcatggttactggtgataatcttcaaactgcaagagccattgccctggagtgcgggatacttgatgatcccaatgtgtcagagcctgtcatcattgaagggaaaacattccgggcgctgtcagacttggaaagggaggatgctgctgaaaaaatctcagtgatggggaggtcttcaccaaatgataaacttttacttgttaaggcactgagggcaagaggtcacgttgttgctgttactggagatggcacaaatgatgccccagcactgcatgaggcagatattggtctatcaatggggattcagggaactgaagttgctaaggagagttctgatattattatcttggatgacaattttgcctcggtcgtgagggttgtcaggtggggccgatcggtgtatgcaaacatacaaaagtttatacagttccaactaacagtcaacgtcgcagctctgataatcaatgtagttgctgccgtcagttccggaaacgtgccattgaatgctgttcagttgttgtgggttaacctaattatggacactttgggtgcccttgcattggcgacagaaccacctacaaaccatcttatggagagacccccagtagggagaagggagccattggtaacaaatatcatgtggagaaacttgattatcatggctacgtttcaagtttcagtcctccttagtctcaacttcaaggggataagcctcctgcagttgaaaaatgatgatccagcacatgcagataaagtgaaaaataccttcatattcaacacatttgttctctgccaggtgttcaacgaattcaattcacgtaaaccagatgagctgaatatattcaagggcatttcagggaaccatctttttattggcatcatagtaataacagttatactccaggcgcttatcgttgagttcctcggcaagtttgcctcaacagttaggctaagttggcagctgtggttggtatcgataggtcttgctttcttcagctggccactggcattcgtgggaaagcttattcctattcctaaacgtccattaggagaattctttgcgtgctgctgtaactgtaaggggagcaaacaaggccctgatgacgcaacctctaatggtaaggaagacaacaagcttgagccatgagatatcgcaaggtttggtggctggcaacgatggccttctgctgtttcttgccagggtttgacgtgttggatttgtaattgcccctgattgcgattgtatatatatatacacacacgggttgctcctaggatctgttatacgggcaacatcaatttcataatcatagagattttcctcttagtcttcatttaccgagttcattgcgaatatgattaaacttgtcttgtctgaatctgaatctataacgagagttgggctatggtacccttctggagctgaccatgagtaggatgtcctgagatcttggacatcctgtgatgaaagtctgggaagattttagggccggttttaggttggcttcaaagcttgagctgacctcaattgtctattaaggagagtagcatttacgagtctagtgatgaatttatttggtctataaactggttagaagacaatctgtaatttgtagtctcctgacatccaatagaattcaggagtggtgtaccgactctgcctctcgttctcaac

SEQ ID NO: 216525 - DNA, 3981 bp, Zea Mays
gaccgcgccgcgtctgcctcccctcctcgatacttgcgttgcgtgaattaccagtaccaggtatagtcctcttcttcttgcgcggtggctgcgccgccgtagtcgtagtcggcgcgccttggccggacgccgcagacacacagcctgcctcaccgggtagcgctgctgccaactgtagctaatctggtcttgctggtccccatccctaacaccaaagaatgccaccacttcctcccgatttatcctggcaccaccagctcgaacacgccaacactgcttctccttcattcctgatggtcaatttggcccgttgctagaaatagggccggcagtgttcttcgtccttccccttcttcgttggaacaagcaatacttaacaagtgagatcggcatggcaaccaacaagaccatgacgccctcaatttcgggctgggccgagcgttcgttcgatcgagatgatatggcccaacaatgaactgctctttactttttatttcccttttgtcggaggaagccatgaacgacggcgtcgctaggtcgccgagtcgccgacgctgtcaactccctgcggcatcacaatccatgtcgctctaggcgtgggctaagcatcaagcgacccgacgctcgccgaatcaacagcagcgccagcgaaaatcggaccctagcgacgctctccgaccaaaccaagcagcggcgcggccacttcagcgctcaggcagtggctcggccacatccaggagagggccagtggggaaggcgcggcgccaaatcgaggaggggtcgccgccagggcggctggacggcgccggctcgccggctccccgtggccaggcggccagccgcctccgtagccgctcctgacatctctgcgttgctgcaacagcatacggctgcatggcgcacagcggcacaagtacagccgcacaggcacacgaaacctcatttgccacaccaaagctcaaccaggatgttcccgtgggagatggacattgatggagagtcgagcaaaactctgggacagatggaagacctggaaaaaattccattggagaatgagagttgtggcatttgtagagacatcgtcatcgacagaggagttttggattgttgctcacactggttttgctatacatgtattgacaactgggccgccatcacaaatcggtgccccctttgcaaaagtgaattccaacacataacatgcactccagtatatggtacgattggagctactgacgaagatgaatactctttaaccagctgtgatgatgattggtatgggcaagaggaaagcagcacactttccttcccgtcatactatattgatgcagaagccgtagtttgtttggatgatggtgattgcaagattcggaatggacttgtggcagctgaggatgattcaactttagatacatctattgcttgtgattcctgtgataaatggtaccatgctatttgtgtggcgttcaatgcaacaatggcatctgacagttcatggctctgcccaagatgcaagtttaacgaagtggaatatgaggcaaatgtaatcttgaagcaaaaccttggtgaggactgtgtgattggttctgataggacatgtaccaacgcatcattttctgggagggtgtcagtatctgttgctgatgagggagaaactgcccttgttgtatcaatggtgggtgcacattctgaaactaggggtggtctatcagaagcttcactaggacttgagacagcacatgaaacatttaactgcagtccatacccaagccattcaaaagatgtccttgttgcagatgctagttccttgaggaacacagatattgtcagtagatcccagaataaaccttctgaaataaatgttgtccacactctttgttctgagcctacagaaacatcactacaattttcaccaatacgtgagccagcaacaaccatatttagctcagagcaggataacatgtcaactgaacggttggaagtgccaaagcttgtgtcatcttgtccagtagtagataacagcaaggaggctaaaagtactggagaggagaatgcagcgcagcaaagcaataatgaattatcttctgtaatcaaatctccacaacctgcctcatcagatgcagttcatcagatgaaaactgcacaaaacctacagttgccacttaggcatgatgagcatagtagcgatgacaggaaagaagaacacattgaatctggaaatgaaatgatccatcctgcgaagaaagcaaaactggaagtgcaagaggacattaatgtaatcggaaactttgatttttcttcaatacatagtcatactactagtcctgcaaaagctattaccgacgacattatgtcagagtctgttgcacaacagaaatccattcctgatataatgagcattgttgacggtgaggtttacagaagggatcctggtagagagctggctaaacctgtaggaagaagagcaggagataagcctggtcctagagtgaaaaagatcttccgaaaggaagaaggaaaagaatcatctgccttggttcaaaagctacagaaagagattaaggaagtagttagagatacaggcacaaatatacttgagaaggatgaatcttttgatgaaaaactgttgactgcgttccgggcagctatagggaaatcagtggatggaccagccaaaagtactaacaccaatcaattaataagaacaaggaggtcattgcttcagaagggcaagaaacgtgagaatttgaccaaaaagttgtatggaacatctacaggaagaagaagaagcgattggcatcgtgattgggaagttgaattctggaaataccgttgctccccaggaataaatcctgaaaagattgagacattgcaatcagtacttcagctactaaagaaatcctctgaaatggacaaggaaagtgctaaggggaaaagggaagagaacaacaacagttccattttgtctaggttgtatttagctgatgcatcagttgttcccaggaaggatgatattaggcctctctctgcccttgcaggatgtgcgccattagaaaaaagtagccaaattaaagctagttgtaacaaatcgtctagcatacctgcaggaggcaacgagacaatgaaaatcagttcacccagcagcactgggaaagcatcaagctattcaattctgaataaagaggcacctagcagaagagaaaatagaaatagccagccctcccaggacaagagaaaccaatcctctggtgatatcaagcaggacaaaagaaaatgggctcttgagatcctggcaagaaaaaatgccagttctattacaaataaagatcaaactggaggcaatgatgctcttaagggaaacttccctctactggcacaacttccggttgatatgaggccgcagctggcagctggcagcaacaaaaaggttccggtatcagttagacaggcacaatttcaccgaattgctgagcattatttgcagaaagcaaatttggatgtcattcgcagatgtgcagatactgaattggccattgctgatgctgtcaatgtagaaaagggtatttatgaaaggtcaaatagcaaatcaatttatgtgaatctttgctctcaggctactcgccagcatgccaaggcaaaatctgataatgacacttcaactctaaccaaaaggactgaatcaggcagtgatcagatatcacaggaagctacatctgagggtaccaatgttagtggcagtgatatggaagaggatctaaacagagcagctatctccaatcaaaagaatgaactagaggatgatactgccccagaacatattgtgcacaaggatactgttagcttcaacagtgcagaagacgcactaaggaaagcgggcctttttgattcccctcctaacagtcctgagagagggaacacggcggttgaaggtaactctgaatccacggcagtttctaattgtcctaagttttcacaaaagaa

SEQ ID NO: 216526 - DNA, 4044 bp, Zea Mays
gtctgcctcccctcctcgatacttgcgttgcgtgaattaccagtaccaggtatagtcctcttcttcttgcgcggtggctgcgccgccgtagtcgtagtcggcgcgccttggccggacgccgcagacacacagcctgcctcaccgggtagcgctgctgccaactgtagctaatctggtcttgctggtccccatccctaacaccaaagaatgccaccacttcctcccgatttatcctggcaccaccagctcgaacacgccaacactgcttctccttcattcctgatggtcaatttggcccgttgctagaaatagggccggcagtgttcttcgtccttccccttcttcgttggaacaagcaatacttaacaagtgagatcggcatggcaaccaacaagaccatgacgccctcaatttcgggctgggccgagcgttcgttcgatcgagatgatatggcccaacaatgaactgctctttactttttatttcccttttgtcggaggaagccatgaacgacggcgtcgctaggtcgccgagtcgccgacgctgtcaactccctgcggcatcacaatccatgtcgctctaggcgtgggctaagcatcaagcgacccgacgctcgccgaatcaacagcagcgccagcgaaaatcggaccctagcgacgctctccgaccaaaccaagcagcggcgcggccacttcagcgctcaggcagtggctcggccacatccaggagagggccagtggggaaggcgcggcgccaaatcgaggaggggtcgccgccagggcggctggacggcgccggctcgccggctccccgtggccaggcggccagccgcctccgtagccgctcctgacatctctgcgttgctgcaacagcatacggctgcatggcgcacagcggcacaagtacagccgcacaggcacacgaaagtgagcgcgcctccgcggtccccgtccacccccagcaccccctctgacgtgcttgccggcgagttgcgtactggcctcatttgccacaccaaagctcaaccaggatgttcccgtgggagatggacattgatggagagtcgagcaaaactctgggacagatggaagacctggaaaaaattccattggagaatgagagttgtggcatttgtagagacatcgtcatcgacagaggagttttggattgttgctcacactggttttgctatacatgtattgacaactgggccgccatcacaaatcggtgccccctttgcaaaagtgaattccaacacataacatgcactccagtatatggtacgattggagctactgacgaagatgaatactctttaaccagctgtgatgatgattggtatgggcaagaggaaagcagcacactttccttcccgtcatactatattgatgcagaagccgtagtttgtttggatgatggtgattgcaagattcggaatggacttgtggcagctgaggatgattcaactttagatacatctattgcttgtgattcctgtgataaatggtaccatgctatttgtgtggcgttcaatgcaacaatggcatctgacagttcatggctctgcccaagatgcaagtttaacgaagtggaatatgaggcaaatgtaatcttgaagcaaaaccttggtgaggactgtgtgattggttctgataggacatgtaccaacgcatcattttctgggagggtgtcagtatctgttgctgatgagggagaaactgcccttgttgtatcaatggtgggtgcacattctgaaactaggggtggtctatcagaagcttcactaggacttgagacagcacatgaaacatttaactgcagtccatacccaagccattcaaaagatgtccttgttgcagatgctagttccttgaggaacacagatattgtcagtagatcccagaataaaccttctgaaataaatgttgtccacactctttgttctgagcctacagaaacatcactacaattttcaccaatacgtgagccagcaacaaccatatttagctcagagcaggataacatgtcaactgaacggttggaagtgccaaagcttgtgtcatcttgtccagtagtagataacagcaaggaggctaaaagtactggagaggagaatgcagcgcagcaaagcaataatgaattatcttctgtaatcaaatctccacaacctgcctcatcagatgcagttcatcagatgaaaactgcacaaaacctacagttgccacttaggcatgatgagcatagtagcgatgacaggaaagaagaacacattgaatctggaaatgaaatgatccatcctgcgaagaaagcaaaactggaagtgcaagaggacattaatgtaatcggaaactttgatttttcttcaatacatagtcatactactagtcctgcaaaagctattaccgacgacattatgtcagagtctgttgcacaacagaaatccattcctgatataatgagcattgttgacggtgaggtttacagaagggatcctggtagagagctggctaaacctgtaggaagaagagcaggagataagcctggtcctagagtgaaaaagatcttccgaaaggaagaaggaaaagaatcatctgccttggttcaaaagctacagaaagagattaaggaagtagttagagatacaggcacaaatatacttgagaaggatgaatcttttgatgaaaaactgttgactgcgttccgggcagctatagggaaatcagtggatggaccagccaaaagtactaacaccaatcaattaataagaacaaggaggtcattgcttcagaagggcaagaaacgtgagaatttgaccaaaaagttgtatggaacatctacaggaagaagaagaagcgattggcatcgtgattgggaagttgaattctggaaataccgttgctccccaggaataaatcctgaaaagattgagacattgcaatcagtacttcagctactaaagaaatcctctgaaatggacaaggaaagtgctaaggggaaaagggaagagaacaacaacagttccattttgtctaggttgtatttagctgatgcatcagttgttcccaggaaggatgatattaggcctctctctgcccttgcaggatgtgcgccattagaaaaaagtagccaaattaaagctagttgtaacaaatcgtctagcatacctgcaggaggcaacgagacaatgaaaatcagttcacccagcagcactgggaaagcatcaagctattcaattctgaataaagaggcacctagcagaagagaaaatagaaatagccagccctcccaggacaagagaaaccaatcctctggtgatatcaagcaggacaaaagaaaatgggctcttgagatcctggcaagaaaaaatgccagttctattacaaataaagatcaaactggaggcaatgatgctcttaagggaaacttccctctactggcacaacttccggttgatatgaggccgcagctggcagctggcagcaacaaaaaggttccggtatcagttagacaggcacaatttcaccgaattgctgagcattatttgcagaaagcaaatttggatgtcattcgcagatgtgcagatactgaattggccattgctgatgctgtcaatgtagaaaagggtatttatgaaaggtcaaatagcaaatcaatttatgtgaatctttgctctcaggctactcgccagcatgccaaggcaaaatctgataatgacacttcaactctaaccaaaaggactgaatcaggcagtgatcagatatcacaggaagctacatctgagggtaccaatgttagtggcagtgatatggaagaggatctaaacagagcagctatctccaatcaaaagaatgaactagaggatgatactgccccagaacatattgtgcacaaggatactgttagcttcaacagtgcagaagacgcactaaggaaagcgggcctttttgattcccctcctaacagtcctgagagagggaacacggcggttgaaggtaactctgaatccacggcagtttctaattgtcctaagttttcacaaaagaa

SEQ ID NO: 216527 - DNA, 4036 bp, Zea Mays
ctgcctcccctcctcgatacttgcgttgcgtgaattaccagtaccaggtatagtcctcttcttcttgcgcggtggctgcgccgccgtagtcgtagtcggcgcgccttggccggacgccgcagacacacagcctgcctcaccgggtagcgctgctgccaactgtagctaatctggtcttgctggtccccatccctaacaccaaagaatgccaccacttcctcccgatttatcctggcaccaccagctcgaacacgccaacactgcttctccttcattcctgatggtcaatttggcccgttgctagaaatagggccggcagtgttcttcgtccttccccttcttcgttggaacaagcaatacttaacaagtgagatcggcatggcaaccaacaagaccatgacgccctcaatttcgggctgggccgagcgttcgttcgatcgagatgatatggcccaacaatgaactgctctttactttttatttcccttttgtcggaggaagccatgaacgacggcgtcgctaggtcgccgagtcgccgacgctgtcaactccctgcggcatcacaatccatgtcgctctaggcgtgggctaagcatcaagcgacccgacgctcgccgaatcaacagcagcgccagcgaaaatcggaccctagcgacgctctccgaccaaaccaagcagcggcgcggccacttcagcgctcaggcagtggctcggccacatccaggagagggccagtggggaaggcgcggcgccaaatcgaggaggggtcgccgccagggcggctggacggcgccggctcgccggctccccgtggccaggcggccagccgcctccgtagccgctcctgacatctctgcgttgctgcaacagcatacggctgcatggcgcacagcggcacaagtacagccgcacaggcacacgaaagtgagcgcgcctccgcggtccccgtccacccccagcaccccctctgacgtgcttgccggcgagttgcgtactggcctcatttgccacaccaaagctcaaccaggatgttcccgtgggagatggacattgatggagagtcgagcaaaactctgggacagatggaagacctggaaaaaattccattggagaatgagagttgtggcatttgtagagacatcgtcatcgacagaggagttttggattgttgctcacactggttttgctatacatgtattgacaactgggccgccatcacaaatcggtgccccctttgcaaaagtgaattccaacacataacatgcactccagtatatggtacgattggagctactgacgaagatgaatactctttaaccagctgtgatgatgattggtatgggcaagaggaaagcagcacactttccttcccgtcatactatattgatgcagaagccgtagtttgtttggatgatggtgattgcaagattcggaatggacttgtggcagctgaggatgattcaactttagatacatctattgcttgtgattcctgtgataaatggtaccatgctatttgtgtggcgttcaatgcaacaatggcatctgacagttcatggctctgcccaagatgcaagtttaacgaagtggaatatgaggcaaatgtaatcttgaagcaaaaccttggtgaggactgtgtgattggttctgataggacatgtaccaacgcatcattttctgggagggtgtcagtatctgttgctgatgagggagaaactgcccttgttgtatcaatggtgggtgcacattctgaaactaggggtggtctatcagaagcttcactaggacttgagacagcacatgaaacatttaactgcagtccatacccaagccattcaaaagatgtccttgttgcagatgctagttccttgaggaacacagatattgtcagtagatcccagaataaaccttctgaaataaatgttgtccacactctttgttctgagcctacagaaacatcactacaattttcaccaatacgtgagccagcaacaaccatatttagctcagagcaggataacatgtcaactgaacggttggaagtgccaaagcttgtgtcatcttgtccagtagtagataacagcaaggaggctaaaagtactggagaggagaatgcagcgcagcaaagcaataatgaattatcttctgtaatcaaatctccacaacctgcctcatcagttcatcagatgaaaactgcacaaaacctacagttgccacttaggcatgatgagcatagtagcgatgacaggaaagaagaacacattgaatctggaaatgaaatgatccatcctgcgaagaaagcaaaactggaagtgcaagaggacattaatgtaatcggaaactttgatttttcttcaatacatagtcatactactagtcctgcaaaagctattaccgacgacattatgtcagagtctgttgcacaacagaaatccattcctgatataatgagcattgttgacggtgaggtttacagaagggatcctggtagagagctggctaaacctgtaggaagaagagcaggagataagcctggtcctagagtgaaaaagatcttccgaaaggaagaaggaaaagaatcatctgccttggttcaaaagctacagaaagagattaaggaagtagttagagatacaggcacaaatatacttgagaaggatgaatcttttgatgaaaaactgttgactgcgttccgggcagctatagggaaatcagtggatggaccagccaaaagtactaacaccaatcaattaataagaacaaggaggtcattgcttcagaagggcaagaaacgtgagaatttgaccaaaaagttgtatggaacatctacaggaagaagaagaagcgattggcatcgtgattgggaagttgaattctggaaataccgttgctccccaggaataaatcctgaaaagattgagacattgcaatcagtacttcagctactaaagaaatcctctgaaatggacaaggaaagtgctaaggggaaaagggaagagaacaacaacagttccattttgtctaggttgtatttagctgatgcatcagttgttcccaggaaggatgatattaggcctctctctgcccttgcaggatgtgcgccattagaaaaaagtagccaaattaaagctagttgtaacaaatcgtctagcatacctgcaggaggcaacgagacaatgaaaatcagttcacccagcagcactgggaaagcatcaagctattcaattctgaataaagaggcacctagcagaagagaaaatagaaatagccagccctcccaggacaagagaaaccaatcctctggtgatatcaagcaggacaaaagaaaatgggctcttgagatcctggcaagaaaaaatgccagttctattacaaataaagatcaaactggaggcaatgatgctcttaagggaaacttccctctactggcacaacttccggttgatatgaggccgcagctggcagctggcagcaacaaaaaggttccggtatcagttagacaggcacaatttcaccgaattgctgagcattatttgcagaaagcaaatttggatgtcattcgcagatgtgcagatactgaattggccattgctgatgctgtcaatgtagaaaagggtatttatgaaaggtcaaatagcaaatcaatttatgtgaatctttgctctcaggctactcgccagcatgccaaggcaaaatctgataatgacacttcaactctaaccaaaaggactgaatcaggcagtgatcagatatcacaggaagctacatctgagggtaccaatgttagtggcagtgatatggaagaggatctaaacagagcagctatctccaatcaaaagaatgaactagaggatgatactgccccagaacatattgtgcacaaggatactgttagcttcaacagtgcagaagacgcactaaggaaagcgggcctttttgattcccctcctaacagtcctgagagagggaacacggcggttgaaggtaactctgaatccacggcagtttctaattgtcctaagttttcacaaaagaa

SEQ ID NO: 216528 - DNA, 4296 bp, Zea Mays
cgcaaaaacgttgccgtctaaccggcgtacggtagaatcgaacatgaaattcttccgcctccgcccgccggtcgccagagcccggagggagagcgctgagaagcagcggtagctggggaccgggggctcagcttcatcatttcccaaagcccccgagctagcagagggagtggtgcgagggtctcattggacgatttggttcttcaaacaagaagaacatcaccatacttaagaatgtcaatggtatcctcaagccatccaggatgacacttcttcttgggcctccatcctcggggaagagcacactcatgcgggcactcgccggcaagcttgacaaaaatctcaaggtctctggcagcattacgtattgtggccatccaatttcagagttctatcctgagaggactagcgcgtatgttggtcaatatgatctccacaatgccgagatgaccgtaagagagacactggatttctccaggcggtgcctaggcattggtgccagatatgagatgatcgccgaacttgctagaagggagcgggatgcaggcatcaagccagatcccgagattgatgctttcatgaaagctactgcagtacaaggacaggagactaatattataactgatctcactctcaaggtgcttgggctggacatttgtgctgacgttattattggcgatgagatgatcagaggaatttctggcgggcaaaagaaacgtgtgacaactggggagatgctaacggggccagcaagggctttatttatggacgaaatatccactggtctggatagctcgagcacatttgagattgtaaagtttatgaggcagttggtccatgtaatgagtgaaaccgtcatgatctctctgctccagccaccgccagagacatacaatctttttgatgacataatcctgctatcagaaggatacatagtgtaccatgggccgcgcgagaatatcctagaattctttgagtctgccggtttccggtgccctgacaggaaaggtgtcgcagactttcttcaagaggttacttccaagaaagaccaacaacaatactggtatcttgatcaggagcagtatcattatgtatctgtacccgactttgcagaacgtttcaaatcattccatgcatgccagcagatgcagaaggagttgcaaataccttttgaaaagtccaaaactcatcctgctgcgttgaccaccagaaaatatgggctttccagctgggaatcactcaaggcagtgatgtcaagagagcagctattgatgaagcgcaactctttcatctatattttcaaggtcacccagttgatcatccttgcactcatgtccatgactgtgtttctcagaataaagatgccccatgggcagattgctgatggcaccaaattctttggggctctgacttttggtttaataacaatcatgttcaatgggttcgctgagctacaattaaccataaagaagcttccagttttctacaaacatagggatttcttattcttccccgcttggaccttaggagtggcaaacataatcttaaaagttcctgtctcgttcgtggaatcagcagtatgggttgttctcacgtactatgtgatgggctttgcacctgctgcaggaaggttctttcgtcagtttatagctttctttgccacacaccaaatggcaatggctttattccggtttcttggtgctgttttgaaaacaatggttgtggccaatacttttgggatgtttgtgctgctcattattttcatctttggaggatttgtcatccgtagaaatgacatcagaccatggtggatctggggttactgggcatcacctatgatgtatagccaaaatgcaatatcggtcaacgaattccttgccagtaggtgggctattccaaacaatgacacgactatcgacgcgccaacagtaggcaaagcaattcttaaatccaaaggcttgtttactggagaatggggattttggctttccattggagccctcataggattcattattttgttcaacatgctctacctttgggcccttacatatttaagtcctagtagtggctccaatgccctggtttcagaaggtgaggatgatgtaaatgaaatggcattggaaggaagaaggaaagatgcaagaagaagcaaagatgaaatatcccaagttgtatccagtgatccaggcactaatggaggaacaaacacgctagctcaatcacgagtcactttgcctttccagcctcttgcactttgctttaaccatgtaaactattacgtcgacatgcctgcagaaatgaaggaacaaggattcacagaaagccgtttacaactactctctgatatcagtggcacttttaggccaggggttctaacagcactggttggtgtgagtggagctggaaagaccactttaatggatgtcctggcaggaaggaaaactagtggagctattgaaggagatattaccctgtcgggataccccaaaaaacaagaaacttttgcccggattagtggttattgtgaacaaactgatatccattctccaaatgttactgtatttgaatccatcacctactctgcttggttgcgtctttcctcagatattgatgatggtacaaaaaagatgtttgtggaggaagtgatggcccttgtagagcttgatgtgttgcgcgacgctctagtgggtctccctggagttagtgggttatcaactgagcaaagaaaaaggctgacaattgctgtggagctggtagcaaacccttcaatcatcttcatggatgaaccaacttctggtcttgatgctcgagctgcggcaattgtcatgcgtacagtaagaaatacggttaacactgggcgtactgtggtctgcacaatccatcagcccagcatcgacatatttgagtcttttgatgagcttctgcttttgaaacgtggaggtcaggttatttatgctggtgaacttggtcgccactctcacaaactagttgaatattttgaggcgattccaggtgttccaaagatcacagaaggatataatcctgcaacatgggtgctggaagttagttctcctctatctgaggctcgattgaacatgaattttgctgaaatttatgcaagctctgtgctttataggaaaaatcaagaggttatcaaggagttgagtattccccgatcagacaaccaggacctgtcatttcctacaaaatattcacagaatttctacggtcaatgtgccgcaaacttttggaagcaataccgttcgtactggaagaatccaccctacaatgctatgcgctatctgatgacatgtctctttggccttgtatttggtacagtattttggcaaaaaggaaagaacatagattcacaacaagatttatataatctgcttggagccacttacgctgctacattctttcttggggcttcaaattgcatcacggttcagcctgttgtatcgattgagcgagcagttttctaccgtgagaaggcagcggggatgtactctccgttatcctatgcatttgctcagacatgtgtggaggtcatctacaccatcttacaggggatactgtacacagtcatcatatatgcgatgatcggatatgactggaaagcggataaattcttctatttcctgtttttcatcactgcaagcttcaactacttcacattgttcggcatgatgttggtagcatgcactccctccgcattgctcgcgaacattctcatcacgtttgctctacctctgtggaacctctttgctggattcctcatcgttagaccggcaataccaatttggtggaggtggtactactgggcgaaccctgtgtcgtggaccatctatggcgttgttgcgtctcagtttggcgagaacgaaggtgagctttcagttcccggtgggacgcccgtggtggtgaagcagttcttgaaggataatctcggcatccagcatgacttactcggctatgttgtgctcgtccatttcgcctacgtcattgtgttcttcttcgtattcggttattccatcaagttcttcaacttccagaaacgttagcgggatcatttgtatgtaattaatcggtcgccgtaagttctagttctagttctagttctagtcaaagcaagtgcttgttttgggaggaagcctgtatgcaagtagcagtgtattcctcttgtttcttcaatgcaaaaatattaaaaggaagatgacgaatgcaaaagtgacatgtcttgttccttttcttcttgagtaatctgtgaggctaagagcagccgcagtgtgacgg

SEQ ID NO: 216529 - DNA, 4297 bp, Zea Mays
tcgaacatgaaattcttccgcctccgcccgccggtcgccagagcccggagggagagcgctgagaagcagcggtagctggggaccgggggctcagcttcatcatttcccaaagcccccgagctagcagagggagtggtgcgaggtacatcgaatgggggggaattaggtcatggatgcgagggtctcattggacgatttggttcttcaaacaagaagaacatcaccatacttaagaatgtcaatggtatcctcaagccatccaggatgacacttcttcttgggcctccatcctcggggaagagcacactcatgcgggcactcgccggcaagcttgacaaaaatctcaaggtctctggcagcattacgtattgtggccatccaatttcagagttctatcctgagaggactagcgcgtatgttggtcaatatgatctccacaatgccgagatgaccgtaagagagacactggatttctccaggcggtgcctaggcattggtgccagatatgagatgatcgccgaacttgctagaagggagcgggatgcaggcatcaagccagatcccgagattgatgctttcatgaaagctactgcagtacaaggacaggagactaatattataactgatctcactctcaaggtgcttgggctggacatttgtgctgacgttattattggcgatgagatgatcagaggaatttctggcgggcaaaagaaacgtgtgacaactggggagatgctaacggggccagcaagggctttatttatggacgaaatatccactggtctggatagctcgagcacatttgagattgtaaagtttatgaggcagttggtccatgtaatgagtgaaaccgtcatgatctctctgctccagccaccgccagagacatacaatctttttgatgacataatcctgctatcagaaggatacatagtgtaccatgggccgcgcgagaatatcctagaattctttgagtctgccggtttccggtgccctgacaggaaaggtgtcgcagactttcttcaagaggttacttccaagaaagaccaacaacaatactggtatcttgatcaggagcagtatcattatgtatctgtacccgactttgcagaacgtttcaaatcattccatgcatgccagcagatgcagaaggagttgcaaataccttttgaaaagtccaaaactcatcctgctgcgttgaccaccagaaaatatgggctttccagctgggaatcactcaaggcagtgatgtcaagagagcagctattgatgaagcgcaactctttcatctatattttcaaggtcacccagttgatcatccttgcactcatgtccatgactgtgtttctcagaataaagatgccccatgggcagattgctgatggcaccaaattctttggggctctgacttttggtttaataacaatcatgttcaatgggttcgctgagctacaattaaccataaagaagcttccagttttctacaaacatagggatttcttattcttccccgcttggaccttaggagtggcaaacataatcttaaaagttcctgtctcgttcgtggaatcagcagtatgggttgttctcacgtactatgtgatgggctttgcacctgctgcaggaaggttctttcgtcagtttatagctttctttgccacacaccaaatggcaatggctttattccggtttcttggtgctgttttgaaaacaatggttgtggccaatacttttgggatgtttgtgctgctcattattttcatctttggaggatttgtcatccgtagaaatgacatcagaccatggtggatctggggttactgggcatcacctatgatgtatagccaaaatgcaatatcggtcaacgaattccttgccagtaggtgggctattccaaacaatgacacgactatcgacgcgccaacagtaggcaaagcaattcttaaatccaaaggcttgtttactggagaatggggattttggctttccattggagccctcataggattcattattttgttcaacatgctctacctttgggcccttacatatttaagtcctagtagtggctccaatgccctggtttcagaaggtgaggatgatgtaaatgaaatggcattggaaggaagaaggaaagatgcaagaagaagcaaagatgaaatatcccaagttgtatccagtgatccaggcactaatggaggaacaaacacgctagctcaatcacgagtcactttgcctttccagcctcttgcactttgctttaaccatgtaaactattacgtcgacatgcctgcagaaatgaaggaacaaggattcacagaaagccgtttacaactactctctgatatcagtggcacttttaggccaggggttctaacagcactggttggtgtgagtggagctggaaagaccactttaatggatgtcctggcaggaaggaaaactagtggagctattgaaggagatattaccctgtcgggataccccaaaaaacaagaaacttttgcccggattagtggttattgtgaacaaactgatatccattctccaaatgttactgtatttgaatccatcacctactctgcttggttgcgtctttcctcagatattgatgatggtacaaaaaagatgtttgtggaggaagtgatggcccttgtagagcttgatgtgttgcgcgacgctctagtgggtctccctggagttagtgggttatcaactgagcaaagaaaaaggctgacaattgctgtggagctggtagcaaacccttcaatcatcttcatggatgaaccaacttctggtcttgatgctcgagctgcggcaattgtcatgcgtacagtaagaaatacggttaacactgggcgtactgtggtctgcacaatccatcagcccagcatcgacatatttgagtcttttgatgagcttctgcttttgaaacgtggaggtcaggttatttatgctggtgaacttggtcgccactctcacaaactagttgaatattttgaggcgattccaggtgttccaaagatcacagaaggatataatcctgcaacatgggtgctggaagttagttctcctctatctgaggctcgattgaacatgaattttgctgaaatttatgcaagctctgtgctttataggaaaaatcaagaggttatcaaggagttgagtattccccgatcagacaaccaggacctgtcatttcctacaaaatattcacagaatttctacggtcaatgtgccgcaaacttttggaagcaataccgttcgtactggaagaatccaccctacaatgctatgcgctatctgatgacatgtctctttggccttgtatttggtacagtattttggcaaaaaggaaagaacatagattcacaacaagatttatataatctgcttggagccacttacgctgctacattctttcttggggcttcaaattgcatcacggttcagcctgttgtatcgattgagcgagcagttttctaccgtgagaaggcagcggggatgtactctccgttatcctatgcatttgctcagacatgtgtggaggtcatctacaccatcttacaggggatactgtacacagtcatcatatatgcgatgatcggatatgactggaaagcggataaattcttctatttcctgtttttcatcactgcaagcttcaactacttcacattgttcggcatgatgttggtagcatgcactccctccgcattgctcgcgaacattctcatcacgtttgctctacctctgtggaacctctttgctggattcctcatcgttagaccggcaataccaatttggtggaggtggtactactgggcgaaccctgtgtcgtggaccatctatggcgttgttgcgtctcagtttggcgagaacgaaggtgagctttcagttcccggtgggacgcccgtggtggtgaagcagttcttgaaggataatctcggcatccagcatgacttactcggctatgttgtgctcgtccatttcgcctacgtcattgtgttcttcttcgtattcggttattccatcaagttcttcaacttccagaaacgttagcgggatcatttgtatgtaattaatcggtcgccgtaagttctagttctagttctagttctagtcaaagcaagtgcttgttttgggaggaagcctgtatgcaagtagcagtgtattcctcttgtttcttcaatgcaaaaatattaaaaggaagatgacgaatgcaaaagtgacatgtcttgttccttttcttcttgagtaatctgtgaggctaagagcagccgcagtgtgacgg

SEQ ID NO: 216530 - DNA, 1646 bp, Zea Mays
gccgaagccctgggtgcgctatccgcgaccgcgacgatgggtctgcgcgtggccgccaccgcgccagctccggccggcgtgcgcgtgctcggcaggggcgccgcgcgcgtgacgccgcgaccgtgggcggctgtcggcggcaggagacgcttctccgtgcggatgtccgtcgcgaccaccgaggccaccaccaccatcgccgtgggcgcctcggaggaccaggcgctggaggctaggaactccaagacggtggtggcggtcatcctcggcggtggcgccgggaccaggctcttcccgcttaccagacgcagggccaagcccgcggtgccaattggcggcgcgtacaggctcatcgacgtgccgatgagcaactgcataaacagcgggatcaacaaggtctacatcctcacgcagttcaactcgcaatccctcaatcgccacctctccagagcctacgatttcagcaatggcgtggccatcggagacggattcgtcgaggttctagcagcaacccagaggcctggaacggaggggaaaaggtggtttcagggtactgctgatgcagttcggcagttcgactggcttttcgatgatgcaaaatctaaagacattgaagatgtgctgattctttctggtgaccatctctaccgtatggactacatggactttgttcagagtcatcggcaaagaggtgcaggcatcagcatctgttgtttgccaattgatggcagccgggcatctgattttggcctaatgaagatagacgacactggaagggtaatttcattcagtgagaaaccaaaaggagacgaattaaaggcaatgcaagttgacaccacagtgcttggcttatcaaaggaggaagcagaaaacaaaccttatatagcttcaatggggatctatatttttaagaaagacatactcctaaaccttctaagatggcgttttcccactgcaaatgattttggttctgaaataattcctgcttcagcaaaagaaatcgatgtaaaggcttatcttttcaatgattactgggaagatattggaactattaagtccttctttgaggcaaaccttgctcttgctgaacagcctccaaggttcagtttctacgatgctgacaaaccaatgtatacatcacggagaaacctaccaccatctatggtcaacaatagtaagatcactgattcaatcatttcccacggatgtttcttggataactgcaggatagaacatagtgttgttggagttcgttctcggataggctccaatgtgcacctcaaggatactgtaatgcttggcgctgattattatgaaactgccgtggaaagaggagagctgcttgcagaaggaaaagttcctattgggattggagagaatacaacgattcaaaagtgtatcatagacaagaatgcgaggatagggaagaaagtggtaatctccaactctgaaggtgtagatgaagctgatagaacttccgaaggcttctacattcgatctggcatcactgtcgtactgaagaacgcgataattgctgatggattggtcatatgagctgaaaaggtctcacaggacggctaaattccatcgatttcgcggcacttggggctggttcaaaattaaagtagctgctattctacttactt

SEQ ID NO: 216531 - DNA, 684 bp, Zea Mays
ctcgcatgcccccgctcgcctgcgcctcccacgcccacacacccagccaccgccgaccacgctcgcggatctcgcccacaacaacgcgtgaccgagcccccgccgtgtctccttccatcctcgcgtatacgtcggcgtctccttccatatatgccaacggaggcgaccgcggaggccgctcccccgcgtgcacaacatcccgcgttcccctctcccccaggtcctgccgcagcgcgttgctcagtaccccagccactgcccgctagccccccccacacacatacccatcctcgccggcctcagcaccgcaaacgccgcccgcgcgtcacttccccgcccttcaatggtgtcctcctccccatcactcgggggcagcaaggcaaccgatggggacgtgtccaacttcactgccttcctccaggcctcgccgaagtcattcgtggtcgtcgagttcttcacccactggtgcaatggtcaccagcccagaaggtcatggtcgacccacgcgatgcaacccaattggatgaagctgggtttaggggccttcttcgttggtttgactgagtttcttcttagttaaataaacacaaagccgaccatggcagatgttatcggtttcgatctaggcacaccgaattcatgcatctccgtattggaatgaaagtggtggtcaagagattgaag

SEQ ID NO: 216532 - DNA, 710 bp, Zea Mays
ctcgcatgcccccgctcgcctgcgcctcccacgcccacacacccagccaccgccgaccacgctcgcggatctcgcccacaacaacgcgtgaccgagcccccgccgtgtctccttccatcctcgcgtatacgtcggcgtctccttccatatatgccaacggaggcgaccgcggaggccgctcccccgcgtgcacaacatcccgcgttcccctctcccccaggtcctgccgcagcgcgttgctcagtaccccagccactgcccgctagccccccccacacacatacccatcctcgccggcctcagcaccgcaaacgccgcccgcgcgtcacttccccgcccttcaatggtgtcctcctccccatcactcgggggcagcaaggcaaccgatggggacgtgtccaacttcactgccttcctccaggcctcgccgaagtcattcgtggtcgtcgagttcttcacccactggtgcaatggtcaccagcccagaaggtcatggtcgacccacgcgatgcaacccaattggatgaagctgggtttaggggccttcttcgttggtttgactgagtttcttcttagttaaataaagtggggcaatatttcctcaccgacttcacaaagccgaccatggcagatgttatcggtttcgatctaggcacaccgaattcatgcatctccgtattggaatgaaagtggtggtcaagagattgaag

SEQ ID NO: 216533 - DNA, 2674 bp, Zea Mays
atggcctcggatccaaccagggaaggaaggaatccaagccaccccagtccgctgcttccattccatctcccttctctcgccttctgcggcactgcagtgctctgctgcctcggcgtctccacctcctcccggcgacggcagggcatccgatacgacgccgcgcttccttccgaatcccaagccgcaccccgcaccctcccggtcgccattcccgatgctggtgttctcgagcgacgacgactgctgcggctcctcgtactaggggggcaggatcgatcggcagactcgcagaactataggatatcacagaacagttcttgaggtacttattgcagcctaatagtacatggagcgatattcagatatgagaccaaaggcagaagtttcatatctcggaaggggttccagattctcttctagaaatcaaagttcagaagagaggactaaccatagcagcgataaaccgggaagcagcacaagattcaatcctacgaaagcgagaattggcggtaatcaagggaggccaagatatgtatgcgattcatttaaatctccaagctcaaaggtgtcgcctgcaggctcttccaaatttccacttagcaagtttgaggagaggcgaagacagccttttgtgccagggtttgacattgctgaaagtagtagaagaaaggctgatgccaagcagctacagggtagtaagaaaattgctgcagagaacgacagttcagacaatctgcgaggtgaatcagaaggttttactactgaacaagtagtaaaaccagaaggctctcatgttgtcggtcattcaggtgtttctgcgtatacagtcgggtccctggtccaaactgcttcactaggttctaggacacacagacagaaacacaaagaagtgaatttgggtactccaggagcatcgtcttcaactctgactaacaggtctactatacctggaaattctaccatgggtgtgaggccagcttatggtcatgttaatggagggcagatacatggtcttaaaaaccttggttgttcttcggtacctgatgctcagccatcaggttgcccatctgagtctgttattagtaggaggaggtttgagttcatgagaaagagggcctttgaccaggaaagctcttccagatcagtgaacttaagcttaggtcattcaactcctacagatattcgcagaatcagaatgaatgaacaatcactttgtcaacaaataccacgaagcagcagcagaagccatcaggaatcggcaggttcagttaggacaagacgaccttctcctcatgccactaggatgagtgttcctgatggaagagcagatggcgtgctttctctgcacgagtcatccacaaaggatgtacagccagctcaggaacatctttcattggaagaagtctccactgagagttcaataaggccattctttgtggaatttgataataacattttctcgtctagtcatcttcgtcgctcgagtactcgagctgaaaggggaagaccaagctccctttttgaagaaagtcctcgacaaatgttccatagtctcatgggggagagggacagacatagacacataaccatggaaggaattacagaggtttattttctgtaggttttggctgcattggagaggattgaacagcaagcagagctgacctatgatcaattgctaatgctggaggctaatctattttttggcgcctttgcctcctatgatcggcatagagacatgcggatggatattgatgatatgtcctatgaggaattattggccctggaggagagaataggctctgtgagcacagctctttcagaggagcagttcacaaaatgcctcaaaagaagcatatatagtcaggtcgctctagaagtgaacaaatcaaccgttgatgacatgaaatgcatcatctgtcaggaagagtacgcggagggcgaagaggttgggaggctgccatgcgagcaccggtaccatgtgtgctgcataggccagtggcttgggcagaagaactggtgtccagtatgcaaagcgtctgccgtgccttccaagggctgaagcattggggatgctggaaaccccgttccggattacaaaccatccttgcttttgtctacgtacattgttcttttccctatatgcattagatatagatcatgtctagatgtatgacgctagaacagcttgcgatttgggaggaagctaagagagtaatagttagctggttaataatagttcatagctaatatttgctagataactattacttggctacctattagctgtgcctttcacattgtggtacaggacaaatgcttgtcagatcgtgaacaaccttataacttgatgaatggcctaagtcaaagaggaatatgttgtgccaatctcaaccctatgctctcttcgtgtagtctgggtgtgtttggttgcgggacagtcaagaaagggacgttccctgacgttctctctcgtctttctgattttgagggataactggggataacactgtaatagttctgtttcaacccttgatcttgaactaaacaaccttatttgagggatcatctcatcttatctcgtcctgtcattacaaccaatcttgttagaaaataaaaaatgcggtagagatggtatcatagtagttgtacataagacagttcaatctattgt

SEQ ID NO: 216534 - DNA, 1033 bp, Zea Mays
atggcctcggatccaaccagggaaggaaggaatccaagccaccccagtccgctgcttccattccatctcccttctctcgccttctgcggcactgcagtgctctgctgcctcggcgtctccacctcctcccggcgacggcagggcatccgatacgacgccgcgcttccttccgaatcccaagccgcaccccgcaccctcccggtcgccattcccgatgctggtgttctcgagcgacgacgactgctgcggctcctcgtactaggggggcaggatcgatcggcaggaagagtacgcggagggcgaagaggttgggaggctgccatgcgagcaccggtaccatgtgtgctgcataggccagtggcttgggcagaagaactggtgtccagtatgcaaagcgtctgccgtgccttccaagggctgaagcattggggatgctggaaaccccgttccggattacaaaccatccttgcttttgtctacgtacattgttcttttccctatatgcattagatatagatcatgtctagatgtatgacgctagaacagcttgcgatttgggaggaagctaagagagtaatagttagctggttaataatagttcatagctaatatttgctagataactattacttggctacctattagctgtgcctttcacattgtggtacaggacaaatgcttgtcagatcgtgaacaaccttataacttgatgaatggcctaagtcaaagaggaatatgttgtgccaatctcaaccctatgctctcttcgtgtagtctgggtgtgtttggttgcgggacagtcaagaaagggacgttccctgacgttctctctcgtctttctgattttgagggataactggggataacactgtaatagttctgtttcaacccttgatcttgaactaaacaaccttatttgagggatcatctcatcttatctcgtcctgtcattacaaccaatcttgttagaaaataaaaaatgcggtagagatggtatcatagtagttgtacataagacagttcaatctattgt

SEQ ID NO: 216535 - DNA, 3932 bp, Zea Mays
atggcctcggatccaaccagggaaggaaggaatccaagccaccccagtccgctgcttccattccatctcccttctctcgccttctgcggcactgcagtgctctgctgcctcggcgtctccacctcctcccggcgacggcagggcatccgatacgacgccgcgcttccttccgaatcccaagccgcaccccgcaccctcccggtcgccattcccgatgctggtgttctcgagcgacgacgactgctgcggctcctcgtactaggggggcaggatcgatcggcaggtgacgtttcgttcgttctgctgttcggttcgaacgggagagtttgcttgggggttggtgcatcggtttcagaacgaccagttcattagttttggggattggggctatttcttgttttttttaaggcaggagagttgcttttcattctacgtattcgagagatgaaaaaaaagtgttttttgggctagttttgttccaatgatttggtagcaattaccatggcagttgcacgaaagggattcatgtactgggtctgaacggtttcatggcgatgcagtttccatcaccaaattcaccgtgagatgtctggtactcgttgtgactaactcagtaggcagtctgtcagttaagccaggtaaactagttactagtacttgacattgccactgtattttttgtaattactagtaccatttgatgagaagtggtactgagttttatgtgggtagacgaacgatgtcatcgcactcccttctcagtgtcaacgatcatgggtggcatgacctgtgggctgtggagggcggtcccggtccccttcgtttggcttatctggaaaatgctggttgcgcgtcaaggccatcttgaaccttggaaaaacgctgctgtgtctatctttcctgccttcctggttccgtccgtgctgtgctgacatgcgtgtcgaattctcgctcatttggttaccggtagtggggtcatgtcggatattgatgtggaagggggagttggtagtggcaccccctccgcctcggacctggcttcttctgataccggctctggagctgggtaatagagcgcagactttgggtctggaaagcgattgtggttatcgttacgacaagtatgctaggtcaaaactgtttttgtatgtagttggttcacagatgccaagggccgatttatttgtttgtttgttgctcatgttgatgttctgagcataccatttttcagatgtttatatttcatatctgataaagtttataagtttattgtcgtcattaagatgggttaagaaggatgcctgctgtgttttaggatgaggctccatttggaagtcaatagtgcaacactgctcattccaatgatatacccccactacaaacagacacttggtcataattggctttcgcacattcatattcaatgtctcaaacttgttattacgattctgcggatggtctgacaaaaccctgggcatagtgtgattattgacactaatattagttccaaagcatttcattgagtaaaaagaaataatcattctcaatatgtccagactcgcagaactataggatatcacagaacagttcttgaggtacttattgcagcctaatagtacatggagcgatattcagatatgagaccaaaggcagaagtttcatatctcggaaggggttccagattctcttctagaaatcaaagttcagaagagaggactaaccatagcagcgataaaccgggaagcagcacaagattcaatcctacgaaagcgagaattggcggtaatcaagggaggccaagatatgtatgcgattcatttaaatctccaagctcaaaggtgtcgcctgcaggctcttccaaatttccacttagcaagtttgaggagaggcgaagacagccttttgtgccagggtttgacattgctgaaagtagtagaagaaaggctgatgccaagcagctacagggtagtaagaaaattgctgcagagaacgacagttcagacaatctgcgaggtgaatcagaaggttttactactgaacaagtagtaaaaccagaaggctctcatgttgtcggtcattcaggtgtttctgcgtatacagtcgggtccctggtccaaactgcttcactaggttctaggacacacagacagaaacacaaagaagtgaatttgggtactccaggagcatcgtcttcaactctgactaacaggtctactatacctggaaattctaccatgggtgtgaggccagcttatggtcatgttaatggagggcagatacatggtcttaaaaaccttggttgttcttcggtacctgatgctcagccatcaggttgcccatctgagtctgttattagtaggaggaggtttgagttcatgagaaagagggcctttgaccaggaaagctcttccagatcagtgaacttaagcttaggtcattcaactcctacagatattcgcagaatcagaatgaatgaacaatcactttgtcaacaaataccacgaagcagcagcagaagccatcaggaatcggcaggttcagttaggacaagacgaccttctcctcatgccactaggatgagtgttcctgatggaagagcagatggcgtgctttctctgcacgagtcatccacaaaggatgtacagccagctcaggaacatctttcattggaagaagtctccactgagagttcaataaggccattctttgtggaatttgataataacattttctcgtctagtcatcttcgtcgctcgagtactcgagctgaaaggggaagaccaagctccctttttgaagaaagtcctcgacaaatgttccatagtctcatgggggagagggacagacatagacacataaccatggaaggaattacagaggttttggctgcattggagaggattgaacagcaagcagagctgacctatgatcaattgctaatgctggaggctaatctattttttggcgcctttgcctcctatgatcggcatagagacatgcggatggatattgatgatatgtcctatgaggaattattggccctggaggagagaataggctctgtgagcacagctctttcagaggagcagttcacaaaatgcctcaaaagaagcatatatagtcaggtcgctctagaagtgaacaaatcaaccgttgatgacatgaaatgcatcatctgtcaggaagagtacgcggagggcgaagaggttgggaggctgccatgcgagcaccggtaccatgtgtgctgcataggccagtggcttgggcagaagaactggtgtccagtatgcaaagcgtctgccgtgccttccaagggctgaagcattggggatgctggaaaccccgttccggattacaaaccatccttgcttttgtctacgtacattgttcttttccctatatgcattagatatagatcatgtctagatgtatgacgctagaacagcttgcgatttgggaggaagctaagagagtaatagttagctggttaataatagttcatagctaatatttgctagataactattacttggctacctattagctgtgcctttcacattgtggtacaggacaaatgcttgtcagatcgtgaacaaccttataacttgatgaatggcctaagtcaaagaggaatatgttgtgccaatctcaaccctatgctctcttcgtgtagtctgggtgtgtttggttgcgggacagtcaagaaagggacgttccctgacgttctctctcgtctttctgattttgagggataactggggataacactgtaatagttctgtttcaacccttgatcttgaactaaacaaccttatttgagggatcatctcatcttatctcgtcctgtcattacaaccaatcttgttagaaaataaaaaatgcggtagagatggtatcatagtagttgtacataagacagttcaatctattgt

SEQ ID NO: 216536 - DNA, 2446 bp, Zea Mays
cgccacatcattttcttcgtgaggaacctgttgttgggattgaatatgaagcacagttacaaaagactcttcttccccatatttcttctgcggaagtggcaaaatttgcagaaaacttttcaacggccagcagctgtgttatcaagatagttgaacctcgagctcatgcttctttggaggatctgaaagcagttgtgctgaaagtcaacagtatggaagaagataaatctatttttccatgggatgaagaacaaattccagaagaaattgttgcccaagctccagagccagggactataattgctaaagtggagcacccaggcataggtgctactgagatgatactttcaaatggcatgcggatttgttacaagtatactgattttcttgatgaccaggttgtttttactggctttgcctatggtggtctgtcagaattatctgaagctgagtatacttcatgctcaatgggttcgaccatagcaggagaaattggcacttttggctacagaccttctgtcttgatggacatgcttgctggcaagagagccgaagttggtacaaaagtgggggcctacatgagaacattttctggcgattgctcaccttcagatcttgagacagctttgcagcttgtttatcaactatttacaacaaatgtggagccaagggaggaagaagtaaaaatagtgatgcaaatggcagaggaagcaatctatgctcaagagcgcgatccatacacagcatttgcgaatcgtgttcgtgaaataaattatgggaactcatacttttttaagccaattagaataagtgacttgaagaaagtggatccaatcagagcgtgtgaatatttcaacaattgtttcaaggatccatcagcttttacggtggtaatagttggaaaaatagacccagccatctcacttccactggttctgcagtacttgggtggaatacctagggtacaggatgctactcaaccacttagtcgtgatgatctaagaggattgccatttaagtttcctgcaaccatcattagagaagttgtccgcagccctatggttgaagcacagtgctttgtacaactagcatttcctgttgttcttaagaacacaatgatgactgaagatattcactatgttgggtttcttagtaaacttctggaaacaaaaatcatgcaagtacttcgcttcaaatatgggcagatctattcagttaatgtagctgtcttcttggggggcaacaaaccctcaagaactggagatgttcgtggagatataagcgtgaatttctcatgtgatccagacatatcatctaaactggttgattttgttctggaggagatatcatgcctacaaacagaaggtccttctgaagaagatgtattgtccatcctcgaaattgaacaaagagctcatgaaaatggattacaggagaattacttctggttggatcgtattctacggagctatcaatcaaggcttttttctggagatattggatccacctttgcgttccaagaggaggggcgtataaaggttagggatgctttgacaccacagagcatgcaatcagccttgcaacgagttatacctttcccttgcagaaagcagtacactgtggttattcttatgccaaagtcatcctgttgggcgtcagtgaagtcaatgcttagctggagttctaatggggtcagcagagatgctaagatcctcgctggcatggctggtgcactggtgttggcagtgagtttgtggaggtactctcgtagttcgttaaaatcttagtgtttgatacaactgaccgctttttggggacttccagtcagatctgaaaatggatcaggttaggaactgatacgagctgtcggtagatagatatttgttctacctgagcaccgacccggtgttcggagatctggtaacaaaagaggccatactatgacaaatttggtagctaacagattcgttgccgcatgtgtgcgtgcagtcctgtaatctcattcgttgtaccgcggcacatgtgcattagtcgtcggtgtatagtaatgactatcctcccatttgatttcataggcaggactgaagtagtggtcactgaccaccgtggcgggacggtcgaaactggaaacccaacattgtgatagctttactggtccaatttctgtggacggctttgtacctgtacgtttttccgtttcctatgacccagaacgaggaaaaatctataatgagcaggaaatgtgatattcctttatgctgctccgttggttttcatatattggctaggacagcgtccaagggtagcgttgggaaccgcgacgtccaagaaaggatagtgttgaaacttgtgacgtttaaggaggtgtttgtttgagattataatccggctagattatataatcctataaaattttgaactaagtgttagtttaattttttgtgag

SEQ ID NO: 216537 - DNA, 3803 bp, Zea Mays
gtcccaccaccacgccctctcccctcttcccgcaccgcagcgcggcaccggcacctgccaccagcggccatggatctgctcccgccgccgacggacgcgccggatgccggcggccccagcgccggcgggtcaggccgggggctgcgccgcgggatcgggttccggtcgctgaagctggtcagcgttgccatggacgagaccctgcccgtcgaccccgtcggcgccacctacggccgcctcgccaacggcctcacctactacgtccgctcaaacccaaagccacgcatgcgcgccgcgctctcgcttgccgtcaaggtcgggtcggtggtagaggaggaggacgagcgcggtgtggcgcacatcgttgagcacctcgccttcagcgccaccgcgcgatataccaaccacgacatcgtcaagttcctcgagagcataggggccgagttcggtgcctgccagaacgcgctcacctcatcggatgagactatttacgagctgctcgtacccgtcgacaagccaggcctgctctcccaggctatatctgtcctcgcagagttcagctcagaggttagggtgtcagcagaggatctggagaaagagaggggtgctgtgctggaggagtacaggggtggacgcaatgcagcaggccggatgcaggactcccactgggcactgttgtttgatggttctaagtatgcagagcgcctgccaattggtactgagaaggtgatacgaactgttacacatgagaccgtgaagcggttttatcagaagtggtaccatctaagcaatatggcggtatttgcagtgggtgatttcccagatacacaggctgtcgtggagttgataaatgagcattttgggcacaaagctccagctccccaccctcctccagttataccagaattttcagttccatcgcatgaggaaccacgcttttcatgttttgtggaatctgaagctgcagggtcggctgttgttatcagctgcaagatgcctgctggtggaattaaaacagtaaaggactacaaagattcactggcagagtccatgtttcattgtgcgctaaaccagaggctcttcaaaatatctcgtagaaaggatcctccttatttttcttgctcctcagctgcagatgctctcgtctgtccagttaaggcttacattatgacatctagttgtcgggaaaggggaacagttgaagctctcgagtccatgcttcttgaggttgctagggtacggcttcatggattttctgaccgtgagatatccattgtacgcgccctaatgatgtcagagatggaatctgcatatttggagcgtgatcaaatgcaatctaccagcttacgggatgagtttttgcagcattttcttcgtgaggaacctgttgttgggattgaatatgaagcacagttacaaaagactcttcttccccatatttcttctgcggaagtggcaaaatttgcagaaaacttttcaacggccagcagctgtgttatcaagatagttgaacctcgagctcatgcttctttggaggatctgaaagcagttgtgctgaaagtcaacagtatggaagaagataaatctatttttccatgggatgaagaacaaattccagaagaaattgttgcccaagctccagagccagggactataattgctaaagtggagcacccaggcataggtgctactgagatgatactttcaaatggcatgcggatttgttacaagtatactgattttcttgatgaccaggttgtttttactggctttgcctatggtggtctgtcagaattatctgaagctgagtatacttcatgctcaatgggttcgaccatagcaggagaaattggcacttttggctacagaccttctgtcttgatggacatgcttgctggcaagagagccgaagttggtacaaaagtgggggcctacatgagaacattttctggcgattgctcaccttcagatcttgagacagctttgcagcttgtttatcaactatttacaacaaatgtggagccaagggaggaagaagtaaaaatagtgatgcaaatggcagaggaagcaatctatgctcaagagcgcgatccatacacagcatttgcgaatcgtgttcgtgaaataaattatgggaactcatacttttttaagccaattagaataagtgacttgaagaaagtggatccaatcagagcgtgtgaatatttcaacaattgtttcaaggatccatcagcttttacggtggtaatagttggaaaaatagacccagccatctcacttccactggttctgcagtacttgggtggaatacctagggtacaggatgctactcaaccacttagtcgtgatgatctaagaggattgccatttaagtttcctgcaaccatcattagagaagttgtccgcagccctatggttgaagcacagtgctttgtacaactagcatttcctgttgttcttaagaacacaatgatgactgaagatattcactatgttgggtttcttagtaaacttctggaaacaaaaatcatgcaagtacttcgcttcaaatatgggcagatctattcagttaatgtagctgtcttcttggggggcaacaaaccctcaagaactggagatgttcgtggagatataagcgtgaatttctcatgtgatccagacatatcatctaaactggttgattttgttctggaggagatatcatgcctacaaacagaaggtccttctgaagaagatgtattgtccatcctcgaaattgaacaaagagctcatgaaaatggattacaggagaattacttctggttggatcgtattctacggagctatcaatcaaggcttttttctggagatattggatccacctttgcgttccaagaggaggggcgtataaaggttagggatgctttgacaccacagagcatgcaatcagccttgcaacgagttatacctttcccttgcagaaagcagtacactgtggttattcttatgccaaagtcatcctgttgggcgtcagtgaagtcaatgcttagctggagttctaatggggtcagcagagatgctaagatcctcgctggcatggctggtgcactggtgttggcagtgagtttgtggaggtactctcgtagttcgttaaaatcttagtgtttgatacaactgaccgctttttggggacttccagtcagatctgaaaatggatcaggttaggaactgatacgagctgtcggtagatagatatttgttctacctgagcaccgacccggtgttcggagatctggtaacaaaagaggccatactatgacaaatttggtagctaacagattcgttgccgcatgtgtgcgtgcagtcctgtaatctcattcgttgtaccgcggcacatgtgcattagtcgtcggtgtatagtaatgactatcctcccatttgatttcataggcaggactgaagtagtggtcactgaccaccgtggcgggacggtcgaaactggaaacccaacattgtgatagctttactggtccaatttctgtggacggctttgtacctgtacgtttttccgtttcctatgacccagaacgaggaaaaatctataatgagcaggaaatgtgatattcctttatgctgctccgttggttttcatatattggctaggacagcgtccaagggtagcgttgggaaccgcgacgtccaagaaaggatagtgttgaaacttgtgacgtttaaggaggtgtttgtttgagattataatccggctagattatataatcctataaaattttgaactaagtgttagtttaattttttgtgag

SEQ ID NO: 216538 - DNA, 3798 bp, Zea Mays
gtcccaccaccacgccctctcccctcttcccgcaccgcagcgcggcaccggcacctgccaccagcggccatggatctgctcccgccgccgacggacgcgccggatgccggcggccccagcgccggcgggtcaggccgggggctgcgccgcgggatcgggttccggtcgctgaagctggtcagcgttgccatggacgagaccctgcccgtcgaccccgtcggcgccacctacggccgcctcgccaacggcctcacctactacgtccgctcaaacccaaagccacgcatgcgcgccgcgctctcgcttgccgtcaaggtcggtggtagaggaggaggacgagcgcggtgtggcgcacatcgttgagcacctcgccttcagcgccaccgcgcgatataccaaccacgacatcgtcaagttcctcgagagcataggggccgagttcggtgcctgccagaacgcgctcacctcatcggatgagactatttacgagctgctcgtacccgtcgacaagccaggcctgctctcccaggctatatctgtcctcgcagagttcagctcagaggttagggtgtcagcagaggatctggagaaagagaggggtgctgtgctggaggagtacaggggtggacgcaatgcagcaggccggatgcaggactcccactgggcactgttgtttgatggttctaagtatgcagagcgcctgccaattggtactgagaaggtgatacgaactgttacacatgagaccgtgaagcggttttatcagaagtggtaccatctaagcaatatggcggtatttgcagtgggtgatttcccagatacacaggctgtcgtggagttgataaatgagcattttgggcacaaagctccagctccccaccctcctccagttataccagaattttcagttccatcgcatgaggaaccacgcttttcatgttttgtggaatctgaagctgcagggtcggctgttgttatcagctgcaagatgcctgctggtggaattaaaacagtaaaggactacaaagattcactggcagagtccatgtttcattgtgcgctaaaccagaggctcttcaaaatatctcgtagaaaggatcctccttatttttcttgctcctcagctgcagatgctctcgtctgtccagttaaggcttacattatgacatctagttgtcgggaaaggggaacagttgaagctctcgagtccatgcttcttgaggttgctagggtacggcttcatggattttctgaccgtgagatatccattgtacgcgccctaatgatgtcagagatggaatctgcatatttggagcgtgatcaaatgcaatctaccagcttacgggatgagtttttgcagcattttcttcgtgaggaacctgttgttgggattgaatatgaagcacagttacaaaagactcttcttccccatatttcttctgcggaagtggcaaaatttgcagaaaacttttcaacggccagcagctgtgttatcaagatagttgaacctcgagctcatgcttctttggaggatctgaaagcagttgtgctgaaagtcaacagtatggaagaagataaatctatttttccatgggatgaagaacaaattccagaagaaattgttgcccaagctccagagccagggactataattgctaaagtggagcacccaggcataggtgctactgagatgatactttcaaatggcatgcggatttgttacaagtatactgattttcttgatgaccaggttgtttttactggctttgcctatggtggtctgtcagaattatctgaagctgagtatacttcatgctcaatgggttcgaccatagcaggagaaattggcacttttggctacagaccttctgtcttgatggacatgcttgctggcaagagagccgaagttggtacaaaagtgggggcctacatgagaacattttctggcgattgctcaccttcagatcttgagacagctttgcagcttgtttatcaactatttacaacaaatgtggagccaagggaggaagaagtaaaaatagtgatgcaaatggcagaggaagcaatctatgctcaagagcgcgatccatacacagcatttgcgaatcgtgttcgtgaaataaattatgggaactcatacttttttaagccaattagaataagtgacttgaagaaagtggatccaatcagagcgtgtgaatatttcaacaattgtttcaaggatccatcagcttttacggtggtaatagttggaaaaatagacccagccatctcacttccactggttctgcagtacttgggtggaatacctagggtacaggatgctactcaaccacttagtcgtgatgatctaagaggattgccatttaagtttcctgcaaccatcattagagaagttgtccgcagccctatggttgaagcacagtgctttgtacaactagcatttcctgttgttcttaagaacacaatgatgactgaagatattcactatgttgggtttcttagtaaacttctggaaacaaaaatcatgcaagtacttcgcttcaaatatgggcagatctattcagttaatgtagctgtcttcttggggggcaacaaaccctcaagaactggagatgttcgtggagatataagcgtgaatttctcatgtgatccagacatatcatctaaactggttgattttgttctggaggagatatcatgcctacaaacagaaggtccttctgaagaagatgtattgtccatcctcgaaattgaacaaagagctcatgaaaatggattacaggagaattacttctggttggatcgtattctacggagctatcaatcaaggcttttttctggagatattggatccacctttgcgttccaagaggaggggcgtataaaggttagggatgctttgacaccacagagcatgcaatcagccttgcaacgagttatacctttcccttgcagaaagcagtacactgtggttattcttatgccaaagtcatcctgttgggcgtcagtgaagtcaatgcttagctggagttctaatggggtcagcagagatgctaagatcctcgctggcatggctggtgcactggtgttggcagtgagtttgtggaggtactctcgtagttcgttaaaatcttagtgtttgatacaactgaccgctttttggggacttccagtcagatctgaaaatggatcaggttaggaactgatacgagctgtcggtagatagatatttgttctacctgagcaccgacccggtgttcggagatctggtaacaaaagaggccatactatgacaaatttggtagctaacagattcgttgccgcatgtgtgcgtgcagtcctgtaatctcattcgttgtaccgcggcacatgtgcattagtcgtcggtgtatagtaatgactatcctcccatttgatttcataggcaggactgaagtagtggtcactgaccaccgtggcgggacggtcgaaactggaaacccaacattgtgatagctttactggtccaatttctgtggacggctttgtacctgtacgtttttccgtttcctatgacccagaacgaggaaaaatctataatgagcaggaaatgtgatattcctttatgctgctccgttggttttcatatattggctaggacagcgtccaagggtagcgttgggaaccgcgacgtccaagaaaggatagtgttgaaacttgtgacgtttaaggaggtgtttgtttgagattataatccggctagattatataatcctataaaattttgaactaagtgttagtttaattttttgtgag

SEQ ID NO: 216539 - DNA, 1786 bp, Zea Mays
cgccgctgtaggctgtagcgtcggttggacgtcgtgagcgtgcagagcaattaagcaaagcagttctagataagtcagatttcaggggttcttctggaaaaacaattctagataggcctgagccatcaaagtctaataactcagatgatgaggcacaccagttttggcataagcagcttccggatgacattattccagacttcacttcttttgagaaagttgaacaagggcctgaactgtcccttgctggattatccttgaatgcaccccccttttatgggacaacttccagtcgcttctcaagagaatatcacgaattatcttctccagttaccaagggcctggaactggaactagaacatactaatatgctatatgaagataaaagcaactgggagcaaaattatattggtgatcttcatattgctaatggaaaccaggaccttcattatgattctgaatctggtgtaagcttttctgatagctttgctagtgagtatgttgccccatcagatggcctttttgctcccctggagtacttggcatctcagttccctggattttcagcagagagccttgcagagctttactacgcaaatgggtgtgatttcaaccatactattgaaatcctcacccagctagagatgcaagttgatgctacacccaatcacacactgaatctgccccacagcacaccgaacttcagcactggggatttccctgcacttccaacagctgaggaccaaaatggtttcaatcagggtaatgtggatgtacttggcatgttcaatgggcgcagttcatctgcgatgcctactggagctggtgattttgtttcagccgttcgcaaacttgcatcgcagaactctggccagtggaagtttaaaaaaggtcctgagtatggtaatggcatttcagctctttctgtacccaagcagtacagttctagcactaaacaatcgtctgggaacaagtttcaaagcatcagcagtggaagagttgccccatggcttgagactggtgatgcagtggcaagtatgtactcagaatcaaggggagaggctcgtgattttgctagggtccggaatacctgctttgagcaggctagacaggcttacttggttggcaacaaggctcttgcgaaggagctcagcatgaaggggcaggcctacaatgtgcaaatgaaagcggctcatgagaaagctagagaagctatttaccgacaaaggaatcctgtttcttcccaacgtgggggtggtgaccacctgattgatttacatggcctgcatgtgaacgaagcaatccacatcctgaagggtgagctcaccgccttgaagagcgcggcgagggcagcaggggagaggatgcaagtcatggtttgcgttggaacaggccaccacaccaagggctctcgcactgcgaggttgcccatcgctgtggagcagttcctgctggatgaaggcctccagtacacgcagcctcaggcgggtctgctccgagtgatggtgtactaacatctcttaggtgagacatcacggtgaggaaaaaaactccaaaaaaagagaaaagagatgtacgaaaacgcaggaaaaaaaagcgtcgttggagcacgcactgttattccgtgtagctgtatattaaaagaggcagcaggagaatagcctgacaacaggatacagtgtaaaattatacgtagcttccttcattcaattcacattccttttccatccatccgctgctgtgcgaggtaagtggctgctgaacactgcgacgcacttggggccat

SEQ ID NO: 216540 - DNA, 1365 bp, Zea Mays
cgccgctgtaggctgtagcgtcggttggacgtcgtgagcgtgcagagcaattaagcaaagcagctttgctagtgagtatgttgccccatcagatggcctttttgctcccctggagtacttggcatctcagttccctggattttcagcagagagccttgcagagctttactacgcaaatgggtgtgatttcaaccatactattgaaatcctcacccagctagagatgcaagttgatgctacacccaatcacacactgaatctgccccacagcacaccgaacttcagcactggggatttccctgcacttccaacagctgaggaccaaaatggtttcaatcagggtaatgtggatgtacttggcatgttcaatgggcgcagttcatctgcgatgcctactggagctggtgattttgtttcagccgttcgcaaacttgcatcgcagaactctggccagtggaagtttaaaaaaggtcctgagtatggtaatggcatttcagctctttctgtacccaagcagtacagttctagcactaaacaatcgtctgggaacaagtttcaaagcatcagcagtggaagagttgccccatggcttgagactggtgatgcagtggcaagtatgtactcagaatcaaggggagaggctcgtgattttgctagggtccggaatacctgctttgagcaggctagacaggcttacttggttggcaacaaggctcttgcgaaggagctcagcatgaaggggcaggcctacaatgtgcaaatgaaagcggctcatgagaaagctagagaagctatttaccgacaaaggaatcctgtttcttcccaacgtgggggtggtgaccacctgattgatttacatggcctgcatgtgaacgaagcaatccacatcctgaagggtgagctcaccgccttgaagagcgcggcgagggcagcaggggagaggatgcaagtcatggtttgcgttggaacaggccaccacaccaagggctctcgcactgcgaggttgcccatcgctgtggagcagttcctgctggatgaaggcctccagtacacgcagcctcaggcgggtctgctccgagtgatggtgtactaacatctcttaggtgagacatcacggtgaggaaaaaaactccaaaaaaagagaaaagagatgtacgaaaacgcaggaaaaaaaagcgtcgttggagcacgcactgttattccgtgtagctgtatattaaaagaggcagcaggagaatagcctgacaacaggatacagtgtaaaattatacgtagcttccttcattcaattcacattccttttccatccatccgctgctgtgcgaggtaagtggctgctgaacactgcgacgcacttggggccat

SEQ ID NO: 216541 - DNA, 1217 bp, Zea Mays
cttcttttttcacgccgctgtaggctgtagcgtcggttggacgtcgtgagcgtgcagagcaattaagcaaagcagatgcaagttgatgctacacccaatcacacactgaatctgccccacagcacaccgaacttcagcactggggatttccctgcacttccaacagctgaggaccaaaatggtttcaatcagggtaatgtggatgtacttggcatgttcaatgggcgcagttcatctgcgatgcctactggagctggtgattttgtttcagccgttcgcaaacttgcatcgcagaactctggccagtggaagtttaaaaaaggtcctgagtatggtaatggcatttcagctctttctgtacccaagcagtacagttctagcactaaacaatcgtctgggaacaagtttcaaagcatcagcagtggaagagttgccccatggcttgagactggtgatgcagtggcaagtatgtactcagaatcaaggggagaggctcgtgattttgctagggtccggaatacctgctttgagcaggctagacaggcttacttggttggcaacaaggctcttgcgaaggagctcagcatgaaggggcaggcctacaatgtgcaaatgaaagcggctcatgagaaagctagagaagctatttaccgacaaaggaatcctgtttcttcccaacgtgggggtggtgaccacctgattgatttacatggcctgcatgtgaacgaagcaatccacatcctgaagggtgagctcaccgccttgaagagcgcggcgagggcagcaggggagaggatgcaagtcatggtttgcgttggaacaggccaccacaccaagggctctcgcactgcgaggttgcccatcgctgtggagcagttcctgctggatgaaggcctccagtacacgcagcctcaggcgggtctgctccgagtgatggtgtactaacatctcttaggtgagacatcacggtgaggaaaaaaactccaaaaaaagagaaaagagatgtacgaaaacgcaggaaaaaaaagcgtcgttggagcacgcactgttattccgtgtagctgtatattaaaagaggcagcaggagaatagcctgacaacaggatacagtgtaaaattatacgtagcttccttcattcaattcacattccttttccatccatccgctgctgtgcgaggtaagtggctgctgaacactgcgacgcacttggggccat

SEQ ID NO: 216542 - DNA, 4698 bp, Zea Mays
aacgaccagagtccggacactcacactcccctgctgcgcctgccgcctgcgtttcggccaccgcactacttccccaatccccttgatatcgcccacccgcgctcgccgccgccgctgggcggcgatggaaaccctaatggtagaccgcgtccacagtagcctccgcctcttcatgtaccgcaacgccatattcctctgcgagcgcctctgcgcacagttcccctccgagaccaatgtgcaattgctagcaacctgctacctacacaacaatcagccatatgctgcatatcacgttttgaaagggaagaagctgccggagtcccggtacttgtttgctacatcatgctttcgaatgaacctcttgcgtgaagcagaagaaattctatgtccagtcaatgagccaaacatggaggttccaagtggagcaacaggacactacctccttggagtgatctacaggtgcacaggcagaatttcagctgcagctgaacaatttacacaagcgttgactctagatcctcttttatgggcggcatatgaggaattgtgtatattaggtattgccgaagataccgatgagtgttttagtgaatcgactgctctacgtctccagcaggaacacacatccacgtccactttggtgaagtcgaactttgccaatgaaaatcgagttctatcatccagtgtctctgcaagttttggggatattattcctaagcaaatcaaacagcttcatgctaacaacataacagaagtatctggttatcctcatgtaagaccaaccgcattgcatgtgcagaacagttcaacttctaatgtatcacagtttgacaccccatcaccagctgcagcacagacttctatcatgccaccaccactatttaggaatgtacatgcttaccagaatacaataagtggcgatgctcccactaagcagaaagctaatggagtaagccagccactcagaaggaaatacatggatgaagcaaggctaaagaaggttaggttctttcatttgattgctattactggatgccactacttgtaacttctgtacctgcctgtttcccgatctttagaacttccatggtttgctcatgacttttaatggcctgtctatccctagagttcgcatttctcccctgacctttatctgtaaaggatgtcagtgtgacatatgggttggtttatatttattttattttatggcatgttgatattttctatttgctcatactcccttgagcacaaaatgtcttaaatataaattcccttgaaatttctgtaagctaacattgatggtcccttgtatcaggattcatagtgttggattcgttgttatcatattacaatagtaatacatagtgtcaggatcagtcatgtctttcattttttgctgttacatgatttttgttgttcataaacttaataatcttgagtttgtctgcaagtatcttcgttcttgagtactagtgtgccaattgtgtaccagcatcaaacacatggtctcaaaaactcagaatgccttataataccattcgtcttgatgatgtttacataatggttagatcagtgtgtcattcttgttgcatactatctcagcagtgttgcacacaaaaatagtggggtgttttggggttgcctgaaaccaaccattctaaatttttgttaattgctttccatatgtcaactttagatatttggtaatgatacaagtagatatttgaatcaaaatgcagtttcataaaaatactttttccatgtttaataaatattttgtaagaaagtgtttttgtgtgttttttagagaccgtgctgaactgctaatgtcaaaagcatcatttatgttttattggagggagtacaaggcactgaaaacgattgatataatcccaagtctatttttgtattgtttcttgtagtcacaaagttcatcttgtgatataatacacaatggcagtaaaactatttaatctttacttacattgaaggtcttccttttcttattggttttgttggattgacaaaggatgcatttgattgttctgtaggtttaactcatttgagatctgtttgtaaatcctcctttgtactcttttctgttgatattttcttatggtgacaggaacaaatctatattctactctattaagaacctaatgtgggcacctggtgctaccacgacttcaccctccccacacccagcgtccgcaaaaagtagtgcagaacgagcactcgaacccacacacccctctgctccagaaatttggggctaaccaccagaccacacataccttagtatttagaaataaataaaaaatatatttgtagcctaggcgtcactcccctgcttagtggcaacacacgggcacatacctagtatatatgttacaagtattaggattacctgcattacattatggaataaagctacaaagataaagaaaaaggctctcacattgacaccaaatcctctttgcctacgcatttacatggtcctatgcattattgcatatttacattggacaattgtatttatatggaatatccttgatgcatcattctgaagggcaggccttgtgcagtggtgagagctgtctcactgagtcaccaggtcgcagattcacagcagtctctccacatttgcggggaaagattgacttggtttatttttccctagatcccacttgtgggagtctccaacactgggtttctggaaggttgtttaatagcgatgcaatgcctcgaagaagtcaaagacttaaagatacaacaacaaattcaaatacatctcaaattggaggaaatggaacagatcatttgtcaggaagtagatatgaagtcattgatgaaatgtggacagacaatatgtcaggaacttcatcttctgtaagtacagctgatggaagatcctttgagcaagatagagctgaacgaattctgttgcaagactccaaagtggcacttggtattagggagctattgggacttttccgaacactgggggaaggttttaggctttcttgcttgtttaagtgccaggaagcactggaagtctacagaaaactccctgagtcgcagtttaacactggatgggttctatgccaggttggtaaggcatattttgaattagttgattatttggaagctgatcattattttgagctggcacaccgactatcgccttgtacgcttgatggaatggacatctattctactgttctttatcatctgaatgaggaaatgagactaagctaccttgctcaagagcttatttccattgatcgactatctcctcaagcatggtgtgcagtgggcaattgctttgccttgagaaaagatcatgagactgctttgaagaattttcaacgttcggtacagcttgactcaagatttgcatatgctcacactctatgtggtcatgagtattctgcactggaggattatgagaatagtatcaaattctacagatgtgcactgcaggtagatgaaaggcactacaatgcttggtatggccttggggtggtgtatcttcgccaggaaaagtttgagtttgctgagcatcatttcagaagggcatttcagataaatcctcgctcttctgttctcatgtgctatcttgggatggccttgcattctcttaaggttgatatcattgatcgacaacaatagactactccctctgattccaaatatagaggaatgaagaggcactggaaatgatggagaaagctatagcagctgataagaagaatccactgcccaagtatcagaagtccttaatccttctaggactaatgaagtatgaagaagctctggatgagttggagcggctaaaggagattgcaccccatgagagtagtatgtatgcactgatgggaaagatttacaagcaactcaatattcttgacaaagctgttttctgcttcggcattgccctggatttgaaaccacctgctgctgatcttgctataattaagtccgcaatggagaaagtacatctccctgatgaactgatggaggatgacctataagttcactcaagcatcgtgagaaatgaacatttacttcgggttcatgatgacccgcctgtgcttcgtgttcctggcctagtggcctgcttgggcttctcaagtggaactcggaagtcggagctgtaccattagccatccagtttggaatgaaaagaaaaaaaaattaaccatccagttttgtagatttagttttagcctgtaatcagagaacacatgcgcagaagctgcggtagtttaggactctgtacaagtgttggcgaaatgacgcctgtaccattatcaaataacggaaataattaaaggatgaggatccagctgattcaagcagattgtttgtcgcatctacaaaccttttaaaggtgtcacattcaaaggttgaaaacatttcagcccaagtaaatcgatttgaagaagagcggaggaaaagaggatgcttccgcgagtcagcctcctactaactactggcttggaggtgggggataaagctaggctcttcatgcaagcaaagtgtaaccatccgttttcttgctagtagcctgtatcattgctgcatatcctggcatcattaagaaaccatccaaaggagagtgtcagtgatgagcaatttctggaaaagttttactttgcattatgcgatgtgatatatatattttatttacatggt

SEQ ID NO: 216543 - DNA, 2706 bp, Zea Mays
gagaagcattagtattacaaggttccaagtggagcaacaggacactacctccttggagtgatctacaggtgcacaggcagaatttcagctgcagctgaacaatttacacaagcgttgactctagatcctcttttatgggcggcatatgaggaattgtgtatattaggtattgccgaagataccgatgagtgttttagtgaatcgactgctctacgtctccagcaggaacacacatccacgtccactttggtgaagtcgaactttgccaatgaaaatcgagttctatcatccagtgtctctgcaagttttggggatattattcctaagcaaatcaaacagcttcatgctaacaacataacagaagtatctggttatcctcatgtaagaccaaccgcattgcatgtgcagaacagttcaacttctaatgtatcacagtttgacaccccatcaccagctgcagcacagacttctatcatgccaccaccactatttaggaatgtacatgcttaccagaatacaataagtggcgatgctcccactaagcagaaagctaatggagtaagccagccactcagaaggaaatacatggatgaagcaaggctaaagaaggtttctggaaggttgtttaatagcgatgcaatgcctcgaagaagtcaaagacttaaagatacaacaacaaattcaaatacatctcaaattggaggaaatggaacagatcatttgtcaggtaaattgcgagtaaactcgtccacacaatcaaaattgtgttcaacagccatacgttctgtgcaagttaggaaaggaaaaccacgggctacagaaaattttgatgaaggaagtagatatgaagtcattgatgaaatgtggacagacaatatgtcaggaacttcatcttctgtaagtacagctgatggaagatcctttgagcaagatagagctgaacgaattctgttgcaagactccaaagtggcacttggtattagggagctattgggacttttccgaacactgggggaaggttttaggctttcttgcttgtttaagtgccaggaagcactggaagtctacagaaaactccctgagtcgcagtttaacactggatgggttctatgccaggttggtaaggcatattttgaattagttgattatttggaagctgatcattattttgagctggcacaccgactatcgccttgtacgcttgatggaatggacatctattctactgttctttatcatctgaatgaggaaatgagactaagctaccttgctcaagagcttatttccattgatcgactatctcctcaagcatggtgtgcagtgggcaattgctttgccttgagaaaagatcatgagactgctttgaagaattttcaacgttcggtacagcttgactcaagatttgcatatgctcacactctatgtggtcatgagtattctgcactggaggattatgagaatagtatcaaattctacagatgtgcactgcaggtagatgaaaggcactacaatgcttggtatggccttggggtggtgtatcttcgccaggaaaagtttgagtttgctgagcatcatttcagaagggcatttcagataaatcctcgctcttctgttctcatgtgctatcttgggatggccttgcattctcttaaggttgatatcattgatcgacaacaatagactactccctctgattccaaatatagaggaatgaagaggcactggaaatgatggagaaagctatagcagctgataagaagaatccactgcccaagtatcagaagtccttaatccttctaggactaatgaagtatgaagaagctctggatgagttggagcggctaaaggagattgcaccccatgagagtagtatgtatgcactgatgggaaagatttacaagcaactcaatattcttgacaaagctgttttctgcttcggcattgccctggatttgaaaccacctgctgctgatcttgctataattaagtccgcaatggagaaagtacatctccctgatgaactgatggaggatgacctataagttcactcaagcatcgtgagaaatgaacatttacttcgggttcatgatgacccgcctgtgcttcgtgttcctggcctagtggcctgcttgggcttctcaagtggaactcggaagtcggagctgtaccattagccatccagtttggaatgaaaagaaaaaaaaattaaccatccagttttgtagatttagttttagcctgtaatcagagaacacatgcgcagaagctgcggtagtttaggactctgtacaagtgttggcgaaatgacgcctgtaccattatcaaataacggaaataattaaaggatgaggatccagctgattcaagcagattgtttgtcgcatctacaaaccttttaaaggtgtcacattcaaaggttgaaaacatttcagcccaagtaaatcgatttgaagaagagcggaggaaaagaggatgcttccgcgagtcagcctcctactaactactggcttggaggtgggggataaagctaggctcttcatgcaagcaaagtgtaaccatccgttttcttgctagtagcctgtatcattgctgcatatcctggcatcattaagaaaccatccaaaggagagtgtcagtgatgagcaatttctggaaaagttttactttgcattatgcgatgtgatatatatattttatttacatggt

SEQ ID NO: 216544 - DNA, 3291 bp, Zea Mays
cgccgttctaggaataccgtactacgctcgacaagctcaccccatcatggaggtcttcgcggcgtttggcgatggcttttacataaatcagtttcaggagcccggaagagctgaagccgcattcgctcaatacgatgttgcaactgtactaaagaagttctactccattgaaatagatgaactcactgctcctcctggagtggagatcatagactttctcgaggcatctccatcaccacttccttggctcagcgaggaagaactgggccagtacgccgaaaagtttcggaagtctgggttcactggacccctcaactactaccgcatgtgggagacttgtgagtaactgcaggaattggagacttcttgcaccctggaacgaggccaagattacagtgcccgtcaagttcatagctggtgataaggacatcggtgtccagtcctttggggttgagaagtacatcaagagtggggaattcaagtccactgtcccagatcttgaagtcgcggtcattgaaggccaccattttctccagcaagaacaggccgagagggtgaattcggagataatttcctacctcgtcaggtttactagccaggaggcatcatcttgatgctttgctcccagttgaacctgaccagaaaaaaaatgatgtgcgatgggactccatttctttctgaactgaaaaggtcttgaattgccgaataaagtgtgagtagagttgaaaagggatggaagtcccgtccgtactgttttccacatttgacccgtccgttttcgtatttgtggaaaaatctagaaataggacagaaacgagagaggatctatcccgaccatttttgcggaatcccgtttttttctagatttaacccatatttattccgtattcaagaaaccaagatgacccaatatgtattagtttacaaactaaagcatcatattttaaagttatatattataacataaatggtcattctagtcaccggctctcctcaataataagtggtctaaaagttcaaacaacatcgatcgtagctatatgtacaccgctaataatcaaacaacaattaaatgttatctttttatatctatttgttttatgttattgccttgctagtcagttatcaatatcatatgtgtgtctatattaaattacgagtttctgcttaatattttcgctctcattcattttcgtacacctgtttattccgctcccgttttcgtacccgactattctagaatcggttctgtttccgatgatataatgtggcaaccgaaacaagataggggttgttttgttttcatcccaaattaagtgtgagctaggcatttgctggcttgatgttacttgtacgaataaaaagagcacgtgacaaaaaaaaaacttggtgctcaaagcttgcgtgcttgtgttgcttctgctagtcattgcagccttgcagtcttgtaggcagaaggtgcaatcgacgcgtgcactatggaacatgtgatccagaacgagccaggtggttgagatgattagtatttatggttgagatgatttgtatttctggaagtgagaacagccattgagcagcaggtagcgcgtcaagcgagcagagcagcgaaaagcatggatgccgaagccgccgccgccgagggccaggtgcggcactggaccgcggacgtcaacggcatttccctccacgtcgccgagcgcggcgccgccgacgcgccggcggtcctcctcatccacggcttcccggagctctggctctcgtggcgccaccagatggccgcgctcgccgcccgcggcttccgcgcgctggctcccgacctccgtggctacggcgactcgtctgtgcccaccgaccccgccgcctactccatcctccacctcgtcggcgacttggtcgcgctccttgaccacctccaactcacaaaggtgttcgtggttgggcacgactggggcgcgatggtggcgtggcacctctgcctgttccggccggaccgggtgcgcgccgctgttgtcctggggatcccctacttcccccgcggccctcgcccgatgacggactcatttgccaagctcggcgatggattctacatcaatcagttccaggagccaggaagagccgagagggcatttgctcgctacgatgttgcgacggtcctaaagaagttctacgccttgaaaatcgacgagatgattgctcctcctggagtggagatcatagactttctccaggcaccttcttcgccgattccctggatgacagacgaagaactgggacggtacgccgagaagttcgagaagactggcttcacaggacccctcaactactaccgcatgcttgaaacaaactggagactgactgcaccttggagtggatcgaaaatcacagtgcctgcgaaattcatactcagcaagaacgacgtcggcctgcagtccttcggaaccgagaagtacgtcaagagtggcgctctgaaggagaacgttccagaccttgagatttcgatcatcgaggggcaccatttcgtccagcaggaagaggccgggacagtgaattcggaaatactctccttccttggcaagtttcccagcgagggaggatcagcgtgattgttatttattgtttgcagccagtcccggactcctgagaggaagatggcctccgaatgatccgagggtttatgattgaataaagtgagagctcagatcgatagccgtctgttggcttgcattaaaaaaataaagagcttgcatgtaaaactatttatgaacgaataaacttctgtcatatactcgcaagtctcaacattgtttacatgccagccaacgaacaactaagcagaagtgcagaacacatcatctgcagcgcacaaaagttttcttttacacaaccggggaaaacgcacagagaaaaaaaaaactgcacaagatgagccaattcatttacacagtccataaaaaggcgaacgggaacagttcagcctcgtcagcatacaggtgaagcgcacttctccgccgacggcgacgcacgcttgggcttgatggaccggaccttcacgtagcggcgcaccattccgatcaccctccgtcccgccggcacctgtccagcccgccgcgttgcctcgcctgctgcagctccttgtagttgtgcaaattcacgaacaccagcagcaggagtgttcccttccgtggtgcctccggtggcggcgccgtcgacggcctcgtcctcgatcagctcctgcagcgagaaacgacggtcctgacactcttcctccgtcgagggttctgacgcctcgtg

SEQ ID NO: 216545 - DNA, 2027 bp, Zea Mays
cgcaactggcaacccacaacacgcgaagccgtgaaccgaagttgcttcgagttttggcgcgcgccgacccaaacaacggcgctccgcgcggcggaggcgatggaccgactccagcgcaggaaccctagcagccggacccatgccacttcgctgaagcacccacggcctccgcgagtgccgaccttccagccccagccggcgtcgaggtccctacaggagccggagccctcctccccagtatgtgatgctaaaactgcagaatataagttctttaagaaattgtgtgaacagccaggccatagctctctttcatacaaacattctcatcaaagccttgaatcaaatgtgtacaggcaaaaacaagacagagagcctatcagtggacatatcttttcaggaaagagaagcaaattattgaagatagcagccaaaaccatgtccatgggaagtgctgagttgtttcaaagaaggtcggaatttatagttggcatcctgcagagactaggcaccaacaacatcatgagaaagcaagaagggtccatgagtcacagaaaaatggactgcagacatgctcttgctattcccgaaggccattttgataacttgatagactacaagcgaagcaactttaatccattagctaagctgaggaatggtaaaattccatcctcttatgcaagtgatgaagcatgtgagttcatggctttaccatcaggatacaatcagggccctggaagtattgttgatcagaaaaatgacttatctcatgggggtagtggagcaagtgagtgcatggcattgccatgggcgtgtgttaatgatactctgagttctgatcggaagggagacatgcttctgctaatgaattgagtttgaatggtcaaacagattcatatggtcaacacagatgggaccctatgttgtcagtaacgttcttgaagtcatttcatgacagactgtacttcccctgtcagaatgaggagcggcatgcagtaccatatgggatttcaaatacctctgagcaacctgaactatgcagctccatagaactgtgtacttgtagttcaataggactggagatagaagacccaaaagaggcgggattgtgtggtaattctgatgctgggtttccatcgtggcttgctcaattagttgggaaaccaactatttcaagcatttttgacagtgggaatgaaattctggatcacaatgacttcagatgcatctccaacttccacagcaacatgttcagttcaaactcaagttgtttgaattccatgtcgactccagagcagtcgtacaaggttggcgcaaagggcctgcttgattcttcatttggtctctcttgtttggctggactggaggagtactccacggacgcagaactgccagatgattctgatagatttcttcaggtgttggaccagttacctgtgaaattcatctcttcagggttttcaaacaacgattccagaatctgggaccatcggtcttcaaatgcagaacctccttttaaccaagattggggcactacacaaccgtggtcatcagtgcatcaactccaacctcattctgattcaggaaccgtgcttggtttcatgccaaatggaagtgcttacagtgatttggtggaacgccatcacagcctcatgctagtccaaggaaacctgagcactgacgttcttggtgctactgatttatcgttctttggatcttgctcaagtttggataacatcacggaggctcctacgttatcttctgatggcataacgtggtagctgtgttggtccactctgaaattttcatccagatcagttcgctacacaaccaaccgttcgctgtatgaaattttgaattcgaagttgcaccacgtataggtgaagttattagctttaatataagttgggaagcaatgtccagaaaattgtgtaatgttagcaaccattactagactttagcatgaagagataccatctggtccaaaattttgacctgaattttggtacctaattactgaagaacagtag

SEQ ID NO: 216546 - DNA, 2387 bp, Zea Mays
cgcaactggcaacccacaacacgcgaagccgtgaaccgaagttgcttcgagttttggcgcgcgccgacccaaacaacggcgctccgcgcggcggaggcgatggaccgactccagcgcaggaaccctagcagccggacccatgccacttcgctgaagcacccacggcctccgcgagtgccgaccttccagccccagccggcgtcgaggtccctacaggagccggagccctcctccccagatggaaggcaaaggaaaagggttcgatttgcaaatgaagctggtagtcattgtatcagcgggaaacaagtcgtgaacatacacgaagatgcgaaaaacaaacctcatgtatgtgatgctaaaactgcagaatataagttctttaagaaattgtgtgaacagccaggccatagctctctttcatacaaacattctcatcaaagccttgaatcaaatgtgtacaggcaaaaacaaggatcgcgcaatgtaactgccccaaaaaagttacatgtccatgataatactgtgtactgtgatgaaccccttgctacaccagctaagaatgaggaaattcctggcgagaaaattagcgtgcaatcctcccattctgaatatgacgataaagatacacctcaagtcggtccacatgatcgcttgctgggtattcatgttctcacacctatatctcatacatcatttgatgttaccgggatttcagtaaatgttgacagagagcctatcagtggacatatcttttcaggaaagagaagcaaattattgaagatagcagccaaaaccatgtccatgggaagtgctgagttgtttcaaagaaggtcggaatttatagttggcatcctgcagagactaggcaccaacaacatcatgagaaagcaagaagggtccatgagtcacagaaaaatggactgcagacatgctcttgctattcccgaaggccattttgataacttgatagactacaagcgaagcaactttaatccattagctaagctgaggaatggtaaaattccatcctcttatgcaagtgatgaagcatgtgagttcatggctttaccatcaggatacaatcagggccctggaagtattgttgatcagaaaaatgacttatctcatgggggtagtggagcaagtgagtgcatggcattgccatgggcgtgtgttaatgatactctgagttctgatcggaagggagacatgcttctgctaatgaattgagtttgaatggtcaaacagattcatatggtcaacacagatgggaccctatgttgtcagtaacgttcttgaagtcatttcatgacagactgtacttcccctgtcagaatgaggagcggcatgcagtaccatatgggatttcaaatacctctgagcaacctgaactatgcagctccatagaactgtgtacttgtagttcaataggactggagatagaagacccaaaagaggcgggattgtgtggtaattctgatgctgggtttccatcgtggcttgctcaattagttgggaaaccaactatttcaagcatttttgacagtgggaatgaaattctggatcacaatgacttcagatgcatctccaacttccacagcaacatgttcagttcaaactcaagttgtttgaattccatgtcgactccagagcagtcgtacaaggttggcgcaaagggcctgcttgattcttcatttggtctctcttgtttggctggactggaggagtactccacggacgcagaactgccagatgattctgatagatttcttcaggtgttggaccagttacctgtgaaattcatctcttcagggttttcaaacaacgattccagaatctgggaccatcggtcttcaaatgcagaacctccttttaaccaagattggggcactacacaaccgtggtcatcagtgcatcaactccaacctcattctgattcaggaaccgtgcttggtttcatgccaaatggaagtgcttacagtgatttggtggaacgccatcacagcctcatgctagtccaaggaaacctgagcactgacgttcttggtgctactgatttatcgttctttggatcttgctcaagtttggataacatcacggaggctcctacgttatcttctgatggcataacgtggtagctgtgttggtccactctgaaattttcatccagatcagttcgctacacaaccaaccgttcgctgtatgaaattttgaattcgaagttgcaccacgtataggtgaagttattagctttaatataagttgggaagcaatgtccagaaaattgtgtaatgttagcaaccattactagactttagcatgaagagataccatctggtccaaaattttgacctgaattttggtacctaattactgaagaacagtag

SEQ ID NO: 216547 - DNA, 3142 bp, Zea Mays
cccagtcggcgggcgtgctccggccgccggtggggagagccggaaccggaagtctgcgtggttcactggttctttaggttgactatcaagagaaacaatatgctcaaggtgttatccccacaacatatatgcgcagggaaggtgctcctaaggaaagagaacttctatgtgggcgtataattgatcgaccaataagaccattgtttcctcctggcttttaccatgaagttcagatcatggtaaatgttctttcatcagatggaaagcaagatccagatgtaatggctgcaaatgcctcttcagctgcactaatgctatctgatataccttggaacgggccgattggagtaatacgtgtagggaggattgatggggcttttatattaaaccctacagtggatgagctaggtttgagtgacctcaatcttgtttatgcatgttctcgggataaaactttaatgattgatgtacaagctcgtgaaataagcgagagggatcttcaggcaggaatgaaacttgcacactctgaggcaattaaatgtatcgaccctcaaataagtttggctaagcgagctggcaaaaagaagaaagaatacaagatatcactgatttcagatacatcctatgagaaaattagaacattctcagaagcacccattgaggaagtcttcactgattcatcatatggcaagtttgaacgggggggagctttagaaaaaatcacacaatctgtgaaggcaaagcttgaagaagaaaatgatgaggacagcttgaagtttcttcacaaggcagttgacacagtgagaaaacaggttatacgtaaaagaataattgaagagggacttagagtagatggtagacaacttgatgaagtgagaccattgtattgtgaatccaacacatatccattattacatggttctgccctgttttcacgtggagacacacaggttctatgtacagttacccttggtgctcctggcgatgctcagcgactggattccattgttggtcctccaacaaagcgtttcatgcttcactatagctttccaccattttcaatagatgaagttgccaaacgtggaggccttaatcgacgagaagttggacatggcactcttgcggagaaagcattgcttgctgtgcttcctccagaaagtgattttccatacaccgttcgggtaaatgcagaagtcatggcatctgatggttcaacatcaatggcatcagtatgtggaggaagtatggctttaatggatgctgggatacctgtaagagaacatgttgccggtgtttcagtgggtcttgtaagtcaggtggatccagctactggagatatttctaattatcgcatattaacagatattctgggccttgaggatcacttgggtgacatggacttcaaaattgcagggacaaggaaaggtattactgctattcagctggatataaaacctgctggaataccattggacataatatgtgaaagtttagagcctgcacgtaaggctcgaaatcaaatccttgaccgcatggaccaggaaataagtaccgcacgtggtattaacgatggaagttcccctcgattagctacactgagcttcagcaacgagtctcttaggaaactgcttttccacaggaaaaaaatcgagcaagaaacaggtgcacgggtatcaatcagtgatggtacagtcactattgttgctaaaactcaagaaattatggataaagctattgagaaggttgagttcctcgtgggacgtgaaattgaagttggtcgtacatacaaaggaattgtttcttcgattaaggagtatggcgcttttgtggagttcaatggtggacaacaaggcttacttcatatttcggagttgtcacatcaaccggttacgaaagtctcggatgttgtaactcttgggcaatctctctctctgagatgcattggacaggacatgcggggtaacattaaactttcacttaaagcaaccttaccccaaccacgtatcaagaaggatttgaaaaataaggatcctttgccaagtgaagttactggttgggctgctgtggagaacatgagtagtgtggatgttgatgctcagctatcaagtaccgaacatgaaaatggcacaactgaggaggcagctgcattttcgactccttcagttataattcgaagtgctgctgactgtgatgctcaagatgatgcaaatggttctaagaagcgggcgaaggttgcaaagtcatctcctagaccaaataaaccagccagcgaatgccatgatgttaggaaagctaccgctaagaaagctacaggtgccactaccaagaaaactaagaaagtaaagattgaggaatctgtgagtaatggactagaaaccagtggttctgatgttccagaacagagtgctgacaacacttctgaccagaatcagagtcccacgaaattccaatctggggcaatgaagttgggtgatgtagttacagcaaaggtctaccagattcgagcctatggactagtacttgagttgagtgatggtgtgcgtggaatgcataaatttgaggcaaatggcctaaaggaatttgaagttggacaggaactagtagtgaaatgttctagtttcaatgcgaaggggattccgttattctcattgctggactagcaatgccaccatttgggaaccggatacaaatgacaccttagcagctaaccaatcaacttgtggaacacatggctagcgaagttttgttctttcgctgttgttgaagcgttggtcaagttctttattcgtacaaccatgaatagaatggaggtcaatcacatgaagtgtagagcgtacggactgagtacgaaccatcggaacctgctgtagccattatatataactaggattacgttacttatctatctattggttaaaataatagggacgatgaattctttgtaagacgtactgaagcagagtgtcccacttacaggaatccagttccagtttgtagtttctttacctaagattgttcagctgtacctttattttatttttagcagggctgtttacaaaatctgatttttttagttttgaaaagttagcaggagcattgcttatgtttgggtgggttcagattacatgcagtataaactttg

SEQ ID NO: 216548 - DNA, 1969 bp, Zea Mays
cccactccgccaccgccgcctcccgtttgttctcaagattctctcccgccaccgctccgagtcccaacctccatcgacggggaggcgtcctccatccgggccggtcccctttggtggtgctgcatttttcccagggcgtttaatacacacaaatgaactcttggtgcttctgggtgaggggtactatgccgagaggtctgctaagcagacgactgatatattgcacaggagggggcaggaattggaagctcaggtcgaagcaatgaaggcaactatcactgatcttgaagctgaggcgaatttttttgagtccactgccaccgaggcttcagagggtcttgttgaaatcagggaagagtatgatgaggatacagagacaaagacaacaagatcagaggcttcaattgctactggggttatgtttgataatgatagggaacatgctcaaatcatggcaaggttagttgaactcgaaagggaagaaaaggaagctggaaatacttgtgaagatgatgatgatgatggcgacgatgatggagatgctggtacaagtgaggatggtgaggaaaataaggaacccggaaatgctttaagtgatggcaatgaggaccacagttctggttctggtgctttattttttggaaatggtggcaatgataggagtaatgggaatatcaagctgaagagtgcactgaagaagcctggaggagatgaaatgctgaaagacatttctcatacaccatcagccgatacatctcatccagtatttggtggccaaacttctataacaaatcctgatgtccgagttcacactaaagctgtttcttttgaagacgacaaatttgtggttagttcgtcaaagtctcctaccttgctagtgggttcaatacagtctgatcctgggctcaagagttcttcagaccccactccatcatgtgaccgaaagataatatcgagtgggcgaaaggccttcacaggatctatcgtcgagcacgacgatgacgatctttcaaccattcaaccttctgcgggcaattcgttggcaaaacctggtacttctgcgtcttcaaggcccatgtcaaaattcaagatgcagaaaggagggcgtgcaccttcaccagtgagactgtttggcggggatacatgggatgttcagttagattcagtttaattagtggctggtggtgcagtatctctttcagaaacctatatatatatgccgccatgccgtttgtaaatctttcggcaacaaaagaaagaaagaaagtgtcgaaagattatattctctggatttaattggaaaaccatgctgcttaagactgatgacaacacaatctacggagactaaatagtgacgagggaacccatgggaaatggagcaaagaaggaaatcgtgagggtgatttggttggttggtccaacgtccaagcatcgcatcatcggttagccagccatcagtgatcggagttggtaaaacccccccaaagaacatgtcggccaataagtggagttaattacagatctagtggtgctagctagcttgcaatgctgttcctacttgtgctgtaacacagtgtcatgacatggtcagtagcagctgacgagcgccgccgcgcagtcaggtggtcgtcggctggtgtctcttcttctactccttccctaggcgccgccgccgccgccgtggagcaccagattgtctcccacacgtctctcaccagcagaaagggaggaaggacctgccctctgcatgtcagctccacctgctgccattatgcattattccattcagttggtaataatcgtcacaatcagcttgtaaagatggcgcaaaatgccagatctcgataatctgatatacaccagtacgaattaagcagaactatatgtatgcatcattaaattttctaaacacgtacatacgtacgtatgttattaaactcgtaacgaactactaatggtcaggtttttc

SEQ ID NO: 216549 - DNA, 2408 bp, Zea Mays
cccactccgccaccgccgcctcccgtttgttctcaagattctctcccgccaccgctccgagtcccaacctccatcgacggggaggcgtcctccatccgggccggttagattcatcgctttgtagctggtcctcgtcgtttccctctgctgtggtgggagaagcgactcgcgcgcgcgatcggccaacaaattaagcacggggcagggccgtacgcaggaggcgagctctagggctctccggggagaaggttgccaggcacgccaggtgaacgccgtactgagtttgcagtccgggacgtagcgcgttctctggtcgggaggtggggaagcggagagcgatggctgcgccgaggaaggggacggcgacgccactgggcgccgtattctcgccagaggagacgaagagggccgtggcgagggtggccgagtccatcgctggccgccgcgccgagctcgggcacctactgggcttcgtcgccgacaacgcggccctcgtctccctcgtcaacaggctcccagtcgaactctcccacgaaatcatggtcccctttggtggtgctgcatttttcccagggcgtttaatacacacaaatgaactcttggtgcttctgggtgaggggtactatgccgagaggtctgctaagcagacgactgatatattgcacaggagggggcaggaattggaagctcaggtcgaagcaatgaaggcaactatcactgatcttgaagctgaggcgaatttttttgagtccactgccaccgaggcttcagagggtcttgttgaaatcagggaagagtatgatgaggatacagagacaaagacaacaagatcagaggcttcaattgctactggggttatgtttgataatgatagggaacatgctcaaatcatggcaaggttagttgaactcgaaagggaagaaaaggaagctggaaatacttgtgaagatgatgatgatgatggcgacgatgatggagatgctggtacaagtgaggatggtgaggaaaataaggaacccggaaatgctttaagtgatggcaatgaggaccacagttctggttctggtgctttattttttggaaatggtggcaatgataggagtaatgggaatatcaagctgaagagtgcactgaagaagcctggaggagatgaaatgctgaaagacatttctcatacaccatcagccgatacatctcatccagtatttggtggccaaacttctataacaaatcctgatgtccgagttcacactaaagctgtttcttttgaagacgacaaatttgtggttagttcgtcaaagtctcctaccttgctagtgggttcaatacagtctgatcctgggctcaagagttcttcagaccccactccatcatgtgaccgaaagataatatcgagtgggcgaaaggccttcacaggatctatcgtcgagcacgacgatgacgatctttcaaccattcaaccttctgcgggcaattcgttggcaaaacctggtacttctgcgtcttcaaggcccatgtcaaaattcaagatgcagaaaggagggcgtgcaccttcaccagtgagactgtttggcggggatacatgggatgttcagttagattcagtttaattagtggctggtggtgcagtatctctttcagaaacctatatatatatgccgccatgccgtttgtaaatctttcggcaacaaaagaaagaaagaaagtgtcgaaagattatattctctggatttaattggaaaaccatgctgcttaagactgatgacaacacaatctacggagactaaatagtgacgagggaacccatgggaaatggagcaaagaaggaaatcgtgagggtgatttggttggttggtccaacgtccaagcatcgcatcatcggttagccagccatcagtgatcggagttggtaaaacccccccaaagaacatgtcggccaataagtggagttaattacagatctagtggtgctagctagcttgcaatgctgttcctacttgtgctgtaacacagtgtcatgacatggtcagtagcagctgacgagcgccgccgcgcagtcaggtggtcgtcggctggtgtctcttcttctactccttccctaggcgccgccgccgccgccgtggagcaccagattgtctcccacacgtctctcaccagcagaaagggaggaaggacctgccctctgcatgtcagctccacctgctgccattatgcattattccattcagttggtaataatcgtcacaatcagcttgtaaagatggcgcaaaatgccagatctcgataatctgatatacaccagtacgaattaagcagaactatatgtatgcatcattaaattttctaaacacgtacatacgtacgtatgttattaaactcgtaacgaactactaatggtcaggtttttc

SEQ ID NO: 216550 - DNA, 4322 bp, Zea Mays
ggaactgataactcgaaggggacgattgagaaatttgtccgctcaccatctcggtcggcgacagcgggaaaccactgggcctcctgcacctgcagccagcagccccgccgcgacacgctcccccgagatctccagcgcccgacttggcagatccagcaagctgcacccaccgcaggcgtgatctcctctcttggatcccgaagatggcggcgggaacggaggcctttgaggcatacttccgccgcgcggatttggaccaggacggccgcatcagcggccaggaagctgtcgccttcttccagggcgccaacctgccgcagccagtcctcgcccaggtatggatgcacgccgatcagaacaagactggtttcctcggccgcccggaattcttcaacgcgctgcgcctggtcaccgtagcgcagagcgggcgtcagctcacgcccgacatagtgcagtcggcactgtatggtcccgccgcggctcgaattccagctcccaagatagccgcgggggcggctcgttcacagatgggtgctgcgggggcgcctaggcctcaggggagcgctgcgatgacgcccgggcaggttggagcagctcagatgaatccggctggcacaccaaggccccagggaagcggtatgatgccgacatctacccaagttagtatgctgcaggtgaaccctggtgctgctccaaggccccaagggatcagttctatgatgccagctgcgagtcagggtggtgctctacaagcaactcaatttgctgcaccaagggcaatgcagccacagcctcctaacctgggaattactcaacagcaaccttctagtaccggtttcatgcggccaccacaggttggaactccagcagcttcatttcaagctcaagcgcctggaatcaatcaaggtttggtccatggaggcagcatggaaggatctatcagttggcaaggcggtaatgctgcctcagttggaggcatcccacgagctataccaggagctgctccttctcagacaacacgtggatttggtccaggtttacctagcacaatgggcatggtgcctggacaacaggtacaagcaatgtcttcatcgccattgcctccacagagcaacagtgctgttttgcctcagaattcaaaagctttggtactgtctggaaatggccctgccagcagctctggatcaagcacagacatcttctctgcacttacacagccaaagccaagcttatctgcacctcagacaagctcgattccgagttcatccagttttatggccacgcctactggctcccagaacctgactaatctcactcagtttggttctttgcaaggtagcagccaacctcaacagactcagcctatcgtaaagtccattcctgctccagctacacctgttgtctctgctgggatttctaattcagcttctcaatggcccaaaattactcaaccggacatccagaagtacatgaaagtctttggggatgttgatagggacagagatggcaaaataactggtgcagaagctcgcactctgttcctcagttggaggcttccaagggaggtcctgaagcaagtgtgggatttgtctgaccaagacaatgatggcatgctttctttgagagagttttgcatcgctctttatttaatggagaggcaccgagctggaattcctcttcccccagcccttcctgactctcttaggcatgatgagacactgttacgagctacaggcttgccttcaacagcatacaatagtccatcatggcaacacaatcaaggaggataccacaaagaggccctggagcacctggggtgcctgctggtggtgtgcggccacccttgccatcacatttgcattcacaaactgatggagctagcagacaagggcaaccaagatctcacatgcctgggatggataatcatgtggtaattcaaggaaacaaagatgacaaaagtgcgctgaaccaggctgcacaggaggtggtggatgctcctaagaaggttgaggtggagaagcaggtcctggattccagagagaaattggagtattaccgcacaaagatgcaagatcttgtcctgtataaaagtcggtgcgagaataggctgaatgagattacagaaagggcgtcctctgataaacgcgaggtggaatcattggctaagaaatatgaagagaagtacaagcaagtagctgagttagcttccaaactagcagttgaagaagctgcatatcgtgatgttcaggagagaaaagttgagctgcatgatgcactgattaaaatggtacaaggtggaagtgttgatggtttacttcaggttcgagctgatcgaatccaatatcaattagaagagatggaaaaagctcttagtgaacggtgcaaacactttgaacttaaattcaaaccatctgcatcagttgagcttccttccggttgggaacctgggccacaagagggactcattgagtgggatgaagactgggataaatttgaagatgaaggttaaatacttccactgcattctcctctgctattactcaagcatccctgaagtctggttactttttaaagctggcaattgtctgtttatatatcggagtactctgcatggttgcaagctgagttttgcaatccagtgtttgccatgctactgttttaaaaaatatttgtgactttactactgtgtgttttaagaaattcaatactagtaactaatctgtgaaagagacaaaagatttcataccttttacacgtgttaacgtatactagcaaagccatatcctgaaataagcaaccttgactgtttctaagcttgatatttgtgtagctgatattatttattagtgccatttatggagataatttttctgctatgatatccttgtttaggttcctttcattgaacataccaagcccccgcctctgttctagtgaaccttctgttgttagaacattgtttgtgtgatatactgtacatagattttgatgacatgagctattgttaattttgtgtcttacacttggggcaattttttccctttcatttccaatttatcacatcgtattccttattgaatcatatgacatgacagggtttagtattgttaaggataatggtacaatacaggaaaacccagtttctgctgaaaatggaaaagtgccatctctttgggatgatggtgatatgtctcctgttgcatcctctaatggtcatatcaaggaagaaaggcgttacagtggaggtgatcaagtggctgagagtgaaatagcatatgattttggtgatgaatctgtgaggagtcctggcagtgctggaagaagtgcctcagggagtccatttaaatcttccggctttggcatgcatgactcatctcccagcaaaagagaaagttacagtgaccatggtggttctgaatccgtttttggtgacaagtttgctgatgaaacttcctggaactttgatgatcaagatactgactctgtttggggttctactgtactgaacactgaggccgaccaacgcggtggcacgcataactctttctttgggtcggaggcaggctcaccaagtggcgctagtgtatttggaaagaagaggaattcattcttcgacgattctgttccaagttctcctgcatacacatctgggttctctccaaaatttggcgaaagccgtgacgatagctcctcttataacttcgggaggtttgattccttcagatcccaagacactggatccttccctcaggaaagccgtttctccaggttcgactccattagcagctccaagggcgagaatgtatcaggatttgacacagggaatagctcacgaaattttggccggtttgactcttttgatgacgccgacccattcggttcaagtggaccttttaaagcatcgggaagccggtctccacccaagttctgatatgctctctgctctgattagggttttgtgtcttgcgtcttgatttgtcaatacaaggtttagattctttgagcgaactctggcgtaacatggatttttttacctgacatttcttccattttccttatgtgcaattttcgagtccatctcacgcacaaagtggacaggtttgggtttatatctttgtttttgtaaacattttttctgtatcttgtaaattacgccaagtctgtctttgtttatatagtttacatgtatgaaacaacttctcgccatataacctattatttccttcactatattaacgttgatatggtatagcagcaggaaatgctgtacttacgttgctatggtcaaagatattagggcagttgccccagcaaaactccac

SEQ ID NO: 216551 - DNA, 3696 bp, Zea Mays
ggaactgataactcgaaggggacgattgagaaatttgtccgctcaccatctcggtcggcgacagcgggaaaccactgggcctcctgcacctgcagccagcagccccgccgcgacacgctcccccgagatctccagcgcccgacttggcagatccagcaagctgcacccaccgcaggcgtgatctcctctcttggatcccgaagatggcggcgggaacggaggcctttgaggcatacttccgccgcgcggatttggaccaggacggccgcatcagcggccaggaagctgtcgccttcttccagggcgccaacctgccgcagccagtcctcgcccaggtatggatgcacgccgatcagaacaagactggtttcctcggccgcccggaattcttcaacgcgctgcgcctggtcaccgtagcgcagagcgggcgtcagctcacgcccgacatagtgcagtcggcactgtatggtcccgccgcggctcgaattccagctcccaagatagccgcgggggcggctcgttcacagatgggtgctgcgggggcgcctaggcctcaggggagcgctgcgatgacgcccgggcaggttggagcagctcagatgaatccggctggcacaccaaggccccagggaagcggtatgatgccgacatctacccaagttagtatgctgcaggtgaaccctggtgctgctccaaggccccaagggatcagttctatgatgccagctgcgagtcagggtggtgctctacaagcaactcaatttgctgcaccaagggcaatgcagccacagcctcctaacctgggaattactcaacagcaaccttctagtaccggtttcatgcggccaccacaggttggaactccagcagcttcatttcaagctcaagcgcctggaatcaatcaaggtttggtccatggaggcagcatggaaggatctatcagttggcaaggcggtaatgctgcctcagttggaggcatcccacgagctataccaggagctgctccttctcagacaacacgtggatttggtccaggtttacctagcacaatgggcatggtgcctggacaacaggtacaagcaatgtcttcatcgccattgcctccacagagcaacagtgctgttttgcctcagaattcaaaagctttggtactgtctggaaatggccctgccagcagctctggatcaagcacagacatcttctctgcacttacacagccaaagccaagcttatctgcacctcagacaagctcgattccgagttcatccagttttatggccacgcctactggctcccagaacctgactaatctcactcagtttggttctttgcaaggtagcagccaacctcaacagactcagcctatcgtaaagtccattcctgctccagctacacctgttgtctctgctgggatttctaattcagcttctcaatggcccaaaattactcaaccggacatccagaagtacatgaaagtctttggggatgttgatagggacagagatggcaaaataactggtgcagaagctcgcactctgttcctcagttggaggcttccaagggaggtcctgaagcaagtgtgggatttgtctgaccaagacaatgatggcatgctttctttgagagagttttgcatcgctctttatttaatggagaggcaccgagctggaattcctcttcccccagcccttcctgactctcttaggcatgatgagacactgttacgagctacaggcttgccttcaacagcatacaatagtccatcatggcaacacaatcaaggaggataccacaaagaggccctggagcacctggggtgcctgctggtggtgtgcggccacccttgccatcacatttgcattcacaaactgatggagctagcagacaagggcaaccaagatctcacatgcctgggatggataatcatgtggtaattcaaggaaacaaagatgacaaaagtgcgctgaaccaggctgcacaggaggtggtggatgctcctaagaaggttgaggtggagaagcaggtcctggattccagagagaaattggagtattaccgcacaaagatgcaagatcttgtcctgtataaaagtcggtgcgagaataggctgaatgagattacagaaagggcgtcctctgataaacgcgaggtggaatcattggctaagaaatatgaagagaagtacaagcaagtagctgagttagcttccaaactagcagttgaagaagctgcatatcgtgatgttcaggagagaaaagttgagctgcatgatgcactgattaaaatggtacaaggtggaagtgttgatggtttacttcaggttcgagctgatcgaatccaatatcaattagaagagatggaaaaagctcttagtgaacggtgcaaacactttgaacttaaattcaaaccatctgcatcagttgagcttccttccggttgggaacctgggccacaagagggactcattgagtgggatgaagactgggataaatttgaagatgaaggaaaacccagtttctgctgaaaatggaaaagtgccatctctttgggatgatggtgatatgtctcctgttgcatcctctaatggtcatatcaaggaagaaaggcgttacagtggaggtgatcaagtggctgagagtgaaatagcatatgattttggtgatgaatctgtgaggagtcctggcagtgctggaagaagtgcctcagggagtccatttaaatcttccggctttggcatgcatgactcatctcccagcaaaagagaaagttacagtgaccatggtggttctgaatccgtttttggtgacaagtttgctgatgaaacttcctggaactttgatgatcaagatactgactctgtttggggttctactgtactgaacactgaggccgaccaacgcggtggcacgcataactctttctttgggtcggaggcaggctcaccaagtggcgctagtgtatttggaaagaagaggaattcattcttcgacgattctgttccaagttctcctgcatacacatctgggttctctccaaaatttggcgaaagccgtgacgatagctcctcttataacttcgggaggtttgattccttcagatcccaagacactggatccttccctcaggaaagccgtttctccaggttcgactccattagcagctccaagggcgagaatgtatcaggatttgacacagggaatagctcacgaaattttggccggtttgactcttttgatgacgccgacccattcggttcaagtggaccttttaaagcatcgggaagccggtctccacccaagttctgatatgctctctgctctgattagggttttgtgtcttgcgtcttgatttgtcaatacaaggtttagattctttgagcgaactctggcgtaacatggatttttttacctgacatttcttccattttccttatgtgcaattttcgagtccatctcacgcacaaagtggacaggtttgggtttatatctttgtttttgtaaacattttttctgtatcttgtaaattacgccaagtctgtctttgtttatatagtttacatgtatgaaacaacttctcgccatataacctattatttccttcactatattaacgttgatatggtatagcagcaggaaatgctgtacttacgttgctatggtcaaagatattagggcagttgccccagcaaaactccac

SEQ ID NO: 216552 - DNA, 3774 bp, Zea Mays
atttttttttaaaaaaaaatcgggagtctagctaacgaattcatttttgagcggttaaaggaactgataactcgaaggggacgattgagaaatttgtccgctcaccatctcggtcggcgacagcgggaaaccactgggcctcctgcacctgcagccagcagccccgccgcgacacgctcccccgagatctccagcgcccgacttggcagatccagcaagctgcacccaccgcaggcgtgatctcctctcttggatcccgaagatggcggcgggaacggaggcctttgaggcatacttccgccgcgcggatttggaccaggacggccgcatcagcggccaggaagctgtcgccttcttccagggcgccaacctgccgcagccagtcctcgcccaggtatggatgcacgccgatcagaacaagactggtttcctcggccgcccggaattcttcaacgcgctgcgcctggtcaccgtagcgcagagcgggcgtcagctcacgcccgacatagtgcagtcggcactgtatggtcccgccgcggctcgaattccagctcccaagatagccgcgggggcggctcgttcacagatgggtgctgcgggggcgcctaggcctcaggggagcgctgcgatgacgcccgggcaggttggagcagctcagatgaatccggctggcacaccaaggccccagggaagcggtatgatgccgacatctacccaagttagtatgctgcaggtgaaccctggtgctgctccaaggccccaagggatcagttctatgatgccagctgcgagtcagggtggtgctctacaagcaactcaatttgctgcaccaagggcaatgcagccacagcctcctaacctgggaattactcaacagcaaccttctagtaccggtttcatgcggccaccacaggttggaactccagcagcttcatttcaagctcaagcgcctggaatcaatcaaggtttggtccatggaggcagcatggaaggatctatcagttggcaaggcggtaatgctgcctcagttggaggcatcccacgagctataccaggagctgctccttctcagacaacacgtggatttggtccaggtttacctagcacaatgggcatggtgcctggacaacaggtacaagcaatgtcttcatcgccattgcctccacagagcaacagtgctgttttgcctcagaattcaaaagctttggtactgtctggaaatggccctgccagcagctctggatcaagcacagacatcttctctgcacttacacagccaaagccaagcttatctgcacctcagacaagctcgattccgagttcatccagttttatggccacgcctactggctcccagaacctgactaatctcactcagtttggttctttgcaaggtagcagccaacctcaacagactcagcctatcgtaaagtccattcctgctccagctacacctgttgtctctgctgggatttctaattcagcttctcaatggcccaaaattactcaaccggacatccagaagtacatgaaagtctttggggatgttgatagggacagagatggcaaaataactggtgcagaagctcgcactctgttcctcagttggaggcttccaagggaggtcctgaagcaagtgtgggatttgtctgaccaagacaatgatggcatgctttctttgagagagttttgcatcgctctttatttaatggagaggcaccgagctggaattcctcttcccccagcccttcctgactctcttaggcatgatgagacactgttacgagctacaggcttgccttcaacagcatacaatagtccatcatggcaacacaatcaaggaggataccacaaagaggccctggagcacctggggtgcctgctggtggtgtgcggccacccttgccatcacatttgcattcacaaactgatggagctagcagacaagggcaaccaagatctcacatgcctgggatggataatcatgtggtaattcaaggaaacaaagatgacaaaagtgcgctgaaccaggctgcacaggaggtggtggatgctcctaagaaggttgaggtggagaagcaggtcctggattccagagagaaattggagtattaccgcacaaagatgcaagatcttgtcctgtataaaagtcggtgcgagaataggctgaatgagattacagaaagggcgtcctctgataaacgcgaggtggaatcattggctaagaaatatgaagagaagtacaagcaagtagctgagttagcttccaaactagcagttgaagaagctgcatatcgtgatgttcaggagagaaaagttgagctgcatgatgcactgattaaaatggtacaaggtggaagtgttgatggtttacttcaggttcgagctgatcgaatccaatatcaattagaagagatggaaaaagctcttagtgaacggtgcaaacactttgaacttaaattcaaaccatctgcatcagttgggaacctgggccacaagagggactcattgagtgggatgaagactgggataaatttgaagatgaagggtttagtattgttaaggataatggtacaatacaggaaaacccagtttctgctgaaaatggaaaagtgccatctctttgggatgatggtgatatgtctcctgttgcatcctctaatggtcatatcaaggaagaaaggcgttacagtggaggtgatcaagtggctgagagtgaaatagcatatgattttggtgatgaatctgtgaggagtcctggcagtgctggaagaagtgcctcagggagtccatttaaatcttccggctttggcatgcatgactcatctcccagcaaaagagaaagttacagtgaccatggtggttctgaatccgtttttggtgacaagtttgctgatgaaacttcctggaactttgatgatcaagatactgactctgtttggggttctactgtactgaacactgaggccgaccaacgcggtggcacgcataactctttctttgggtcggaggcaggctcaccaagtggcgctagtgtatttggaaagaagaggaattcattcttcgacgattctgttccaagttctcctgcatacacatctgggttctctccaaaatttggcgaaagccgtgacgatagctcctcttataacttcgggaggtttgattccttcagatcccaagacactggatccttccctcaggaaagccgtttctccaggttcgactccattagcagctccaagggcgagaatgtatcaggatttgacacagggaatagctcacgaaattttggccggtttgactcttttgatgacgccgacccattcggttcaagtggaccttttaaagcatcgggaagccggtctccacccaagttctgatatgctctctgctctgattagggttttgtgtcttgcgtcttgatttgtcaatacaaggtttagattctttgagcgaactctggcgtaacatggatttttttacctgacatttcttccattttccttatgtgcaattttcgagtccatctcacgcacaaagtggacaggtttgggtttatatctttgtttttgtaaacattttttctgtatcttgtaaattacgccaagtctgtctttgtttatatagtttacatgtatgaaacaacttctcgccatataacctattatttccttcactatattaacgttgatatggtatagcagcaggaaatgctgtacttacgttgctatggtcaaagatattagggcagttgccccagcaaaactccac

SEQ ID NO: 216553 - DNA, 3876 bp, Zea Mays
atggctgccgatcgtgcatggatgtacaatggttggagtaggaatggacgtcattctgatgattgggtagccaagaccaaagaatttgtggaccacgtattcgccttgtccttaaccggcactgtcagatgcccttgtaggcatcacgaaaacagtatatttcttaataaggaaagagttagcctagatctttgtcagtttggatttatgcccggatatgaggtgtgggaacatcatggtgaggtagtacccaaccgtaatgtagaagaggaggagaacaatgattgggctggcgatgatgcgatgcatgagatgctagattcgctacgtccagaattcaacctaagctccgaggatcctgccacaccagaggaagaggaggacgacgaggaggaggtgcaacaccatgaggaggaggacgagcaggcccatgaggaggatgacgaggaggaggtgcaacaccatgaggaggaggacgagcaggcccatgagggcatagatgctgaggcggatgacgataccactgaggctcctgtcgttcgacgaaggggcactcggaagggccactttgtcctacctccgtcagcgcctgcacaatctgaagctcgagtactgatcatcccggttggtgatagccaatgggaagacacgtcatttgacggtcgaggtcaccatagacaggttaatcaagtcttaggaaagagacgctatcgtgtggaacctgaggctcaagagcatgcagaccgagtattagagaaaaatgcgaagaaggtgtgcagggatgcattttccaatgctcgtctacaggttgggaacgcgtacatgaaacgccgaggtcattctatcaacaactttcgacaatattcagatgtctacttgactgtagacgagtacatggaggtaactcttccatggatggaacaccggccgcaggcttacaaggctttgtgtgagatatgggcttcgcccgagtggattgagaagtcaaacagaaatcgacataggcagcgccatcagcaggacgaggacgatgatgaggtcgtagtcaaccatacctatggggctgatggacacattcggttggctaagcgaatggaggctcaaactggagttgtcccgagcccaatcgatgtttataggagagggcatcgagcgaaaaacaatgaaatctccgatgagctgtgtagtcaagcggtcgttgagcgtatggaaacatacgggcaggagatggttaagaagtatggagaagactacgattggcgaggagcgcctaccatcgacgctgaagttgtgcattcacttggaggcaaggcgcatggacgatattctatgtttaccggtgttatcgattcgacggagttgcgttctcgtggcggctcttcgtcgcaggcgggctgtggtagtagcagacatagtcgtcgctctgtatctagcatggaggaagctatgagggagcagcaagaaaagtttcgtgaagagctgcggcaacaacaaatggcatttctccaacagcaatcagagtacatggttgcttacaacgcacaggcgcaacaagcaatgaactcttggtttccacagcaggcacagcagcaaccatttgttttccctcaatttcagctgtcgatgcctcagtggggattacatgctccgacacctccacctccacatcagggatccagggtcataggccacaacacgccatcactggtcatatcagcaccaggaggagcttatgcaggggagggagcttatgcaggagaggatccaaacccgtcacacggcttcgtcaaccagtttttggcttctgaagccagcaaatgtctaggaggagcgtcaggtctgaattcaacccagatggtaaccctcaaggttgatgcctcgccaaagcttgctcgaaagatccccgatacattccttggggtgttctttgaggagatgggccacggaggagctggtgggatatgggcagaactggtcagcaacagaggtttcgaagcaggaggccccaatactccgtcgaacattgacccctggctcatcgttggggacgactcctccgtctatgtggagactgatcgttcctcatgtttcagtcgaaacattgttgctctaaggatggaggtcctctgcaatgactgcccggctggcggtgttggcatttacaaccctggattctggggcatgccctatgtttggaccagaagagggtctttgatcatccaggctctcttgaaatattggttctgcagagttgcaggggattccaagtggataaaggtggagaagaagttggttgctaaaggaactaacagaacctcgaggcttcaaataacatccaagaagaaaggaactgtttggttggaccaagtgtcactcatgcctgcagatacatacaagggacatggttttcgtaaaggacttgtgtccatgctgatggatctaaaaccacgattcctaagatttcctgggggttgctttgtggaaggtggttggctaagaaacgcattcagatggagacaatccattggtccatgggaagagaggccaggacacttcggagattgttggcagtactggaccgacgatggtcttggatattatgaatttcttctgctttctgaggacataggtgctgccccaatctgggtattcaacaatggaatcagctacaacgatgaagttaatactgctactattgccccctttgtgaagaatttgctagaggcagtgcgaattcgacatggggctctgttagagccaaaatggggcatccctaaaccatttccagtcaagtatgttgcaattggaaatgaagattgtgagagaaagttttatagaggtaattacctcaagttttacaacgctataagagaggtctatccagacattcaactgatttcgaactgtgatggctcgtccggaccacttgatcatcctgctgacatatacgatttccacgtctatgccgatgctaagactctgttttccatgaagagcacgtttgacaagtcaccccgcagtggacccaaggcttttgtcagcgagtatgcagtttggaaaactgacgccggtagaggaactctcctggctgcattggcagaagcggctttccttactggactggagaagaacagtgatgctgttgagatggcttgccatgctccactattcgtaaacgatgatatcgagaaaaagtggaacccagacgtcatcgtcttcaacacctggcagcattacgggactcctagctactggatgcagaagcttttccgcgagtccagtggcgccatggttcatccgacgacgacgatcagttctggcagctctgctgattctctagcagcgtctgcaattacctggaaggattcagagaataatgactcgttcctaagagtaaaggcaagactacgatctgtactcataccagaagctcttgtgcagattgtaaactttggatctgatgctattagagttgcaatctccacagctggacttcaagctaccatcgatgtgctgcgatcgaccgctactgttctcacatcaaccgctgtgatggacgaaaactctttcagtaacccaaacaaggtcatgccggtcaagagccagctattcgacgcaggagcgcagatgcaagtcacgctgtctcctcactcattaacatctttcgatcttgctctggctacgtcgaaacttgtcacgttgtctgatgcctgaactgtgatgcacatttgtctgtatttgaggagatgtcagtgtagtgtaaagagttgtgtgctgatgatgaactgaacaaaaatgacactgcgatccacgtttttatctgtttggaggtgtccctttcaaagaaaaatttgtggagatgccactgcaattcct

SEQ ID NO: 216554 - DNA, 3193 bp, Zea Mays
atcgctgtcatcgcgtattagggacggccatagcagagaggattcttccacggagacttgcccgtaaagcgcgatggagctggtaacctcaagacctgacgccgatcatgtggaggggatggttttggattagaaaacgggaaaagctgcagaaatcttcaaacgggaaaacataccatggagcagttaactctaatccaacttctattttgcacattacttttcccacctttctctcccccgtttaaggatgataatgaagagaggggaagatggggagcattgttcaatttttgctgccaatgtatttccttgaaaggaaaagaagagaaagaaatcgagttctgagccccaacgatacctttgagcaaataaagggaatacatcaattatctgttccaggcacaggccctagaagttgaggtttccccctctgaaattccaataaaataccagtctggagactctatagaattacataaagacctcattcacaattgctagtttggaacttcgaataagaatttcgtgaagtctactgttggatcaagagtacctggcttcatgcactgaacttttatggtaatgaagatattcaccaagaatcatctgccaagtttaatagagatcagatgcattcagtcaagtggaagggcataaatgtgcttctgagccacctttgtcctaagtgttctaagaaacatgatgacacaacttcaggaagccaaaccactggatgcacatgttggcaatggttcttcacaccatctactagtaatgatactgcaaatgtagcaagtgccaatggtggaaatacttctcaggtagaagaaaaggttcttgctcctagttacaagttggacaatgcagagacttcagtttcagctgttggccaccatacgaaatcaagcatgcaccatagactgaaaatatggatcagcagcgggcataatggaataatgggaaaatatgggaataagttagaattgggtatgccccatgaagctaggccattattattagatgaacatgcaaaacctggatggccagattggctcataaatgtggcaccagaggcagtgcgaggttggtttcctcggcgccaagattcatttgagaaattagacaaggttggacaaggaacttatagcagtgtctacaaagcccgagatcttaaaactgacaagtttgtcgcactaaaaaaggtgcgttttgtcaatgtggatcctgagagcgtgcgctttatggctagagagattcttattctacggaaactcaatcatccaaacatcatcaagttggaagggatcgtaacatcttcggtttcacgaagcctgtatcttgtatttgagtacatggaacatgatcttgttggtcttgctgcgactcctggccttaagtttactgagccacaggtcaaatgtttatttcagcagttacttagtggcctcgatcattgccatagcaatggagtgctgcatcgggacctaaagtgttccaacctcttgattgataacaatggtgttctgaagattgcggactttggtctagcaacctcatttgatcctgacaatcagcaaccattgactagccgtgttgcaacactgtggtacagaccacctgaacttcttctcggtgccaccaagtatggcccttctgtggatttgtggagcacagggtgcatttttgcagaactgcttgctggcaaaccaatcttgcctggaagaactgaggtggagcaacttcacaaaattttcaagctctgtggatcacctcctgatgactattggagtaaactggaagtaccacaagcagggatgttcaagcccagccgacagtatagtgggtgcattgctgagacatttaaagattttccaaactcagttgttcttctagataacttgcttgcactacaaccatatgctcgtggaacagctgctgagactctccgaagtgattttttcaggcaaaaaccacttgcttgcagcccctcaagcttaccgaagtgtcctccaagtaaagagtatgatgctagacttcgaatggaagaagcaaggcggaaaagaaaggcagctgagagtgtaagtggatttggatccatcgagacagaagatgtaaatcctttagcaagcgggaatacaaaggttgctatgattagacctgaatctgctgatgcaaggaatgcaatacttggttctcagaacaacaatctgggtttgaagggcccagctgtgaacaagggcaagagcagaatatatcagcactcaggttcaatgattacagcaaaaggaaacgtggagcagatgctcaaggagcatgaaaagaatatccaagaagcagtgcgcaaagcgcgcctcagcaagcacagagagttgtgaagcaggttgctgaggataaagtgttgatcatactgtcatttgcgtgttttgactcatgctactccgaaaccagataaaaagattaagttgccgttgcattgattcaatcctgggaagatcaaccacctgttagattggcatggagttccacacttccactacaggttatgcccagcagtttctgaaacatcacccgctttgtagtgccctgtgttgcagcagctttcttcttacctgaagcttcgaagcagatatcagtggtagcctggtaggagaggctgatggtgtggtgctctcagctaggcttacaccaccaaggccccatcctctagatcatttgaaaatttggcacagaaaggccttcgacagccgctcttctgctggacagacagatccatagaaaccgatatgcagcagtcatatattaatgtaataaattattatgcctgccacagggcaagtgctgcttctagcatactccaggtgtttgtaatttggtccggttttccgaccttgcagtatgaacagcgtcttcgttattctagcaactgttcatgattttgggatccacaagaagcagagcttggagctaccatttcggttgcaaaattgaggttccatttgacacaaatgttttcgttttaaaaaatattacgaatcaaaccctaatctggtaacagatcaaatcaagaagcagtggtttcaagttcaaaatgttgagaagtttgttatgagatcacaagacattttctacagcattgctccaattaaactatttgtattaagagtaaacaaaagctgtcggcatatctgac

SEQ ID NO: 216555 - DNA, 2999 bp, Zea Mays
catcgcgtattagggacggccatagcagagaggattcttccacggagacttgcccgtaaagcgcgatggagctggtaacctcaagacctgacgccgatcatgtggaggggatggttttggaaaacgggaaaagctgcagaaatcttcaaacgggaaaacataccatggagcagttaactctaatccaacttctattttgcacattacttttcccacctttctctcccccgtttaaggatgataatgaagagaggggaagatggggagcattgttcaatttttgctgccaatgtatttccttgaaaggaaaagaagagaaagaaatcgagttctgaggcacaggccctagaagttgagagtacctggcttcatgcactgaacttttatggtaatgaagatattcaccaagaatcatctgccaagtttaatagagatcagatgcattcagtcaagtggaagggcataaatgtgcttctgagccacctttgtcctaagtgttctaagaaacatgatgacacaacttcaggaagccaaaccactggatgcacatgttggcaatggttcttcacaccatctactagtaatgatactgcaaatgtagcaagtgccaatggtggaaatacttctcaggtagaagaaaaggttcttgctcctagttacaagttggacaatgcagagacttcagtttcagctgttggccaccatacgaaatcaagcatgcaccatagactgaaaatatggatcagcagcgggcataatggaataatgggaaaatatgggaataagttagaattgggtatgccccatgaagctaggccattattattagatgaacatgcaaaacctggatggccagattggctcataaatgtggcaccagaggcagtgcgaggttggtttcctcggcgccaagattcatttgagaaattagacaaggttggacaaggaacttatagcagtgtctacaaagcccgagatcttaaaactgacaagtttgtcgcactaaaaaaggtgcgttttgtcaatgtggatcctgagagcgtgcgctttatggctagagagattcttattctacggaaactcaatcatccaaacatcatcaagttggaagggatcgtaacatcttcggtttcacgaagcctgtatcttgtatttgagtacatggaacatgatcttgttggtcttgctgcgactcctggccttaagtttactgagccacaggtcaaatgtttatttcagcagttacttagtggcctcgatcattgccatagcaatggagtgctgcatcgggacctaaagtgttccaacctcttgattgataacaatggtgttctgaagattgcggactttggtctagcaacctcatttgatcctgacaatcagcaaccattgactagccgtgttgcaacactgtggtacagaccacctgaacttcttctcggtgccaccaagtatggcccttctgtggatttgtggagcacagggtgcatttttgcagaactgcttgctggcaaaccaatcttgcctggaagaactgaggtggagcaacttcacaaaattttcaagctctgtggatcacctcctgatgactattggagtaaactggaagtaccacaagcagggatgttcaagcccagccgacagtatagtgggtgcattgctgagacatttaaagattttccaaactcagttgttcttctagataacttgcttgcactacaaccatatgctcgtggaacagctgctgagactctccgaagtgattttttcaggcaaaaaccacttgcttgcagcccctcaagcttaccgaagtgtcctccaagtaaagagtatgatgctagacttcgaatggaagaagcaaggcggaaaagaaaggcagctgagagtgtaagtggatttggatccatcgagacagaagatgtaaatcctttagcaagcgggaatacaaaggttgctatgattagacctgaatctgctgatgcaaggaatgcaatacttggttctcagaacaacaatctgggtttgaagggcccagctgtgaacaagggcaagagcagaatatatcagcactcaggttcaatgattacagcaaaaggaaacgtggagcagatgctcaaggagcatgaaaagaatatccaagaagcagtgcgcaaagcgcgcctcagcaagcacagagagttgtgaagcaggttgctgaggataaagtgttgatcatactgtcatttgcgtgttttgactcatgctactccgaaaccagataaaaagattaagttgccgttgcattgattcaatcctgggaagatcaaccacctgttagattggcatggagttccacacttccactacaggttatgcccagcagtttctgaaacatcacccgctttgtagtgccctgtgttgcagcagctttcttcttacctgaagcttcgaagcagatatcagtggtagcctggtaggagaggctgatggtgtggtgctctcagctaggcttacaccaccaaggccccatcctctagatcatttgaaaatttggcacagaaaggccttcgacagccgctcttctgctggacagacagatccatagaaaccgatatgcagcagtcatatattaatgtaataaattattatgcctgccacagggcaagtgctgcttctagcatactccaggtgtttgtaatttggtccggttttccgaccttgcagtatgaacagcgtcttcgttattctagcaactgttcatgattttgggatccacaagaagcagagcttggagctaccatttcggttgcaaaattgaggttccatttgacacaaatgttttcgttttaaaaaatattacgaatcaaaccctaatctggtaacagatcaaatcaagaagcagtggtttcaagttcaaaatgttgagaagtttgttatgagatcacaagacattttctacagcattgctccaattaaactatttgtattaagagtaaacaaaagctgtcggcatatctgac

SEQ ID NO: 216556 - DNA, 4523 bp, Zea Mays
ggctccccaacccaatcctccagctgcggaatggcggcggcggagccgtgctgcatctcgcacgcgttcgagcgcgccactcgccaggaacccggccgcctcgccgtcatccacgcagcggcctcgggcgccgacagcgaggagcgccgcttcacttgcggcgacctcctcgccgccgtcggctccctctcccgccgcatcgccgccgcgctcggcagcaccgccaccgatacccgccgcgaccgcgagcaaggctcaggtgcgtcaacgccaatcaaccgctcggctgttcgcgcttgcttgccccccctcccctgtcgtagtctcgtgtctgactgacggagactaattcggaaccgacgcaagggtttcgggccgccggcgccgtagtgccgagggttgtcggggtatacgcctcgccatcgttggagtacgtcgccgccgtcctcgcggtgctcaggtgcggcgcggcgttcctcccgctcgacccgtcgtggccggaggagagggtctcgtgggctatctcggcgtccaacgcggcgctcgtcgtgtcttcagttgggtcgcgaggagccacgctgtttgagagcagcgcctgccctgttctgcgcttttatggtggcatccggcggcgatttcgggatggaaatggcggggatgacggggaggagcttgtctggccgtgcgagcacgagtggcaccgcaagttctgctacgtgatgttcacctctggttctaccggaaaaccgaagggtgtttgcggcactgagaaaggtcttctgaatcgttttttgtggatgcaaagaaggaatcctctgtgttcagatgatgttttgttgtttaagacatctgtcagctttgttgaccatctacaggagttcctttctgcggtcttgacttgctcaacacttgtcattcctcccagtgagtggagagctaatccagcatccttggccaacttaattaaggtttatcggatatcaaggatgacattggttccatcacttatggagataatactacctaccctggcggaaaaactttctgatggctgtaacccacttaagatcctaatatttagtggggaagttctgtctgtatcgctgtggaagagagtctatgaatttctgccagaggctactatcataaatctgtatggaacaacagaggtttccggtgactgtgcattctttgattgcaaaaaattgcctacaattttggagcaagaagaactaaacagtgtaccaattgggtttcctatttcaaattgtgaggtttctcttgtcaccaatgatggactatcagatgaaggtgaaatctctgtcagtggagcatgcttgtttactggatatttagctgatcccatgacaagtaactgccctgaaggcagtgaagttttagcatactacagaacaggtgactttgcccggcgcctaaagacaggcgaacttattttccttggaagaaaggaccgaattgttaaaatttatgggcaccgtttctcacttgaggaggtagaatccacattgagggatcatcctgatgtcagtgacgctgctgttacttttcaaagtaatggatctctggattttaaggcatacttggtgctgaggagtaataataaatttcttaaatgtactcagggttatagtggattacattcttcccgagatatcattgcaccacttcgaaactggctcatcatgaagtttccactagctatggtcccaaggctttttatccccatgaaatcattacctttgactttgtcaggaaagattgactatgtcaagttatctagcttggtttgtgcatttgagccttgtgaaattcatccagaaagcagtccagctgatcctcatatgcaagttatcaaaaaggcattttctgatgccctactggttcatgaagtgtctgagtatgatgatttcttctccttgggtggtaactcaattactgcagcacatgtggcccacaaattggagattgacatgagattactttatatttataccaccccttctaaactttttcatggtttacttggggaacacagtcatgtaattcctccaactcctgaatttcacaacagaaagaagttgagaaaatatgcaagcatatcagattcctttggcccagtttctgaatatttggacagtaactttcatgaccaagggcagataagtaaagagggtgcatacgatcactttgcagggaatcattggcagaccatggatactaaattttcacttacaaaaggtgtggtctattggccgttgcaatagatttatgcatggttctgaagggatggtacaccttgaagatatttgttcatatgttccatataacaaaaagggttacctcgtgaaaatttggagcattcttctagattcatgtgttgatgcctcacctttgcttgtcataaacaatggaatgatgtccatctttattggttctcattcatatttgtttctttgcattgatggttatagtggttcagtgaggtggagtgtcaaattggaaggccgtatcgagtgttctgccgctataactggtgatttctcagaggttgttgttggatgctataaagggaaaatttacttccttgatatgtctacgggaaaattatcctggacctttcaaactgatggggaggtaaaaatgcaaccagttgtggacaagatgaggaatttaatatggtgtggctcgtatgaccattacttgtatgcgttaaattacaaagatcgctgctgcacatacaaagttttttgtggtggaagcatttatggatctcctgctattgacatggcacaaaatgtaatctatgtcgcatctacgagtggccttgtgactgcagtatcatttaaggaaccatccttcagagttctttggcaatatgaagctggtgcgccaatttttggttctctcgccatagatcatcaaagtggaacagttatttgttgtttagtgaatggcctagttatgacattgaactcacaaggttctgttgtttggaaggtaatttttctgatgcaccttgtttttatagccagaggtaatgtgtatgcatagttgagtaagaaagaaagagctattgatgcttagaatctacactagtccatatataacattgtttcaatgagagcaaaaatgcacatttttcactctgatgttgtacatttgacccagtttttcttgtgtggttcattctccacatatttattagtgtctgtccaaaatccataacttgctatttaaaatgcaggcaactgttggtggtcctatttttgctggtgcatgtttgtcacccaccctccctcatcaggtgcttataccttcccgtgatggcaacttgtactcttttgatactgtgtctggtgcccttctttgggtatacaaggctggggatccaattactgcatccacttttgttgatgagctgttaacatcagtgtcatttggaccatctgagagatttgcttgtatctgcacgagttccgggaaggtccatgtcatcagaattagagtagacatcagaactagagtagatgctaagtacaatcaggagcaaggtggtgacggtgttaaatctgaggagttagttcaaggactggatgctaagtacaatcaggagcaagctggtgaaggtgctaaatctgaggagttagttcaaggactggcatccattgatcttccgggggacatattttcgtctcccttgatggttggtggacgcatctttgttggatgccgagatgatcgattacattgtctcaccgtcaccacatagtttcaagtgattttgctggaggtgatatagttttgcccatgcctgctgcccgacaacctctcttccgcgacaagggcctttggcctttcctattggtaaggtgcgtggcaggctggcagcacaacacaggccacgaatgagtttggttgaagctcctgattgcatttggtgatttgggtctccaatgattgctttccatgtctacacaagaagctttccacagcctgctctcgcctaagcaagtgctacttgatgtcttgatcaaaggacaatattctccaagaaatggttcgagtcgatccagcttcctgcaccagaaatgtactagtctctaggagtagaagttttttctttgcattaggtttcatgtttttttacttaccttgcatgcttccagaactctcgctgggaatgcacacatttttcatttcctttggctattagtagggatgccaatggagaattccccgtcgggttttggctccactatagaaaacgatccccgcggggatccctacgaactcttcctaattccccgttctctcgcggggataaattcccgtcggggatctctgtccccgtttaaattataatcatgatatacttttttttgttatgaatacaaaatattgtcacttgtatatattgtcagatgttagaaatcattatgtatacatcaaaataaatatatttgtataacgagtgatatcttaacaatgtgattatttatttt

SEQ ID NO: 216557 - DNA, 1754 bp, Zea Mays
ccacctaatctggtaataaagaagaatcagccccccaccagttggaacctgtctgtatgcggcactgcggcgcccgtggggcccaccacggcgccgccggcagcgtcaccaacccccacctccgccctcccaccggcactcccctcgcctgctccacgacgcttatgcgctcgcgtcccgctctcgccgcccacctccggcgcctgctcctcctctctccctccgcccacctcatcatcatccgccgcgccatggcctccgccgccgccgcgcaggcgcagccaggtggcgccccaccggcgaccgcggagtacgaggaggtgctggggcggctctcctcgctcatcacgcagaaggtgcgcgcgaacagcgccaaccgcggcaaccagtgggacctcatggagcactacgtcaagattctggagctggaggagtcgatcgcgcggatgaaagtgattcacgtcgcggggaccaaggggaagggttccacatgcacattcaccgagtcaatcctgcgatcgtgtggcttccatactgggctgttcacctcaccacatttgatggatgttagagagcgatttcagctagatggggttaatatttctgaagagaaatttttgaagtacttctggtggtgctggaacaagttgaaggagaagactgatgatgatattcccatgccagcctatttcaggttcctcgcgttgctcgcattcaagatattttctgctgagcaggtagatgttgctgttcttgaggttggcctaggagggaagtttgatgcaactaatgtggttaaagcacctgtagtttgtggcatatcttcccttggatatgatcatatggaaatccttgggaatacacttggagaaatcgcaggagagaaggctgggattttcaagaaaggagttccggcctatactgctccacaaccagaagaggcaatgactgctctcaaacaaagagcttcggaattgggtgtctctctccaagtcgttgatcctctggagccccatcacctaaaagatcagcatcttgggctgcatggagaacatcaatatataaatgctggccttgcagttgctttggctagtacgtggcttgagaagcagggacataaagatacgttaccactcaatcgtactgatcccttaccagatcattttattagagggctatcaagtgcttctttgcaaggccgagcacagattgttccagattcacaagtgaattcagaagaggacaaagattgttctcttgttttttatttggatggagcgcacagtcctgaaagcatggaagtatgtggcaagtggttttcccatgtcacaaaggatgatacaaggctaccatcttctttggagcagtctcatacatctaggtctcaaaagatccttctgttcaactgcatgtctgtgagagatccgatgagattgcttccttgtctcctggatgcatcaactcaaaatggagtccactttgacctggccctatttgtgccgaaccaatcacaacacacgaagcttggttctaacacttcagcaccagcggagcctgagcaaatcgatttgtcatggcagctgtcacttcaaacagtgtgggagaagttacttcaggataaaggtataaatactacaaaatccagcgacactagtaaagtttttgattcgcttccggtcgcaatcgagtggctaaggagaaatgcccgagaaaaccaatctacttctttccagtaaatcaagcttggaaagatt

SEQ ID NO: 216558 - DNA, 1754 bp, Zea Mays
ccacctaatctggtaataaagaagaatcagccccccaccagttggaacctgtctgtatgcggcactgcggcgcccgtggggcccaccacggcgccgccggcagcgtcaccaacccccacctccgccctcccaccggcactcccctcgcctgctccacgacgcttatgcgctcgcgtcccgctctcgccgcccacctccggcgcctgctcctcctctctccctccgcccacctcatcatcatccgccgcgccatggcctccgccgccgccgcgcaggcgcagccaggtggcgccccaccggcgaccgcggagtacgaggaggtgctggggcggctctcctcgctcatcacgcagaaggtgcgcgcgaacagcgccaaccgcggcaaccagtgggacctcatggagcactacgtcaagattctggagctggaggagtcgatcgcgcggatgaaagtgattcacgtcgcggggaccaaggggaagggttccacatgcacattcaccgagtcaatcctgcgatcgtgtggcttccatactgggctgttcacctcaccacatttgatggatgttagagagcgatttcagctagatggggttaatatttctgaagagaaatttttgaagtacttctggtggtgctggaacaagttgaaggagaagactgatgatgatattcccatgccagcctatttcaggttcctcgcgttgctcgcattcaagatattttctgctgagcaggtagatgttgctgttcttgaggttggcctaggagggaagtttgatgcaactaatgtggttaaagcacctgtagtttgtggcatatcttcccttggatatgatcatatggaaatccttgggaatacacttggagaaatcgcaggagagaaggctgggattttcaagaaaggagttccggcctatactgctccacaaccagaagaggcaatgactgctctcaaacaaagagcttcggaattgggtgtctctctccaagtcgttgatcctctggagccccatcacctaaaagatcagcatcttgggctgcatggagaacatcaatatataaatgctggccttgcagttgctttggctagtacgtggcttgagaagcagggacataaagatacgttaccactcaatcgtactgatcccttaccagatcattttattagagggctatcaagtgcttctttgcaaggccgagcacagattgttccagattcacaagtgaattcagaagaggacaaagattgttctcttgttttttatttggatggagcgcacagtcctgaaagcatggaagtatgtggcaagtggttttcccatgtcacaaaggatgatacaaggctaccatcttctttggagcagtctcatacatctaggtctcaaaagatccttctgttcaactgcatgtctgtgagagatccgatgagattgcttccttgtctcctggatgcatcaactcaaaatggagtccactttgacctggccctatttgtgccgaaccaatcacaacacacgaagcttggttctaacacttcagcaccagcggagcctgagcaaatcgatttgtcatggcagctgtcacttcaaacagtgtgggagaagttacttcaggataaaggtataaatactacaaaatccagcgacactagtaaagtttttgattcgcttccggtcgcaatcgagtggctaaggagaaatgcccgagaaaaccaatctacttctttccaggttaatagcaggtggtcgaag

SEQ ID NO: 216559 - DNA, 418 bp, Zea Mays
cttactatctgaggatgaatctgctaagaaacaggggataagagttcaagtcaggagcgtctatattgaaagccggagccaaccattgaaagggcaattcttttttgcttatagaattagaattacgaatagttctcagcgccctgttcagcttctcaaaaggcactggattgttacagatggaaatggaaggacagaaaacatttggggagttggagtagtgggagaacaacctgtcatattcccgaagactggttttgagtactcttctgcatgcccattgagcactccaaatgggagaatggaaggtgactttgagatgaagcacatcgacaaggctggatcatcaacattcaatgttgcatttgcgccattctctctgtcaattcttggtgacgataatgatgttctgctatga

SEQ ID NO: 216560 - DNA, 3591 bp, Zea Mays
atatgcagccactctctcctgtcatcctgtgtcctcgtcctttccacccaaaatccccgatcctcgaatcgattaaaccctaagcggcatggcgggtagcgactactgccggccggcagtgcgcccgcgcgacttctgagccaccggaagccgcccttgtcccggctccactgtcgcgtgccccatccaacactgggggagtgggagttcagagccgcaaacgctcagggcaaccgggaggacgggaaggtgtggccgcaaccgcaagacgcaggcaagaggcaatcaactcaccgatgtctcagtcaccgggaggacgggaaggcatatattacagcaggcagaggaaaccttcggaacgcaacggcagtgtatttacacccatagctgcaatgtatcccagcggtcacgcacttcctgatgcaaacaggaaccacagtttggtatttggcggtacgagcaaggactgggacaacatccgtcagttcattgctagtctggaacgcgcctctgaaaactcctctgcgatagccagcaaaaccggaggtggcaaatcgaccaaccattccgtggagccagccgaacaaaaaggaaagggtgacataatagttctcgattcagatgatgaggatggagatggaaacagtccagaacacaataagttggcatctgagatgaacaaagaactcggaacatctgtattggctagtaatatcgcagaaaggatggcaactaatgggagccaaacatttgaaaccgtgcatgcttatggaggtagtaagaacacgcagattgttccgtatggccaaggttctgctctggtgaatcagtttcctttgcaaaccagttggcaaccatctattcagtttgagagagttgtgttgacgaaaaggcctgaggagcagcggatgcaagatcttgtggctgctaccatagcggagaagagggcagaaacacaaatgttcctatcacttcctacggagagaaagcgaaggagaacagaccatagtttgttgatgcttgactcatttgtccctaaacaaagaagaagaaaaggtgacacaggtctagcaccagctgatttgtcattggatttacatcaaactgctacatcacaagaacctgacatagctatagaggaagaagagaaacgtaaaaatgatggtgatggtcttgaggattattggaaagattttgcattggctgttgaaagcacaaagcttgacgatgttgacgaggcggcggcaaatgaaaaggaagataatggaaagatggaggacatcgactgcaaccatgacattcggattcatgaagatttgggccatgtatgccgtgtgtgtggcttcaaggagaagaatgaatggctatggaggaaattcaaaggatgctgatgagatagactgtggtactgtcaaactgtctgaagatttcatagttgcagatattgctattcatcctagacacgctcaggcaatgaaaccacatcaggtggaaggtttcaactttttggttaagaatttgattggagacaagcctggaggttgcattcttgctcatgccccaggttcagggaaaacatttttgcttataagcttcattcagagcttcatggcaaggtatccatctgcaaggccccttgttgtgctgcctaaagggatactagttatatggaagaaagaaattcaacgatggcaagtgcaggatataccagtgtacgatttctactctgtaaaggctgaaaaaagagtagaacagttgcaaatcctcaaatcttgggaggacaagatgggtatactgtttcttggatacaagcagttctccacaatcgtcactgatgatgggggcagcaaggtaacagctgcatgccgggacaggctgcttaaggttcccaaccttctgatacttgacgagggtcatacacctagaaataaggagactgatgtactagagtcgctaagtagagtagaaacaccacgcaaagtggttctctcaggtacacttttccagaatcatgttgaggaagtgtttaatatcttgaatcttgtccgcccaaagtttcttaggatggaatcgtcacgccctattgccagacgtataatgagtcaggttgaaatatttggcagaagttcaaaagggcttgctgatggcgcattcactgaggcagttgaaggaaccttgttgaacgatgaaaacttcaagagaaaagttcatgttattagaggtcttagagaactaacaagggatgtgcttcactattataagggcgctatattagatgaactacctggcttagtagacttcagtgtgtttttgaagctcacacccaagcagaaggacattgttcacaagttggaaatgcatgataggttcaaaagaagtgcagtagggagtgcactgtacatccatccttgtctttcaggactttcagaggttaatgctgagaacagggctcacaccttgagagatgattcagttgatagtctgatggattccatcaatgtgagagacggcgtgaaggccaattttttcatgaatatcctgtcacttgctaattccgcaggagagaaagtacttgcttttagccaatatatacttcccatgaccttctttgaaaggctgctggttaagaagaagggctggcatgtggggagagagattttcatgatctctggcgacactagccaagaagacagagaagcggcagtggaccgtttcaacagctccgctgatgcgaaggttctgttcggttcgatcagggcatgtggagagggcatttccatcgtcggcgcgtcgagagtcgtcattctggacgttcacctgaacccatctgtcacccgtcaggcgatcgggcgcgcgttcaggcctggccagcagaagaaagtgttcgtgtacaggctcgtagctgccgactctgacgaggtgaaggtccacgagacggcgttcaagaaagaagtcatacagaagctgtggtttgaatggagcgagcagtgtaccacggaaaacttcaagcttggtcaagtcgatatcgacgactctggggacgagctattggataccagagcgatccgccaggatatcaaggcgctgtacagaaggtgaaggctccccccctccctccctccctccctttcttaaccccaatgatgttttgcacgctggtcgctggtagcctcaactggtgtctttgtaggtaggtaacaaacttcgtggccgatggacaccatgtaaatactggcggtgctgatcaatgagaagagtttttttttccttgtacaatcgcgctttaaattacatcatgaaaataatgctccgcattccattccattttatggtcaacagatactggcttctctacagacctgagtttgctctaaaactaggacttttcaagctatatctgtggaatggtttcttttcttttgtattatgtgccagcttcggacagcagtcagctgatcctcgactcatttcttgactcgtaggccaggattattgaggattaactgctatggtgtttagacttcttaagggctagtctaagggctagtctgagaaccccggatttctaatttgccaaggaaaattagttca

SEQ ID NO: 216561 - DNA, 4408 bp, Zea Mays
gcggcttccgcagtccgcacagctgacagcagtccattcgccgtccgcgcctccggtctccggacagcagtgagcgttagcaacaccttcattttggcgcgtcctccgccactggcgcgagcgcgtggcgacagcagctgagcggcggtgccagcgtgagcaaccgagcaggcgcgggcagccgagcgaggcagcagctgctgcgctaatggcacggccgttctcgtcgctggtggactcctcgtatcgccgcaggatcatcgagtgcaaagcggcggcttactccttgcggctcccttcctgcgctaggccgcccgcacgcccccgtttcgctgccagctccgacaacactccagcgcatggaattgatagtagcatcattaccattcagactatgacgcggtgggagaccctgaatcacatggcttacaaatttgggagccttggctcaaatgcattcacaagcaatgtcagtgttgaagcatcttgctgtgacgggcttctcctgcactgctatttttacctccctcttgcggaccatttcacgttttgatcccaccaaccatgtcgtttttgaactccttgtcaaagcatatgtcaaggaaagaaaagtgctagatgcagctgtggcagttctctttatggatgattgcggctttaaggcttcacctgtttcttgcaataccatcctcaatgctcttgttgaggaaggggaatcaaagcatgtttggttgttcttgagagagagtttggcccgtaagtttcctttgggtgttaccacttgcaatattcttctgaattccctatgcaccaatggagaatttagaaaggctgaagatatgcttcagaagatgaagagctgtcacatatctaattctgtcacatataatacaatcctacattggtatgttaagaagggaagatttaaggctgccctgtgtgttctagaagatatggagagggatagtgtacaggcagatgtatatacatacaacatcatgatagataaattatgtagaataaagaggagtacacgtgctttccttttgctcaaaagaatgaggaaagatgacttaacacctgatgaatgtacctacaatactttgattaatggtttttttcgtgaaggtaagataaatcatgctcgctatgtcttcaatcatatgctgagacaaaatttggttccaagtgtagctacttacactacaatgattgatgggtattgccgaaacaggagaattgataaggccctaagtattctatcggaaatgcaaattactggtgtcatgccaagtgaactaacttatagtgctttgttgaatggttactgcaaagtttccatgctgggacctgctatatatcttatggaagatctgaaatcaagaggtataaccatcaataagacgatgcgtactattctcattgatgggttctgtcaagtgggtgagatttccaaggctaaacaaattttgaagagtatgtttgaggatggaattgatccagatgtcatcacttattcagcattgatcaatggtatgtgcaggatggctaagatgcatgaaacaaaagaaattttgtcaaggatgcagaaaagtggaattttacctaatgatgtcctatatacaactctgatttgttactattgtaaggcagggtatgtcaaggaagcactaaagcattttgtggacatttatcgaagggggctagttgccaatccagttatccataatgcattattacatgctttctatagagagggaatgattacagaggctgaacacttcagacaatacatgtctaggatgaatatatcatttgattctgtctcctttaaccgcataattgatagttattgccacagaggtaacatagttggggcattttcagtttatgatgatatggttagatatggctattctccaaatgtttgcacatatcagaatttgcttagaggattatgtcaaggaggccacttggtacaagcaaggcaatttatgtcctgtcttcttgacataccttttgctattgatgagaaaactttcaatgcactacttcttgggatttgcagatatggaaccctagatgaagctttggatctatgcgagaaaatgataaaaaacaactgtttacctgatatccatacctacaccattcttctcagtggtttttgcaggaaaggtaagattttgcctgcgttagtcatcttgcagatgatgttggagaaaggagtagtccctgatactgttgcgtatacctgcttgctgaatgggttgatcaatgaaggccaagtgaaagctgcttcttacgttttccatgagatcatatgcaaggaaggcctgtatgcagattgtattgcctataattcgttgatgaatgggtacctcaagagtcgaaatgtgaataccataaaaaggatgatgtctgatatgtatcagaatgaggtttatccaaactctgctagctataacatacttatgcatgggtatgtcaagaggggacaattttcaaagtcattatatctgtacaaatatatggtgaggaaaggaatcaggccagacaatgttacatatcgtttgctcattcttgggctttctgagtgtgggttgattgacattgcagttaagtttttggagaagatggtcttagaaggcattttccctgatcggttagttttcgatatattgattacagctttcagtgagaaatccaagatgcataatgcactacaagttttcaattgtatgaagtggttacatatgtcacccagcagtaaaacttttagtgccatgataaatggattgatcagaaaaggttacttggaccatagtcacaaagttttacatgagatgttacaagtagggcttcaaccaaaccatacacactatattgcattggtcaatgcaaaatgtcgggttggtgagattgatagagcgtttaggctaaaagaagaaatgaaagctattggcattgtgcctgctgaagttgcggagagttcaattattcgaggactttgtagatgtggaaaacttgaggaggcagtcatagttttcagtagtatgatgcgttcaggaatggtgccaactgttgctaccttcactactctaatgcacagtctttgcaaagaatccaagattgctgatgctttgcacttgaagaggctgatggagttgtgtagattgagggttgatgttgtcagttataatgttttaattactggtttatgcaaagacaaacatatctctgacgcactagatctttatggagagatgaaatctaagggtctttggccgaatattactacctatatcacactcactggagctatgtattcaacagggagagtgcagaatggagaggaactactggaggatatagaagaaaggggacttattccggcatataagcagcctgaaaatcttgaaagacggatggaggatgcaattattaggctgaacatgataagaaactgcagaaaggaagtgccttttagaggggttgagctactacctctagaccctaaacccgtgtgtagtgctgctagtgattgtaaccccactgaaactcggcaacacaaaggaatttgagcatttgaccaatatggttggtacaaaactattggtatcttttctgagtagtgcttgtgatgccttacattgttgtgttcctccactgagggatccatggatccatctctagatatgttgaatatgtgattttccttaaaaagctaattcagaaatacaaaattacctagggaggaagaggaccctcacatatttcagtggatcctgggggcaggtaaaaagggattatgagtgctgatgcgtgatgttaggtatgatatgcataagttacagcaggcattcgaaggtaagaagtgttactatggcaattgttgtatctacatttatgtgccttttgaccccttcttttagttagtattgctaacatctttgcatggaatctcagtggatcttttatcttcaatggttggctagagtgaggaatattaatgaccatatttccttaacatccaactatagctgctgtcctgcacctgcagagttagaagcatcttttttgttgatcgtgcttgagcactttttgtgtttgtatcttcactagtagacaattgacatgcatgtgtgacacacacatgttatgaaaatcatttcatacacaaaaggtaaatattaatgaaaatttattcaaataaactaatatatattatatagcaaatattaatcgatctctgaatgatacagtagggtacggcaacatatctacctataattttggtttgtaccaaaatttgctttcatttattaaggacaatataaatatttaggtgggtatgatgtattgctgagttcatatcaccttccagcattttatctacaaagaaaac

SEQ ID NO: 216562 - DNA, 2992 bp, Zea Mays
caacatctctctttgacgtttagtatgcatccaccaagaaactcatgtgctgctataggtgcaataccggaatcatcagccacctcaatatcaatagcttggtgcttagaaatgtttgtctgtgacggaatcagatgactagtttgagcaatttggagaatgtggttgtgctcaataaataagtcatgtaccttgtaaaccctattttctctttcataagtaatgcccatgcaaactctatagtctgttcttgtatgagctcgatcacgcttgctaacacagaacttctttattttcagcactatagccctgatttgaacaaacagatctactcaatgttaccaatccatcaagagcactcgggtttgagtaacactttcaaacatcaaaacccatccggccaccatatgtaacccaaaagttccaagcttcatcggaactgctaaatgtcataccaatttgtggaattcaaaaaggaattgcagcaactatgcggttgtaaataatgcattcagaacacgaccaactggatgttctcatcatttaaagtagaacttcaaccatgcagaaacgaataactaagtaggagtagagcacaaaccttgcaggtgattcctcgagcagctgctgggtgttgtccatcgcaacatcaatagcttgttgggcacctgccggcgtgcttggtgctcttgtggagattgtacaggatctcgggtagactgcacagcgccaactttcttcaccacggacatttttttagtaccagcacagacaccttgctgcctccacaatcaacgaattgagagtgcaggaggacatcagctccagcacgtgcagggcagcacaggtgacggtgccttcatgcttcgtgggaagaggcattggggcaacgaatggaggagcaggcgaggaggtgcacacatggcagaggtggccccggaggttccaagggatcaaatgtgcggtgatagagaagaatgtggagttcactaggcacccacgagcgcacttcatcaacaaccgcacaatggagattttgacaaggtcattagtcctgtatccgttgcacatttctcacagtacaagttagttgatttgctactcaagaagcttgaaggtattggtttccagacatgctttcccagtgagattggtaactcaacacaagatttggtactggaaagcaagatattgatgggacacaagtgcacatcccttgatcagactgatgagggcattctggttggagcatcagttaacaatggagggatgataatagagagaaagctacactgtggtcttcttatagggacagatggcgcaagaagtacagtgcgtgaattggcaggtatatctatggaaggtgaaagggatttgcagaaactggtcagtgtgcattttcttagcagagatctaggcaggtatttgtccagtcagaggccagggatgctgttcttcatttttaatccaggtgcaattggtgtactagttgcacatgacctagagaatggggaatttgtattgcaggttccattttatcctcctcagcagatgtttgaagattttagtgctaaggtatgcgagcaaattattttcaaattagtcggatgggagccagcagatgttcatgttttagacataaaaccatgggcaatgcatgctgaagttgcagagaagtacatctgctgcaataatcgagtaatcctctctggtgatgccgcacaccggtttcctcctgctggtggttttggaatgaacaccggtgtccaggatgtacataatttggcttggaaattgggcttactgctgaatggtgtcgcctcaccatcaatattacaaacttatgagtcagagcgccggcctgttgcaattttcaataccgaacttagcgtggagaatttcaaggcagctatgtctattcctacaacccttggccttgatccaactgttgcaaactcagtgcatcaagttataaatagaagcctcggatcaatcattccaagaaatgtgcagaaggcagttctagaaggattgttttctcttggtagggcacaagtctcagactatatcctgaatgagaaaaatcccattgggtcgttgagactagcaagattgagaagtattctcgatgaaggcaaaagtcttcagctgcagttccctgcagaggatcttggcttccactatgcagaaggtgctctagttgttgaagctagttgtgagaagactcatgaaggagaaaaactacagcattctaagagggcatcaagagagtacatcccatctgctaaggttggttcgcggcttccccacatgctagtaagagaagtgcctgcttcgagtgagggcgcgttctcaacactggacctagtgagtggggataaactcgagtttgttctcatcattgcaccagtgaaagagtcatatgagattgcccgtgccaccctcaagatagcagatgagcttacgctatcagccagagtatgtgtaatgtggccacgaggttcgactgatgctgaagtggaagagagcagatccgagttgacaccctggacaaactacatcgatgtcgaggaagtgcctagggtgtcgggtggttcatggtgggagatgtgtcgtattagtaggaagagtgtccttttggttaggcctgatgagcacatagcatggctaacagaactggacagggtgagggatgctgagtcagaaattaggagggtcttctctcatgttctgtgcctaaatagccaccgggtgtaagaatttataaatttccttccatttaggctttgtttagatactttggtattcactttaatccacatgtatggaagcggattaggttataaattaaattaatttacatcctaatccacctcactccaaaccgcacaagaggacgttaacagaagatcttcgcacaagaggactttttttagtttcatcgtgttatttaggtactcgataaaatcaaatttggattgaattccttgac

SEQ ID NO: 216563 - DNA, 3261 bp, Zea Mays
caacatctctctttgacgtttagtatgcatccaccaagaaactcatgtgctgctataggtgcaataccggaatcatcagccacctcaatatcaatagcttggtgcttagaaatgtttgtctgtgacggaatcagatgactagtttgagcaatttggagaatgtggttgtgctcaataaataagtcatgtaccttgtaaaccctattttctctttcataagtaatgcccatgcaaactctatagtctgttcttgtatgagctcgatcacgcttgctaacacagaacttctttattttcagcactatagccctgatttgaacaaacagatctactcaatgttaccaatccatcaagagcactcgggtttgagtaacactttcaaacatcaaaacccatccggccaccatatgtaacccaaaagttccaagcttcatcggaactgctaaatgtcataccaatttgtggaattcaaaaaggaattgcagcaactatgcggttgtaaataatgcattcagaacacgaccaactggatgttctcatcatttaaagtagaacttcaaccatgcagaaacgaataactaagtaggagtagagcacaaaccttgcaggtgattcctcgagcagctgctgggtgttgtccatcgcaacatcaatagcttgttgggcacctgccggcgtgcttggtgctcttgtggagattgtacaggatctcgggtagactgcacagcgccaactttcttcaccacggacatttttttagtaccagcacagacaccttgctgcctccacaatcaacgaattgagagtgcaggaggacatcagctccagcacgtgcagggcagcacaggtgacggtgccttcatgcttcgtgggaagaggcattggggcaacgaatggaggagcaggcgaggaggtgcacacatggcagaggtggccccggaggttccaaggtgatgcagctctccagcctccctccactccgagcaaagcgaaaagtggtgccaaagcttgtgtttttttgcctccaaaggagcagagaaggtggcgggggcttgtaaaatgtggcacaatgagcatgaggtgctttgcccttcgatttgatatggacgaccaagattgtgagactgctacagttgcagtctctagctactgcaccagatccagggatcaaatgtgcggtgatagagaagaatgtggagttcactaggcacccacgagcgcacttcatcaacaaccgcacaatggagatcttccgcaagttggatggcttggccagggacattgagaggtcccagccaccagtagatttgtggaggaagttcgtatactgtacttcactctccggttctgtccttggatcggttgatcacatgaaacaggaagattttgacaaggtcattagtcctgtatccgttgcacatttctcacagtacaagttagttgatttgctactcaagaagcttgaaggtattggtttccagacatgctttcccagtgagattggtaactcaacacaagatttggtactggaaagcaagatattgatgggacacaagtgcacatcccttgatcagactgatgagggcattctggttggagcatcagttaacaatggagggatgataatagagagaaagctacactgtggtcttcttatagggacagatggcgcaagaagtacagtgcgtgaattggcaggtatatctatggaaggtgaaagggatttgcagaaactggtcagtgtgcattttcttagcagagatctaggcaggtatttgtccagtcagaggccagggatgctgttcttcatttttaatccaggtgcaattggtgtactagttgcacatgacctagagaatggggaatttgtattgcaggttccattttatcctcctcagcagatgtttgaagattttagtgctaagttgcagagaagtacatctgctgcaataatcgagtaatcctctctggtgatgccgcacaccggtttcctcctgctggtggttttggaatgaacaccggtgtccaggatgtacataatttggcttggaaattgggcttactgctgaatggtgtcgcctcaccatcaatattacaaacttatgagtcagagcgccggcctgttagaatcttctcacacgctttctgttcatccaatcgtggagaatttcaaggcagctatgtctattcctacaacccttggccttgatccaactgttgcaaactcagtgcatcaagttataaatagaagcctcggatcaatcattccaagaaatgtgcagaaggcagttctagaaggattgttttctcttggtagggcacaagtctcagactatatcctgaatgagaaaaatcccattgggtcgttgagactagcaagattgagaagtattctcgatgaaggcaaaagtcttcagctgcagttccctgcagaggatcttggcttccactatgcagaaggtgctctagttgttgaagctagttgtgagaagactcatgaaggagaaaaactacagcattctaagagggcatcaagagagtacatcccatctgctaaggttggttcgcggcttccccacatgctagtaagagaagtgcctgcttcgagtgagggcgcgttctcaacactggacctagtgagtggggataaactcgagtttgttctcatcattgcaccagtgaaagagtcatatgagattgcccgtgccaccctcaagatagcagatgagcttacgctatcagccagagtatgtgtaatgtggccacgaggttcgactgatgctgaagtggaagagagcagatccgagttgacaccctggacaaactacatcgatgtcgaggaagtgcctagggtgtcgggtggttcatggtgggagatgtgtcgtattagtaggaagagtgtccttttggttaggcctgatgagcacatagcatggctaacagaactggacagggtgagggatgctgagtcagaaattaggagggtcttctctcatgttctgtgcctaaatagccaccgggtgtaagaatttataaatttccttccatttaggctttgtttagatactttggtattcactttaatccacatgtatggaagcggattaggttataaattaaattaatttacatcctaatccacctcactccaaaccgcacaagaggacgttaacagaagatcttcgcacaagaggactttttttagtttcatcgtgttatttaggtactcgataaaatcaaatttggattgaattccttgac

SEQ ID NO: 216564 - DNA, 5224 bp, Zea Mays
cggacctcgtgccccccttgctcatcgatgttccaattcgcgcttctgagttaggcagtagcgttgagcggagcaaagttcattgagggaatcagacaaatgtgctaaaacattaggacctggatcagatacagtagcaactgctactggaatctatgcagtagctgtatctgtttcattcaaaaggccatgaatggctaggatcaaagccatatgtttttttctctttccctccccaagtcttactgttagcagctgcttcttttaggagaaattacaaagaacagagaagacaatgcatacatctaataaagcaattaaatggaacaaagctacacgtgtttgctgcaatttgagagcctattacaaaagcttgcatatacaaaagacaaatgttaaactcagatccttttatatattaccaacgttctccatctcttatttcgtatacaaaagcttgcatccaccagcagcagccttccatccacaaagagcatatggttaacacaaaaaatagtgtgattactgtggatccttttgcacataaggccttccccatttcatatacaaaaacttgtatcaaccaatagaagctaggccttcggtatgaagcctgcaaacaaaataatttagagattataatttgtcaaggcaattcaacttatatcatctacctatacttacactgaagttttgctaaaattcctagccatctatcccttccaaggagagtaaggattactgatattttgaacaacgtttgaactctgaaaacagagagaaatacagtgaccaagataaaaagggcagcctggtgcatgtgcgcttgtgtggcctccagggaagggtttccctgcatgtgcaaaaggcactttccacgactcgaacccgcgatctcctggtcacaaggcatcatctttaaagattgagaaaataaaaaaggcagacccccacacgaatgaggtacggggaaaggataaactgaggcaagccttccccgtaaatgcggagaggctgcttcaaacacttggtgactcagcgagatagctctcaccactggaagggataaagattgagaaaatagggaagaaaataccaagttactctgaaaacacagaatgctaattatatgaaaaaagagaagtgtaagcataccataagaatttcggtaaaactagaatttgattcatatgcttgctattctggaacatgacttccatcttcttgttgcataggtttgcttgtgaattattgttccttttgttttttccttttcttacaattttttcactctaagatttctttctttttgatccaccttgctgcttttctttctttctttattagaccagccacatgtgtatattagtcaagtaagctgaatgtttcttgaacactagacttttcagcattaatgttaggagttcctatgatttttcttccacctgcttactggcagcatgaagtatctctttcagaagcgaatagcagtcttcagaatcagtagctcgtgaaaccaatggaacgaattttttgcaaagatttttgtaccgaagtgtagcatctaacttaggattttccaccatttcccgtacattcacatcttggataatatctgaccttacatctcgagtccatcgttttaaaatgtatcgttcaggcaaatgcttattgttcaccaaattgagacctttcaatgcgtgcctgcataatatatcaattttctcaaagggtcgacaactacatgagaccatctgatcagatgggttggctataaacttgcactcttcttcatttgttaatgtttctataggagcttcaattgcaatgacaaatttcactacatccatttgagcttatgcttctcatattcagcttgaaaatcttcaaatgttgatggtgtgtaaatcatacttgcttgtatcgtaggtgtcatcatcctcaaatgcttctttctagattcaaattcagcttctaactcattgtcttttttgtcttgaacaacaagctccacgtgctttaggaacctaatgatgtcaaggtctgatttcaaatggcctttgaatgcattattcaagctcttgtttagttgtgtacttcgcattcctagtgacccccagcatgtagcactcagtctacttatgttttcaacatgcaaatgctgtcaagccaagttgatttactaacttttcctcacatagcatcaaatgcttcttcaaaatctgcctcttgttcgtactcatgcaagaattgaaatctacttggatgcactatagccctgatttgaacaaacagatctactcaatgttaccaatccatcaagagcactcgggtttgagtaacactttcaaacatcaaaacccatccggccaccatatgtaacccaaaagttccaagcttcatcggaactgctaaatgtcataccaatttgtggaattcaaaaaggaattgcagcaactatgcggttgtaaataatgcattcagaacacgaccaactggatgttctcatcatttaaagtagaacttcaaccatgcagaaacgaataactaagtaggagtagagcacaaaccttgcaggtgattcctcgagcagctgctgggtgttgtccatcgcaacatcaatagcttgttgggcacctgccggcgtgcttggtgctcttgtggagattgtacaggatctcgggtagactgcacagcgccaactttcttcaccacggacatttttttagtaccagcacagacaccttgctgcctccacaatcaacgaattgagagtgcaggaggacatcagctccagcacgtgcagggcagcacaggtgacggtgccttcatgcttcgtgggaagaggcattggggcaacgaatggaggagcaggcgaggaggtgcacacatggcagaggtggccccggaggttccaaggtgatgcagctctccagcctccctccactccgagcaaagcgaaaagtggtgccaaagcttgtgtttttttgcctccaaaggagcagagaaggtggcgggggcttgtaaaatgtggcacaatgagcatgaggtgctttgcccttcgatttgatatggacgaccaagattgtgagactgctacagttgcagtctctagctactgcaccagatccagggatcaaatgtgcggtgatagagaagaatgtggagttcactaggcacccacgagcgcacttcatcaacaaccgcacaatggagatcttccgcaagttggatggcttggccagggacattgagaggtcccagccaccagtagatttgtggaggaagttcgtatactgtacttcactctccggttctgtccttggatcggttgatcacatgaaacaggaaggccaattttgacaaggtcattagtcctgtatccgttgcacatttctcacagtacaagttagttgatttgctactcaagaagcttgaaggtattggtttccagacatgctttcccagtgagattggtaactcaacacaagatttggtactggaaagcaagatattgatgggacacaagtgcacatcccttgatcagactgatgagggcattctggttggagcatcagttaacaatggagggatgataatagagagaaagctacactgtggtcttcttatagggacagatggcgcaagaagtacagtgcgtgaattggcaggtatatctatggaaggtgaaagggatttgcagaaactggtcagtgtgcattttcttagcagagatctaggcaggtatttgtccagtcagaggccagggatgctgttcttcatttttaatccaggtgcaattggtgtactagttgcacatgacctagagaatggggaatttgtattgcaggttccattttatcctcctcagcagatgtttgaagattttagtgctaagttgcagagaagtacatctgctgcaataatcgagtaatcctctctggtgatgccgcacaccggtttcctcctgctggtggttttggaatgaacaccggtgtccaggatgtacataatttggcttggaaattgggcttactgctgaatggtgtcgcctcaccatcaatattacaaacttatgagtcagagcgccggcctgttgcaattttcaataccgaacttagcgtggagaatttcaaggcagctatgtctattcctacaacccttggccttgatccaactgttgcaaactcagtgcatcaagttataaatagaagcctcggatcaatcattccaagaaatgtgcagaaggcagttctagaaggattgttttctcttggtagggcacaagtctcagactatatcctgaatgagaaaaatcccattgggtcgttgagactagcaagattgagaagtattctcgatgaaggcaaaagtcttcagctgcagttccctgcagaggatcttggcttccactatgcagaaggtgctctagttgttgaagctagttgtgagaagactcatgaaggagaaaaactacagcattctaagagggcatcaagagagtacatcccatctgctaaggttggttcgcggcttccccacatgctagtaagagaagtgcctgcttcgagtgagggcgcgttctcaacactggacctagtgagtggggataaactcgagtttgttctcatcattgcaccagtgaaagagtcatatgagattgcccgtgccaccctcaagatagcagatgagcttacgctatcagccagagtatgtgtaatgtggccacgaggttcgactgatgctgaagtggaagagagcagatccgagttgacaccctggacaaactacatcgatgtcgaggaagtgcctagggtgtcgggtggttcatggtgggagatgtgtcgtattagtaggaagagtgtccttttggttaggcctgatgagcacatagcatggctaacagaactggacagggtgagggatgctgagtcagaaattaggagggtcttctctcatgttctgtgcctaaatagccaccgggtgtaagaatttataaatttccttccatttaggctttgtttagatactttggtattcactttaatccacatgtatggaagcggattaggttataaattaaattaatttacatcctaatccacctcactccaaaccgcacaagaggacgttaacagaagatcttcgcacaagaggactttttttagtttcatcgtgttatttaggtactcgataaaatcaaatttggattgaattccttgac

SEQ ID NO: 216565 - DNA, 3313 bp, Zea Mays
ttcgctgtgccggcgtggtgctcccggagccgcgcgcggaggcggcgcctttgcgcattgccgttccgtccgtcccgtccctgcaagctctaagacttccgaagaattgaaactggggttcttgggggcgcgacatgtggttgcgttctgacgctgcgtgagcgcgacatgcggggagggcgagccccacaaggttgcagcctattccaccaccgacgctgaaggccatacgcccccaatcgaatcgatcacatctatgccgtcgatcaccagaggtgggcgtggggggctcttctccacgcaccggggcgcgctcttgtggctccgccgttgccaaagcccactcttgtcgacactagccggcggcggaggccggagcgacgcgccacatctgcccgtactcatcgtcggagctggccctgttgggctcgtcctctcattcctcctcaccaaattcgcactatagccctgatttgaacaaacagatctactcaatgttaccaatccatcaagagcactcgggtttgagtaacactttcaaacatcaaaacccatccggccaccatatgtaacccaaaagttccaagcttcatcggaactgctaaatgtcataccaatttgtggaattcaaaaaggaattgcagcaactatgcggttgtaaataatgcattcagaacacgaccaactggatgttctcatcatttaaagtagaacttcaaccatgcagaaacgaataactaagtaggagtagagcacaaaccttgcaggtgattcctcgagcagctgctgggtgttgtccatcgcaacatcaatagcttgttgggcacctgccggcgtgcttggtgctcttgtggagattgtacaggatctcgggtagactgcacagcgccaactttcttcaccacggacatttttttagtaccagcacagacaccttgctgcctccacaatcaacgaattgagagtgcaggaggacatcagctccagcacgtgcagggcagcacaggtgacggtgccttcatgcttcgtgggaagaggcattggggcaacgaatggaggagcaggcgaggaggtgcacacatggcagaggtggccccggaggttccaaggtgatgcagctctccagcctccctccactccgagcaaagcgaaaagtggtgccaaagcttgtgtttttttgcctccaaaggagcagagaaggtggcgggggcttgtaaaatgtggcacaatgagcatgaggtgctttgcccttcgatttgatatggacgaccaagattgtgagactgctacagttgcagtctctagctactgcaccagatccagggatcaaatgtgcggtgatagagaagaatgtggagttcactaggcacccacgagcgcacttcatcaacaaccgcacaatggagattttgacaaggtcattagtcctgtatccgttgcacatttctcacagtacaagttagttgatttgctactcaagaagcttgaaggtattggtttccagacatgctttcccagtgagattggtaactcaacacaagatttggtactggaaagcaagatattgatgggacacaagtgcacatcccttgatcagactgatgagggcattctggttggagcatcagttaacaatggagggatgataatagagagaaagctacactgtggtcttcttatagggacagatggcgcaagaagtacagtgcgtgaattggcaggtatatctatggaaggtgaaagggatttgcagaaactggtcagtgtgcattttcttagcagagatctaggcaggtatttgtccagtcagaggccagggatgctgttcttcatttttaatccaggtgcaattggtgtactagttgcacatgacctagagaatggggaatttgtattgcaggttccattttatcctcctcagcagatgtttgaagattttagtgctaaggtatgcgagcaaattattttcaaattagtcggatgggagccagcagatgttcatgttttagacataaaaccatgggcaatgcatgctgaagttgcagagaagtacatctgctgcaataatcgagaatgaacaccggtgtccaggatgtacataatttggcttggaaattgggcttactgctgaatggtgtcgcctcaccatcaatattacaaacttatgagtcagagcgccggcctgttgcaattttcaataccgaacttagcgtggagaatttcaaggcagctatgtctattcctacaacccttggccttgatccaactgttgcaaactcagtgcatcaagttataaatagaagcctcggatcaatcattccaagaaatgtgcagaaggcagttctagaaggattgttttctcttggtagggcacaagtctcagactatatcctgaatgagaaaaatcccattgggtcgttgagactagcaagattgagaagtattctcgatgaaggcaaaagtcttcagctgcagttccctgcagaggatcttggcttccactatgcagaaggtgctctagttgttgaagctagttgtgagaagactcatgaaggagaaaaactacagcattctaagagggcatcaagagagtacatcccatctgctaaggttggttcgcggcttccccacatgctagtaagagaagtgcctgcttcgagtgagggcgcgttctcaacactggacctagtgagtggggataaactcgagtttgttctcatcattgcaccagtgaaagagtcatatgagattgcccgtgccaccctcaagatagcagatgagcttacgctatcagccagagtatgtgtaatgtggccacgaggttcgactgatgctgaagtggaagagagcagatccgagttgacaccctggacaaactacatcgatgtcgaggaagtgcctagggtgtcgggtggttcatggtgggagatgtgtcgtattagtaggaagagtgtccttttggttaggcctgatgagcacatagcatggctaacagaactggacagggtgagggatgctgagtcagaaattaggagggtcttctctcatgttctgtgcctaaatagccaccgggtgtaagaatttataaatttccttccatttaggctttgtttagatactttggtattcactttaatccacatgtatggaagcggattaggttataaattaaattaatttacatcctaatccacctcactccaaaccgcacaagaggacgttaacagaagatcttcgcacaagaggactttttttagtttcatcgtgttatttaggtactcgataaaatcaaatttggattgaattccttgac

SEQ ID NO: 216566 - DNA, 3432 bp, Zea Mays
gcggagaggaggtttcgctgtgccggcgtggtgctcccggagccgcgcgcggaggcggcgcctttgcgcattgccgttccgtccgtcccgtccctgcaagctctaagacttccgaagaattgaaactggggttcttgggggcgcgacatgtggttgcgttctgacgctgcgtgagcgcgacatgcggggagggcgagccccacaaggttgcagcctattccaccaccgacgctgaaggccatacgcccccaatcgaatcgatcacatctatgccgtcgatcaccagaggtgggcgtggggggctcttctccacgcaccggggcgcgctcttgtggctccgccgttgccaaagcccactcttgtcgacactagccggcggcggaggccggagcgacgcgccacatctgcccgtactcatcgtcggagctggccctgttgggctcgtcctctcattcctcctcaccaaattcgcactatagccctgatttgaacaaacagatctactcaatgttaccaatccatcaagagcactcgggtttgagtaacactttcaaacatcaaaacccatccggccaccatatgtaacccaaaagttccaagcttcatcggaactgctaaatgtcataccaatttgtggaattcaaaaaggaattgcagcaactatgcggttgtaaataatgcattcagaacacgaccaactggatgttctcatcatttaaagtagaacttcaaccatgcagaaacgaataactaagtaggagtagagcacaaaccttgcaggtgattcctcgagcagctgctgggtgttgtccatcgcaacatcaatagcttgttgggcacctgccggcgtgcttggtgctcttgtggagattgtacaggatctcgggtagactgcacagcgccaactttcttcaccacggacatttttttagtaccagcacagacaccttgctgcctccacaatcaacgaattgagagtgcaggaggacatcagctccagcacgtgcagggcagcacaggtgacggtgccttcatgcttcgtgggaagaggcattggggcaacgaatggaggagcaggcgaggaggtgcacacatggcagaggtggccccggaggttccaagagaaggtggcgggggcttgtaaaatgtggcacaatgagcatgaggtgctttgcccttcgatttgatatggacgaccaagattgtgagactgctacagttgcagtctctagctactgcaccagatccagggatcaaatgtgcggtgatagagaagaatgtggagttcactaggcacccacgagcgcacttcatcaacaaccgcacaatggagatcttccgcaagttggatggcttggccagggacattgagaggtcccagccaccagtagatttgtggaggaagttcgtatactgtacttcactctccggttctgtccttggatcggttgatcacatgaaacaggaaggccaattttgacaaggtcattagtcctgtatccgttgcacatttctcacagtacaagttagttgatttgctactcaagaagcttgaaggtattggtttccagacatgctttcccagtgagattggtaactcaacacaagatttggtactggaaagcaagatattgatgggacacaagtgcacatcccttgatcagactgatgagggcattctggttggagcatcagttaacaatggagggatgataatagagagaaagctacactgtggtcttcttatagggacagatggcgcaagaagtacagtgcgtgaattggcaggtatatctatggaaggtgaaagggatttgcagaaactggtcagtgtgcattttcttagcagagatctaggcaggtatttgtccagtcagaggccagggatgctgttcttcatttttaatccaggtgcaattggtgtactagttgcacatgacctagagaatggggaatttgtattgcaggttccattttatcctcctcagcagatgtttgaagattttagtgctaaggtatgcgagcaaattattttcaaattagtcggatgggagccagcagatgttcatgttttagacataaaaccatgggcaatgcatgctgaagttgcagagaagtacatctgctgcaataatcgagtaatcctctctggtgatgccgcacaccggtttcctcctgctggtggttttggaatgaacaccggtgtccaggatgtacataatttggcttggaaattgggcttactgctgaatggtgtcgcctcaccatcaatattacaaacttatgagtcagagcgccggcctgttgcaattttcaataccgaacttagcgtggagaatttcaaggcagctatgtctattcctacaacccttggccttgatccaactgttgcaaactcagtgcatcaagttataaatagaagcctcggatcaatcattccaagaaatgtgcagaaggcagttctagaaggattgttttctcttggtagggcacaagtctcagactatatcctgaatgagaaaaatcccattgggtcgttgagactagcaagattgagaagtattctcgatgaaggcaaaagtcttcagctgcagttccctgcagaggatcttggcttccactatgcagaaggtgctctagttgttgaagctagttgtgagaagactcatgaaggagaaaaactacagcattctaagagggcatcaagagagtacatcccatctgctaaggttggttcgcggcttccccacatgctagtaagagaagtgcctgcttcgagtgagggcgcgttctcaacactggacctagtgagtggggataaactcgagtttgttctcatcattgcaccagtgaaagagtcatatgagattgcccgtgccaccctcaagatagcagatgagcttacgctatcagccagagtatgtgtaatgtggccacgaggttcgactgatgctgaagtggaagagagcagatccgagttgacaccctggacaaactacatcgatgtcgaggaagtgcctagggtgtcgggtggttcatggtgggagatgtgtcgtattagtaggaagagtgtccttttggttaggcctgatgagcacatagcatggctaacagaactggacagggtgagggatgctgagtcagaaattaggagggtcttctctcatgttctgtgcctaaatagccaccgggtgtaagaatttataaatttccttccatttaggctttgtttagatactttggtattcactttaatccacatgtatggaagcggattaggttataaattaaattaatttacatcctaatccacctcactccaaaccgcacaagaggacgttaacagaagatcttcgcacaagaggactttttttagtttcatcgtgttatttaggtactcgataaaatcaaatttggattgaattccttgac

SEQ ID NO: 216567 - DNA, 3434 bp, Zea Mays
gcggagaggaggtttcgctgtgccggcgtggtgctcccggagccgcgcgcggaggcggcgcctttgcgcattgccgttccgtccgtcccgtccctgcaagctctaagacttccgaagaattgaaactggggttcttgggggcgcgacatgtggttgcgttctgacgctgcgtgagcgcgacatgcggggagggcgagccccacaaggttgcagcctattccaccaccgacgctgaaggccatacgcccccaatcgaatcgatcacatctatgccgtcgatcaccagaggtgggcgtggggggctcttctccacgcaccggggcgcgctcttgtggctccgccgttgccaaagcccactcttgtcgacactagccggcggcggaggccggagcgacgcgccacatctgcccgtactcatcgtcggagctggccctgttgggctcgtcctctcattcctcctcaccaaattcgcactatagccctgatttgaacaaacagatctactcaatgttaccaatccatcaagagcactcgggtttgagtaacactttcaaacatcaaaacccatccggccaccatatgtaacccaaaagttccaagcttcatcggaactgctaaatgtcataccaatttgtggaattcaaaaaggaattgcagcaactatgcggttgtaaataatgcattcagaacacgaccaactggatgttctcatcatttaaagtagaacttcaaccatgcagaaacgaataactaagtaggagtagagcacaaaccttgcaggtgattcctcgagcagctgctgggtgttgtccatcgcaacatcaatagcttgttgggcacctgccggcgtgcttggtgctcttgtggagattgtacaggatctcgggtagactgcacagcgccaactttcttcaccacggacatttttttagtaccagcacagacaccttgctgcctccacaatcaacgaattgagagtgcaggaggacatcagctccagcacgtgcagggcagcacaggtgacggtgccttcatgcttcgtgggaagaggcattggggcaacgaatggaggagcaggcgaggaggtgcacacatggcagaggtggccccggaggttccaaggagcagagaaggtggcgggggcttgtaaaatgtggcacaatgagcatgaggtgctttgcccttcgatttgatatggacgaccaagattgtgagactgctacagttgcagtctctagctactgcaccagatccagggatcaaatgtgcggtgatagagaagaatgtggagttcactaggcacccacgagcgcacttcatcaacaaccgcacaatggagatcttccgcaagttggatggcttggccagggacattgagaggtcccagccaccagtagatttgtggaggaagttcgtatactgtacttcactctccggttctgtccttggatcggttgatcacatgaaacaggaagattttgacaaggtcattagtcctgtatccgttgcacatttctcacagtacaagttagttgatttgctactcaagaagcttgaaggtattggtttccagacatgctttcccagtgagattggtaactcaacacaagatttggtactggaaagcaagatattgatgggacacaagtgcacatcccttgatcagactgatgagggcattctggttggagcatcagttaacaatggagggatgataatagagagaaagctacactgtggtcttcttatagggacagatggcgcaagaagtacagtgcgtgaattggcaggtatatctatggaaggtgaaagggatttgcagaaactggtcagtgtgcattttcttagcagagatctaggcaggtatttgtccagtcagaggccagggatgctgttcttcatttttaatccaggtgcaattggtgtactagttgcacatgacctagagaatggggaatttgtattgcaggttccattttatcctcctcagcagatgtttgaagattttagtgctaaggtatgcgagcaaattattttcaaattagtcggatgggagccagcagatgttcatgttttagacataaaaccatgggcaatgcatgctgaagttgcagagaagtacatctgctgcaataatcgagtaatcctctctggtgatgccgcacaccggtttcctcctgctggtggttttggaatgaacaccggtgtccaggatgtacataatttggcttggaaattgggcttactgctgaatggtgtcgcctcaccatcaatattacaaacttatgagtcagagcgccggcctgttgcaattttcaataccgaacttagcgtggagaatttcaaggcagctatgtctattcctacaacccttggccttgatccaactgttgcaaactcagtgcatcaagttataaatagaagcctcggatcaatcattccaagaaatgtgcagaaggcagttctagaaggattgttttctcttggtagggcacaagtctcagactatatcctgaatgagaaaaatcccattgggtcgttgagactagcaagattgagaagtattctcgatgaaggcaaaagtcttcagctgcagttccctgcagaggatcttggcttccactatgcagaaggtgctctagttgttgaagctagttgtgagaagactcatgaaggagaaaaactacagcattctaagagggcatcaagagagtacatcccatctgctaaggttggttcgcggcttccccacatgctagtaagagaagtgcctgcttcgagtgagggcgcgttctcaacactggacctagtgagtggggataaactcgagtttgttctcatcattgcaccagtgaaagagtcatatgagattgcccgtgccaccctcaagatagcagatgagcttacgctatcagccagagtatgtgtaatgtggccacgaggttcgactgatgctgaagtggaagagagcagatccgagttgacaccctggacaaactacatcgatgtcgaggaagtgcctagggtgtcgggtggttcatggtgggagatgtgtcgtattagtaggaagagtgtccttttggttaggcctgatgagcacatagcatggctaacagaactggacagggtgagggatgctgagtcagaaattaggagggtcttctctcatgttctgtgcctaaatagccaccgggtgtaagaatttataaatttccttccatttaggctttgtttagatactttggtattcactttaatccacatgtatggaagcggattaggttataaattaaattaatttacatcctaatccacctcactccaaaccgcacaagaggacgttaacagaagatcttcgcacaagaggactttttttagtttcatcgtgttatttaggtactcgataaaatcaaatttggattgaattccttgac

SEQ ID NO: 216568 - DNA, 2884 bp, Zea Mays
cgccctcttcctcctctactggttgcagcctattccaccaccgacgctgaaggccatacgcccccaatcgaatcgatcacatctatgccgtcgatcaccagaggtgggcgtggggggctcttctccacgcaccggggcgcgctcttgtggctccgccgttgccaaagcccactcttgtcgacactagccggcggcggaggccggagcgacgcgccacatctgcccgtactcatcgtcggagctggccctgttgggctcgtcctctcattcctcctcaccaaattcggtgattcctcgagcagctgctgggtgttgtccatcgcaacatcaatagcttgttgggcacctgccggcgtgcttggtgctcttgtggagattgtacaggatctcgggtagactgcacagcgccaactttcttcaccacggacatttttttagtaccagcacagacaccttgctgcctccacaatcaacgaattgagagtgcaggaggacatcagctccagcacgtgcagggcagcacaggtgacggtgccttcatgcttcgtgggaagaggcattggggcaacgaatggaggagcaggcgaggaggtgcacacatggcagaggtggccccggaggttccaaggtgatgcagctctccagcctccctccactccgagcaaagcgaaaagtggtgccaaagcttgtgtttttttgcctccaaaggagcagagaaggtggcgggggcttgtaaaatgtggcacaatgagcatgaggtgctttgcccttcgatttgatatggacgaccaagattgtgagactgctacagttgcagtctctagctactgcaccagatccagggatcaaatgtgcggtgatagagaagaatgtggagttcactaggcacccacgagcgcacttcatcaacaaccgcacaatggagattttgacaaggtcattagtcctgtatccgttgcacatttctcacagtacaagttagttgatttgctactcaagaagcttgaaggtattggtttccagacatgctttcccagtgagattggtaactcaacacaagatttggtactggaaagcaagatattgatgggacacaagtgcacatcccttgatcagactgatgagggcattctggttggagcatcagttaacaatggagggatgataatagagagaaagctacactgtggtcttcttatagggacagatggcgcaagaagtacagtgcgtgaattggcaggtatatctatggaaggtgaaagggatttgcagaaactggtcagtgtgcattttcttagcagagatctaggcaggtatttgtccagtcagaggccagggatgctgttcttcatttttaatccaggtgcaattggtgtactagttgcacatgacctagagaatggggaatttgtattgcaggttccattttatcctcctcagcagatgtttgaagattttagtgctaaggtatgcgagcaaattattttcaaattagtcggatgggagccagcagatgttcatgttttagacataaaaccatgggcaatgcatgctgaagttgcagagaagtacatctgctgcaataatcgagtaatcctctctggtgatgccgcacaccggtttcctcctgctggtggttttggaatgaacaccggtgtccaggatgtacataatttggcttggaaattgggcttactgctgaatggtgtcgcctcaccatcaatattacaaacttatgagtcagagcgccggcctgttgcaattttcaataccgaacttagcgtggagaatttcaaggcagctatgtctattcctacaacccttggccttgatccaactgttgcaaactcagtgcatcaagttataaatagaagcctcggatcaatcattccaagaaatgtgcagaaggcagttctagaaggattgttttctcttggtagggcacaagtctcagactatatcctgaatgagaaaaatcccattgggtcgttgagactagcaagattgagaagtattctcgatgaaggcaaaagtcttcagctgcagttccctgcagaggatcttggcttccactatgcagaaggtgctctagttgttgaagctagttgtgagaagactcatgaaggagaaaaactacagcattctaagagggcatcaagagagtacatcccatctgctaaggttggttcgcggcttccccacatgctagtaagagaagtgcctgcttcgagtgagggcgcgttctcaacactggacctagtgagtggggataaactcgagtttgttctcatcattgcaccagtgaaagagtcatatgagattgcccgtgccaccctcaagatagcagatgagcttacgctatcagccagagtatgtgtaatgtggccacgaggttcgactgatgctgaagtggaagagagcagatccgagttgacaccctggacaaactacatcgatgtcgaggaagtgcctagggtgtcgggtggttcatggtgggagatgtgtcgtattagtaggaagagtgtccttttggttaggcctgatgagcacatagcatggctaacagaactggacagggtgagggatgctgagtcagaaattaggagggtcttctctcatgttctgtgcctaaatagccaccgggtgtaagaatttataaatttccttccatttaggctttgtttagatactttggtattcactttaatccacatgtatggaagcggattaggttataaattaaattaatttacatcctaatccacctcactccaaaccgcacaagaggacgttaacagaagatcttcgcacaagaggactttttttagtttcatcgtgttatttaggtactcgataaaatcaaatttggattgaattccttgac

SEQ ID NO: 216569 - DNA, 2328 bp, Zea Mays
cgccctcttcctcctctactggttgcagcctattccaccaccgacgctgaaggccatacgcccccaatcgaatcgatcacatctatgccgtcgatcaccagaggtgggcgtggggggctcttctccacgcaccggggcgcgctcttgtggctccgccgttgccaaagcccactcttgtcgacactagccggcggcggaggccggagcgacgcgccacatctgcccgtactcatcgtcggagctggccctgttgggctcgtcctctcattcctcctcaccaaattcgggatcaaatgtgcggtgatagagaagaatgtggagttcactaggcacccacgagcgcacttcatcaacaaccgcacaatggagattttgacaaggtcattagtcctgtatccgttgcacatttctcacagtacaagttagttgatttgctactcaagaagcttgaaggtattggtttccagacatgctttcccagtgagattggtaactcaacacaagatttggtactggaaagcaagatattgatgggacacaagtgcacatcccttgatcagactgatgagggcattctggttggagcatcagttaacaatggagggatgataatagagagaaagctacactgtggtcttcttatagggacagatggcgcaagaagtacagtgcgtgaattggcaggtatatctatggaaggtgaaagggatttgcagaaactggtcagtgtgcattttcttagcagagatctaggcaggtatttgtccagtcagaggccagggatgctgttcttcatttttaatccaggtgcaattggtgtactagttgcacatgacctagagaatggggaatttgtattgcaggttccattttatcctcctcagcagatgtttgaagattttagtgctaaggtatgcgagcaaattattttcaaattagtcggatgggagccagcagatgttcatgttttagacataaaaccatgggcaatgcatgctgaagttgcagagaagtacatctgctgcaataatcgagtaatcctctctggtgatgccgcacaccggtttcctcctgctggtggttttggaatgaacaccggtgtccaggatgtacataatttggcttggaaattgggcttactgctgaatggtgtcgcctcaccatcaatattacaaacttatgagtcagagcgccggcctgttgcaattttcaataccgaacttagcgtggagaatttcaaggcagctatgtctattcctacaacccttggccttgatccaactgttgcaaactcagtgcatcaagttataaatagaagcctcggatcaatcattccaagaaatgtgcagaaggcagttctagaaggattgttttctcttggtagggcacaagtctcagactatatcctgaatgagaaaaatcccattgggtcgttgagactagcaagattgagaagtattctcgatgaaggcaaaagtcttcagctgcagttccctgcagaggatcttggcttccactatgcagaaggtgctctagttgttgaagctagttgtgagaagactcatgaaggagaaaaactacagcattctaagagggcatcaagagagtacatcccatctgctaaggttggttcgcggcttccccacatgctagtaagagaagtgcctgcttcgagtgagggcgcgttctcaacactggacctagtgagtggggataaactcgagtttgttctcatcattgcaccagtgaaagagtcatatgagattgcccgtgccaccctcaagatagcagatgagcttacgctatcagccagagtatgtgtaatgtggccacgaggttcgactgatgctgaagtggaagagagcagatccgagttgacaccctggacaaactacatcgatgtcgaggaagtgcctagggtgtcgggtggttcatggtgggagatgtgtcgtattagtaggaagagtgtccttttggttaggcctgatgagcacatagcatggctaacagaactggacagggtgagggatgctgagtcagaaattaggagggtcttctctcatgttctgtgcctaaatagccaccgggtgtaagaatttataaatttccttccatttaggctttgtttagatactttggtattcactttaatccacatgtatggaagcggattaggttataaattaaattaatttacatcctaatccacctcactccaaaccgcacaagaggacgttaacagaagatcttcgcacaagaggactttttttagtttcatcgtgttatttaggtactcgataaaatcaaatttggattgaattccttgac

SEQ ID NO: 216570 - DNA, 2468 bp, Zea Mays
cgccctcttcctcctctactggttgcagcctattccaccaccgacgctgaaggccatacgcccccaatcgaatcgatcacatctatgccgtcgatcaccagaggtgggcgtggggggctcttctccacgcaccggggcgcgctcttgtggctccgccgttgccaaagcccactcttgtcgacactagccggcggcggaggccggagcgacgcgccacatctgcccgtactcatcgtcggagctggccctgttgggctcgtcctctcattcctcctcaccaaattcgggatcaaatgtgcggtgatagagaagaatgtggagttcactaggcacccacgagcgcacttcatcaacaaccgcacaatggagatcttccgcaagttggatggcttggccagggacattgagaggtcccagccaccagtagatttgtggaggaagttcgtatactgtacttcactctccggttctgtccttggatcggttgatcacatgaaacaggaaggccaattttgacaaggtcattagtcctgtatccgttgcacatttctcacagtacaagttagttgatttgctactcaagaagcttgaaggtattggtttccagacatgctttcccagtgagattggtaactcaacacaagatttggtactggaaagcaagatattgatgggacacaagtgcacatcccttgatcagactgatgagggcattctggttggagcatcagttaacaatggagggatgataatagagagaaagctacactgtggtcttcttatagggacagatggcgcaagaagtacagtgcgtgaattggcaggtatatctatggaaggtgaaagggatttgcagaaactggtcagtgtgcattttcttagcagagatctaggcaggtatttgtccagtcagaggccagggatgctgttcttcatttttaatccaggtgcaattggtgtactagttgcacatgacctagagaatggggaatttgtattgcaggttccattttatcctcctcagcagatgtttgaagattttagtgctaaggtatgcgagcaaattattttcaaattagtcggatgggagccagcagatgttcatgttttagacataaaaccatgggcaatgcatgctgaagttgcagagaagtacatctgctgcaataatcgagtaatcctctctggtgatgccgcacaccggtttcctcctgctggtggttttggaatgaacaccggtgtccaggatgtacataatttggcttggaaattgggcttactgctgaatggtgtcgcctcaccatcaatattacaaacttatgagtcagagcgccggcctgttgcaattttcaataccgaacttagcgtggagaatttcaaggcagctatgtctattcctacaacccttggccttgatccaactgttgcaaactcagtgcatcaagttataaatagaagcctcggatcaatcattccaagaaatgtgcagaaggcagttctagaaggattgttttctcttggtagggcacaagtctcagactatatcctgaatgagaaaaatcccattgggtcgttgagactagcaagattgagaagtattctcgatgaaggcaaaagtcttcagctgcagttccctgcagaggatcttggcttccactatgcagaaggtgctctagttgttgaagctagttgtgagaagactcatgaaggagaaaaactacagcattctaagagggcatcaagagagtacatcccatctgctaaggttggttcgcggcttccccacatgctagtaagagaagtgcctgcttcgagtgagggcgcgttctcaacactggacctagtgagtggggataaactcgagtttgttctcatcattgcaccagtgaaagagtcatatgagattgcccgtgccaccctcaagatagcagatgagcttacgctatcagccagagtatgtgtaatgtggccacgaggttcgactgatgctgaagtggaagagagcagatccgagttgacaccctggacaaactacatcgatgtcgaggaagtgcctagggtgtcgggtggttcatggtgggagatgtgtcgtattagtaggaagagtgtccttttggttaggcctgatgagcacatagcatggctaacagaactggacagggtgagggatgctgagtcagaaattaggagggtcttctctcatgttctgtgcctaaatagccaccgggtgtaagaatttataaatttccttccatttaggctttgtttagatactttggtattcactttaatccacatgtatggaagcggattaggttataaattaaattaatttacatcctaatccacctcactccaaaccgcacaagaggacgttaacagaagatcttcgcacaagaggactttttttagtttcatcgtgttatttaggtactcgataaaatcaaatttggattgaattccttgac

SEQ ID NO: 216571 - DNA, 2556 bp, Zea Mays
tagtctgctaccggagtccccggttcatcagcagaagctgcttgctccgccgccgccgccctcttcctcctctactggttgcagcctattccaccaccgacgctgaaggccatacgcccccaatcgaatcgatcacatctatgccgtcgatcaccagaggtgggcgtggggggctcttctccacgcaccggggcgcgctcttgtggctccgccgttgccaaagcccactcttgtcgacactagccggcggcggaggccggagcgacgcgccacatctgcccgtactcatcgtcggagctggccctgttgggctcgtcctctcattcctcctcaccaaattcgggatcaaatgtgcggtgatagagaagaatgtggagttcactaggcacccacgagcgcacttcatcaacaaccgcacaatggagatcttccgcaagttggatggcttggccagggacattgagaggtcccagccaccagtagatttgtggaggaagttcgtatactgtacttcactctccggttctgtccttggatcggttgatcacatgaaacaggaagattttgacaaggtcattagtcctgtatccgttgcacatttctcacagtacaagttagttgatttgctactcaagaagcttgaaggtattggtttccagacatgctttcccagtgagattggtaactcaacacaagatttggtactggaaagcaagatattgatgggacacaagtgcacatcccttgatcagactgatgagggcattctggttggagcatcagttaacaatggagggatgataatagagagaaagctacactgtggtcttcttatagggacagatggcgcaagaagtacagtgcgtgaattggcaggtatatctatggaaggtgaaagggatttgcagaaactggtcagtgtgcattttcttagcagagatctaggcaggtatttgtccagtcagaggccagggatgctgttcttcatttttaatccaggtgcaattggtgtactagttgcacatgacctagagaatggggaatttgtattgcaggttccattttatcctcctcagcagatgtttgaagattttagtgctaaggtatgcgagcaaattattttcaaattagtcggatgggagccagcagatgttcatgttttagacataaaaccatgggcaatgcatgctgaagttgcagagaagtacatctgctgcaataatcgagtaatcctctctggtgatgccgcacaccggtttcctcctgctggtggttttggaatgaacaccggtgtccaggatgtacataatttggcttggaaattgggcttactgctgaatggtgtcgcctcaccatcaatattacaaacttatgagtcagagcgccggcctgttagaatcttctcacacgctttctgttcatccaatgttgcaattttcaataccgaacttagcgtggagaatttcaaggcagctatgtctattcctacaacccttggccttgatccaactgttgcaaactcagtgcatcaagttataaatagaagcctcggatcaatcattccaagaaatgtgcagaaggcagttctagaaggattgttttctcttggtagggcacaagtctcagactatatcctgaatgagaaaaatcccattgggtcgttgagactagcaagattgagaagtattctcgatgaaggcaaaagtcttcagctgcagttccctgcagaggatcttggcttccactatgcagaaggtgctctagttgttgaagctagttgtgagaagactcatgaaggagaaaaactacagcattctaagagggcatcaagagagtacatcccatctgctaaggttggttcgcggcttccccacatgctagtaagagaagtgcctgcttcgagtgagggcgcgttctcaacactggacctagtgagtggggataaactcgagtttgttctcatcattgcaccagtgaaagagtcatatgagattgcccgtgccaccctcaagatagcagatgagcttacgctatcagccagagtatgtgtaatgtggccacgaggttcgactgatgctgaagtggaagagagcagatccgagttgacaccctggacaaactacatcgatgtcgaggaagtgcctagggtgtcgggtggttcatggtgggagatgtgtcgtattagtaggaagagtgtccttttggttaggcctgatgagcacatagcatggctaacagaactggacagggtgagggatgctgagtcagaaattaggagggtcttctctcatgttctgtgcctaaatagccaccgggtgtaagaatttataaatttccttccatttaggctttgtttagatactttggtattcactttaatccacatgtatggaagcggattaggttataaattaaattaatttacatcctaatccacctcactccaaaccgcacaagaggacgttaacagaagatcttcgcacaagaggactttttttagtttcatcgtgttatttaggtactcgataaaatcaaatttggattgaattccttgac

SEQ ID NO: 216572 - DNA, 6732 bp, Zea Mays
gatgctacttgtgcgtgcatgcgttgcaactctggcaccgattccgttccttccttgcggcggcggcggaaaaacagaagcttctccatccttcccttcgttcgtgctcttcttcttgttattccgtttatcggtctggcgcagaaagaaacaagagatgagatctagtctgctaccggagtccccggttcatcagcagaagctgcttgctccgccgccgccgccctcttcctcctctactggttgcagcctattccaccaccgacgctgaaggccatacgcccccaatcgaatcgatcacatctatgccgtcgatcaccagaggtgggcgtggggggctcttctccacgcaccggggcgcgctcttgtggctccgccgttgccaaagcccactcttgtcgacactagccggcggcggaggccggagcgacgcgccacatctgcccgtactcatcgtcggagctggccctgttgggctcgtcctctcattcctcctcaccaaattcggtacggacctcgtgccccccttgctcatcgatgttccaattcgcgcttctgagttaggcagtagcgttgagcggagcaaagttcattgagggaatcagacaaatgtgctaaaacattaggacctggatcagatacagtagcaactgctactggaatctatgcagtagctgtatctgtttcattcaaaaggccatgaatggctaggatcaaagccatatgtttttttctctttccctccccaagtcttactgttagcagctgcttcttttaggagaaattacaaagaacagagaagacaatgcatacatctaataaagcaattaaatggaacaaagctacacgtgtttgctgcaatttgagagcctattacaaaagcttgcatatacaaaagacaaatgttaaactcagatccttttatatattaccaacgttctccatctcttatttcgtatacaaaagcttgcatccaccagcagcagccttccatccacaaagagcatatggttaacacaaaaaatagtgtgattactgtggatccttttgcacataaggccttccccatttcatatacaaaaacttgtatcaaccaatagaagctaggccttcggtatgaagcctgcaaacaaaataatttagagattataatttgtcaaggcaattcaacttatatcatctacctatacttacactgaagttttgctaaaattcctagccatctatcccttccaaggagagtaaggattactgatattttgaacaacgtttgaactctgaaaacagagagaaatacagtgaccaagataaaaagggcagcctggtgcatgtgcgcttgtgtggcctccagggaagggtttccctgcatgtgcaaaaggcactttccacgactcgaacccgcgatctcctggtcacaaggcatcatctttaaagattgagaaaataaaaaaggcagacccccacacgaatgaggtacggggaaaggataaactgaggcaagccttccccgtaaatgcggagaggctgcttcaaacacttggtgactcagcgagatagctctcaccactggaagggataaagattgagaaaatagggaagaaaataccaagttactctgaaaacacagaatgctaattatatgaaaaaagagaagtgtaagcataccataagaatttcggtaaaactagaatttgattcatatgcttgctattctggaacatgacttccatcttcttgttgcataggtttgcttgtgaattattgttccttttgttttttccttttcttacaattttttcactctaagatttctttctttttgatccaccttgctgcttttctttctttctttattagaccagccacatgtgtatattagtcaagtaagctgaatgtttcttgaacactagacttttcagcattaatgttaggagttcctatgatttttcttccacctgcttactggcagcatgaagtatctctttcagaagcgaatagcagtcttcagaatcagtagctcgtgaaaccaatggaacgaattttttgcaaagatttttgtaccgaagtgtagcatctaacttaggattttccaccatttcccgtacattcacatcttggataatatctgaccttacatctcgagtccatcgttttaaaatgtatcgttcaggcaaatgcttattgttcaccaaattgagacctttcaatgcgtgcctgcataatatatcaattttctcaaagggtcgacaactacatgagaccatctgatcagatgggttggctataaacttgcactcttcttcatttgttaatgtttctataggagcttcaattgcaatgacaaatttcactacatccatttgagcttatgcttctcatattcagcttgaaaatcttcaaatgttgatggtgtgtaaatcatacttgcttgtatcgtaggtgtcatcatcctcaaatgcttctttctagattcaaattcagcttctaactcattgtcttttttgtcttgaacaacaagctccacgtgctttaggaacctaatgatgtcaaggtctgatttcaaatggcctttgaatgcattattcaagctcttgtttagttgtgtacttcgcattcctagtgacccccagcatgtagcactcagtctacttatgttttcaacatgcaaatgctgtcaagccaagttgatttactaacttttcctcacatagcatcaaatgcttcttcaaaatctgcctcttgttcgtactcatgcaagaattgaaatctacttggatggttggttcttcctcatcttggagctattcttcattctgataattttagtactttcatgcattttgtgatatatgccaagtacagaaaccatgccacacactagtgaacgctgcagccacagtctttcccatagcaatgtcctgaactcctgatcagtgaaatcgtttgtggttgtttttgatgtgttgataaaaatgcattgaacaaccacttgaacgactcaatagtttcatcatatgtcaaagcctagtttgtctccttttgtgtcctgctgttttcatgcgcagaaggaggctgcagttctgtgcgcagcaggagtttggtggtcttgtgttctgctttttttggcattgtactttggtccattttggactgttttcttctcttaatttaatgatgcgcagctctcctgcgtgttcacgaaaaaaaaagctacaccaaataccacgctctctctaaactggctgaaaactatggacataacaaacggtctatattctttgttggttccaaaggtagtgtcaaatgcgatgacatcgccaaagtgagcatagtcaacaatcatctctgcatcagcctaaattatattggatatctgctctttgcagtccatttgtattgtatattgaaatgagggattctctacaactttaacttaaaaatattttagcaaaattccagattccagcctcaccatgcaacatctctctttgacgtttagtatgcatccaccaagaaactcatgtgctgctataggtgcaataccggaatcatcagccacctcaatatcaatagcttggtgcttagaaatgtttgtctgtgacggaatcagatgactagtttgagcaatttggagaatgtggttgtgctcaataaataagtcatgtaccttgtaaaccctattttctctttcataagtaatgcccatgcaaactctatagtctgttcttgtatgagctcgatcacgcttgctaacacagaacttctttattttcagcactatagccctgatttgaacaaacagatctactcaatgttaccaatccatcaagagcactcgggtttgagtaacactttcaaacatcaaaacccatccggccaccatatgtaacccaaaagttccaagcttcatcggaactgctaaatgtcataccaatttgtggaattcaaaaaggaattgcagcaactatgcggttgtaaataatgcattcagaacacgaccaactggatgttctcatcatttaaagtagaacttcaaccatgcagaaacgaataactaagtaggagtagagcacaaaccttgcaggtgattcctcgagcagctgctgggtgttgtccatcgcaacatcaatagcttgttgggcacctgccggcgtgcttggtgctcttgtggagattgtacaggatctcgggtagactgcacagcgccaactttcttcaccacggacatttttttagtaccagcacagacaccttgctgcctccacaatcaacgaattgagagtgcaggaggacatcagctccagcacgtgcagggcagcacaggtgacggtgccttcatgcttcgtgggaagaggcattggggcaacgaatggaggagcaggcgaggaggtgcacacatggcagaggtggccccggaggttccaagagaaggtggcgggggcttgtaaaatgtggcacaatgagcatgaggtgctttgcccttcgatttgatatggacgaccaagattgtgagactgctacagttgcagtctctagctactgcaccagatccagggatcaaatgtgcggtgatagagaagaatgtggagttcactaggcacccacgagcgcacttcatcaacaaccgcacaatggagatcttccgcaagttggatggcttggccagggacattgagaggtcccagccaccagtagatttgtggaggaagttcgtatactgtacttcactctccggttctgtccttggatcggttgatcacatgaaacaggaagattttgacaaggtcattagtcctgtatccgttgcacatttctcacagtacaagttagttgatttgctactcaagaagcttgaaggtattggtttccagacatgctttcccagtgagattggtaactcaacacaagatttggtactggaaagcaagatattgatgggacacaagtgcacatcccttgatcagactgatgagggcattctggttggagcatcagttaacaatggagggatgataatagagagaaagctacactgtggtcttcttatagggacagatggcgcaagaagtacagtgcgtgaattggcaggtatatctatggaaggtgaaagggatttgcagaaactggtcagtgtgcattttcttagcagagatctaggcaggtatttgtccagtcagaggccagggatgctgttcttcatttttaatccaggtgcaattggtgtactagttgcacatgacctagagaatggggaatttgtattgcaggttccattttatcctcctcagcagatgtttgaagattttagtgctaaggtatgcgagcaaattattttcaaattagtcggatgggagccagcagatgttcatgttttagacataaaaccatgggcaatgcatgctgaagttgcagagaagtacatctgctgcaataatcgagtaatcctctctggtgatgccgcacaccggtttcctcctgctggtggttttggaatgaacaccggtgtccaggatgtacataatttggcttggaaattgggcttactgctgaatggtgtcgcctcaccatcaatattacaaacttatgagtcagagcgccggcctgttgcaattttcaataccgaacttagcgtggagaatttcaaggcagctatgtctattcctacaacccttggccttgatccaactgttgcaaactcagtgcatcaagttataaatagaagcctcggatcaatcattccaagaaatgtgcagaaggcagttctagaaggattgttttctcttggtagggcacaagtctcagactatatcctgaatgagaaaaatcccattgggtcgttgagactagcaagattgagaagtattctcgatgaaggcaaaagtcttcagctgcagttccctgcagaggatcttggcttccactatgcagaaggtgctctagttgttgaagctagttgtgagaagactcatgaaggagaaaaactacagcattctaagagggcatcaagagagtacatcccatctgctaaggttggttcgcggcttccccacatgctagtaagagaagtgcctgcttcgagtgagggcgcgttctcaacactggacctagtgagtggggataaactcgagtttgttctcatcattgcaccagtgaaagagtcatatgagattgcccgtgccaccctcaagatagcagatgagcttacgctatcagccagagtatgtgtaatgtggccacgaggttcgactgatgctgaagtggaagagagcagatccgagttgacaccctggacaaactacatcgatgtcgaggaagtgcctagggtgtcgggtggttcatggtgggagatgtgtcgtattagtaggaagagtgtccttttggttaggcctgatgagcacatagcatggctaacagaactggacagggtgagggatgctgagtcagaaattaggagggtcttctctcatgttctgtgcctaaatagccaccgggtgtaagaatttataaatttccttccatttaggctttgtttagatactttggtattcactttaatccacatgtatggaagcggattaggttataaattaaattaatttacatcctaatccacctcactccaaaccgcacaagaggacgttaacagaagatcttcgcacaagaggactttttttagtttcatcgtgttatttaggtactcgataaaatcaaatttggattgaattccttgac

SEQ ID NO: 216573 - DNA, 3289 bp, Zea Mays
agccccgctgccgccgggttcatcagcagaagctgcttgctccgccgccgccgccctcttcctcctctactggttgcagcctattccaccaccgacgctgaaggccatacgcccccaatcgaatcgatcacatctatgccgtcgatcaccagaggtgggcgtggggggctcttctccacgcaccggggcgcgctcttgtggctccgccgttgccaaagcccactcttgtcgacactagccggcggcggaggccggagcgacgcgccacatctgcccgtactcatcgtcggagctggccctgttgggctcgtcctctcattcctcctcaccaaattcgcactatagccctgatttgaacaaacagatctactcaatgttaccaatccatcaagagcactcgggtttgagtaacactttcaaacatcaaaacccatccggccaccatatgtaacccaaaagttccaagcttcatcggaactgctaaatgtcataccaatttgtggaattcaaaaaggaattgcagcaactatgcggttgtaaataatgcattcagaacacgaccaactggatgttctcatcatttaaagtagaacttcaaccatgcagaaacgaataactaagtaggagtagagcacaaaccttgcaggtgattcctcgagcagctgctgggtgttgtccatcgcaacatcaatagcttgttgggcacctgccggcgtgcttggtgctcttgtggagattgtacaggatctcgggtagactgcacagcgccaactttcttcaccacggacatttttttagtaccagcacagacaccttgctgcctccacaatcaacgaattgagagtgcaggaggacatcagctccagcacgtgcagggcagcacaggtgacggtgccttcatgcttcgtgggaagaggcattggggcaacgaatggaggagcaggcgaggaggtgcacacatggcagaggtggccccggaggttccaaggtgatgcagctctccagcctccctccactccgagcaaagcgaaaagtggtgccaaagcttgtgtttttttgcctccaaaggagcagagaaggtggcgggggcttgtaaaatgtggcacaatgagcatgaggtgctttgcccttcgatttgatatggacgaccaagattgtgagactgctacagttgcagtctctagctactgcaccagatccagggatcaaatgtgcggtgatagagaagaatgtggagttcactaggcacccacgagcgcacttcatcaacaaccgcacaatggagatcttccgcaagttggatggcttggccagggacattgagaggtcccagccaccagtagatttgtggaggaagttcgtatactgtacttcactctccggttctgtccttggatcggttgatcacatgaaacaggaagattttgacaaggtcattagtcctgtatccgttgcacatttctcacagtacaagttagttgatttgctactcaagaagcttgaaggtattggtttccagacatgctttcccagtgagattggtaactcaacacaagatttggtactggaaagcaagatattgatgggacacaagtgcacatcccttgatcagactgatgagggcattctggttggagcatcagttaacaatggagggatgataatagagagaaagctacactgtggtcttcttatagggacagatggcgcaagaagtacagtgcgtgaattggcaggtatatctatggaaggtgaaagggatttgcagaaactggtcagtgtgcattttcttagcagagatctaggcaggtatttgtccagtcagaggccagggatgctgttcttcatttttaatccaggtgcaattggtgtactagttgcacatgacctagagaatggggaatttgtattgcaggttccattttatcctcctcagcagatgtttgaagattttagtgctaagttgcagagaagtacatctgctgcaataatcgagtaatcctctctggtgatgccgcacaccggtttcctcctgctggtggttttggaatgaacaccggtgtccaggatgtacataatttggcttggaaattgggcttactgctgaatggtgtcgcctcaccatcaatattacaaacttatgagtcagagcgccggcctgttgcaattttcaataccgaacttagcgtggagaatttcaaggcagctatgtctattcctacaacccttggccttgatccaactgttgcaaactcagtgcatcaagttataaatagaagcctcggatcaatcattccaagaaatgtgcagaaggcagttctagaaggattgttttctcttggtagggcacaagtctcagactatatcctgaatgagaaaaatcccattgggtcgttgagactagcaagattgagaagtattctcgatgaaggcaaaagtcttcagctgcagttccctgcagaggatcttggcttccactatgcagaaggtgctctagttgttgaagctagttgtgagaagactcatgaaggagaaaaactacagcattctaagagggcatcaagagagtacatcccatctgctaaggttggttcgcggcttccccacatgctagtaagagaagtgcctgcttcgagtgagggcgcgttctcaacactggacctagtgagtggggataaactcgagtttgttctcatcattgcaccagtgaaagagtcatatgagattgcccgtgccaccctcaagatagcagatgagcttacgctatcagccagagtatgtgtaatgtggccacgaggttcgactgatgctgaagtggaagagagcagatccgagttgacaccctggacaaactacatcgatgtcgaggaagtgcctagggtgtcgggtggttcatggtgggagatgtgtcgtattagtaggaagagtgtccttttggttaggcctgatgagcacatagcatggctaacagaactggacagggtgagggatgctgagtcagaaattaggagggtcttctctcatgttctgtgcctaaatagccaccgggtgtaagaatttataaatttccttccatttaggctttgtttagatactttggtattcactttaatccacatgtatggaagcggattaggttataaattaaattaatttacatcctaatccacctcactccaaaccgcacaagaggacgttaacagaagatcttcgcacaagaggactttttttagtttcatcgtgttatttaggtactcgataaaatcaaatttggattgaattccttgac

SEQ ID NO: 216574 - DNA, 2060 bp, Zea Mays
ccagccccgctgccgccgggatcaaatgtgcggtgatagagaagaatgtggagttcactaggcacccacgagcgcacttcatcaacaaccgcacaatggagattttgacaaggtcattagtcctgtatccgttgcacatttctcacagtacaagttagttgatttgctactcaagaagcttgaaggtattggtttccagacatgctttcccagtgagattggtaactcaacacaagatttggtactggaaagcaagatattgatgggacacaagtgcacatcccttgatcagactgatgagggcattctggttggagcatcagttaacaatggagggatgataatagagagaaagctacactgtggtcttcttatagggacagatggcgcaagaagtacagtgcgtgaattggcaggtatatctatggaaggtgaaagggatttgcagaaactggtcagtgtgcattttcttagcagagatctaggcaggtatttgtccagtcagaggccagggatgctgttcttcatttttaatccaggtgcaattggtgtactagttgcacatgacctagagaatggggaatttgtattgcaggttccattttatcctcctcagcagatgtttgaagattttagtgctaaggtatgcgagcaaattattttcaaattagtcggatgggagccagcagatgttcatgttttagacataaaaccatgggcaatgcatgctgaagttgcagagaagtacatctgctgcaataatcgagtaatcctctctggtgatgccgcacaccggtttcctcctgctggtggttttggaatgaacaccggtgtccaggatgtacataatttggcttggaaattgggcttactgctgaatggtgtcgcctcaccatcaatattacaaacttatgagtcagagcgccggcctgttgcaattttcaataccgaacttagcgtggagaatttcaaggcagctatgtctattcctacaacccttggccttgatccaactgttgcaaactcagtgcatcaagttataaatagaagcctcggatcaatcattccaagaaatgtgcagaaggcagttctagaaggattgttttctcttggtagggcacaagtctcagactatatcctgaatgagaaaaatcccattgggtcgttgagactagcaagattgagaagtattctcgatgaaggcaaaagtcttcagctgcagttccctgcagaggatcttggcttccactatgcagaaggtgctctagttgttgaagctagttgtgagaagactcatgaaggagaaaaactacagcattctaagagggcatcaagagagtacatcccatctgctaaggttggttcgcggcttccccacatgctagtaagagaagtgcctgcttcgagtgagggcgcgttctcaacactggacctagtgagtggggataaactcgagtttgttctcatcattgcaccagtgaaagagtcatatgagattgcccgtgccaccctcaagatagcagatgagcttacgctatcagccagagtatgtgtaatgtggccacgaggttcgactgatgctgaagtggaagagagcagatccgagttgacaccctggacaaactacatcgatgtcgaggaagtgcctagggtgtcgggtggttcatggtgggagatgtgtcgtattagtaggaagagtgtccttttggttaggcctgatgagcacatagcatggctaacagaactggacagggtgagggatgctgagtcagaaattaggagggtcttctctcatgttctgtgcctaaatagccaccgggtgtaagaatttataaatttccttccatttaggctttgtttagatactttggtattcactttaatccacatgtatggaagcggattaggttataaattaaattaatttacatcctaatccacctcactccaaaccgcacaagaggacgttaacagaagatcttcgcacaagaggactttttttagtttcatcgtgttatttaggtactcgataaaatcaaatttggattgaattccttgac

SEQ ID NO: 216575 - DNA, 2487 bp, Zea Mays
cccagccccgctgccgccgggttcatcagcagaagctgcttgctccgccgccgccgccctcttcctcctctactggttgcagcctattccaccaccgacgctgaaggccatacgcccccaatcgaatcgatcacatctatgccgtcgatcaccagaggtgggcgtggggggctcttctccacgcaccggggcgcgctcttgtggctccgccgttgccaaagcccactcttgtcgacactagccggcggcggaggccggagcgacgcgccacatctgcccgtactcatcgtcggagctggccctgttgggctcgtcctctcattcctcctcaccaaattcgggatcaaatgtgcggtgatagagaagaatgtggagttcactaggcacccacgagcgcacttcatcaacaaccgcacaatggagattttgacaaggtcattagtcctgtatccgttgcacatttctcacagtacaagttagttgatttgctactcaagaagcttgaaggtattggtttccagacatgctttcccagtgagattggtaactcaacacaagatttggtactggaaagcaagatattgatgggacacaagtgcacatcccttgatcagactgatgagggcattctggttggagcatcagttaacaatggagggatgataatagagagaaagctacactgtggtcttcttatagggacagatggcgcaagaagtacagtgcgtgaattggcaggtatatctatggaaggtgaaagggatttgcagaaactggtcagtgtgcattttcttagcagagatctaggcaggtatttgtccagtcagaggccagggatgctgttcttcatttttaatccaggtgcaattggtgtactagttgcacatgacctagagaatggggaatttgtattgcaggttccattttatcctcctcagcagatgtttgaagattttagtgctaagttgcagagaagtacatctgctgcaataatcgagtaatcctctctggtgatgccgcacaccggtttcctcctgctggtggttttggaatgaacaccggtgtccaggatgtacataatttggcttggaaattgggcttactgctgaatggtgtcgcctcaccatcaatattacaaacttatgagtcagagcgccggcctgttagaatcttctcacacgctttctgttcatccaatgttgcaattttcaataccgaacttagcgtggagaatttcaaggcagctatgtctattcctacaacccttggccttgatccaactgttgcaaactcagtgcatcaagttataaatagaagcctcggatcaatcattccaagaaatgtgcagaaggcagttctagaaggattgttttctcttggtagggcacaagtctcagactatatcctgaatgagaaaaatcccattgggtcgttgagactagcaagattgagaagtattctcgatgaaggcaaaagtcttcagctgcagttccctgcagaggatcttggcttccagtaagaccctttacaaccagaatgttcctcaaaaacaaccttttctttatttctttcagcttagttgatgggacatgagcagacttcattaatctgaccatcttatcagaatggtgaaaattatgcaaatttttcttgtctctttcacttcttccttcagctatgcagaaggtgctctagttgttgaagctagttgtgagaagactcatgaaggagaaaaactacagcattctaagagggcatcaagagagtacatcccatctgctaaggttggttcgcggcttccccacatgctagtaagagaagtgcctgcttcgagtgagggcgcgttctcaacactggacctagtgagtggggataaactcgagtttgttctcatcattgcaccagtgaaagagtcatatgagattgcccgtgccaccctcaagatagcagatgagcttacgctatcagccagagtatgtgtaatgtggccacgaggttcgactgatgctgaagtggaagagagcagatccgagttgacaccctggacaaactacatcgatgtcgaggaagtgcctagggtgtcgggtggttcatggtgggagatgtgtcgtattagtaggaagagtgtccttttggttaggcctgatgagcacatagcatggctaacagaactggacagggtgagggatgctgagtcagaaattaggagggtcttctctcatgttctgtgcctaaatagccaccgggtgtaagaatttataaatttccttccatttaggctttgtttagatactttggtattcactttaatccacatgtatggaagcggattaggttataaattaaattaatttacatcctaatccacctcactccaaaccgcacaagaggacgttaacagaagatcttcgcacaagaggactttttttagtttcatcgtgttatttaggtactcgataaaatcaaatttggattgaattccttgac

SEQ ID NO: 216576 - DNA, 682 bp, Zea Mays
agaaggattacctctctcgcgtgcgtgcgtcttcttcgttggaggcggcgtctatcgagctcacgtcctggcgatcacgccggtggccaggggcatgacaggcgcacacgcactccaacggcgccgtctacgccaacggcaccaccgagatcccctccccttctgctgccaggcagcctttcatcatcggggtttctggagagacggcgttggggaagacgacggtgtgcgacatgattatccaacagctgcacgaccaccgcgtcgtgctcgttagccaggattcattctactgtggtctaaccgctgaagagtctgcacatgcacaagactacaattttgatcaccctaatgcatttgatacagaacaacttatggaatgcatgagaaatttgctgttttgccactctcaaatttggctgtctgttattatgccatcccgtgtctatgactggtgggaccgtctgtgtctatgatttgtgggtccgatgacatactggcgaaggccacaaatgataatggcaaaattgccaatggctcggaatgcatggtgcagctgaaacgtgctcaacctgcaaatgttcctatatatgatttcaagaagcatcgacggtgttctgaaacctttaggaagataccgacattaggcttgctcggtgaatcagacgtgatacagttgaaa

SEQ ID NO: 216577 - DNA, 2504 bp, Zea Mays
agcaagggtattctttatgaaatatacaaaactaaagcgttgcgggcttgcggcgtccccgtctttccccaccggcaggcgccagcttcagctaaacgacgccgcaccaggaaaaaggtctaccttccgatattccactgtcttgtttccattctcccctcctctccggctctccctcccccgacagctgcccccgcatggtgtgatcaggccatctggtgcgggaagaaaagacgcgacacagcgagccatgctcccgccgcgcgccgccgccgtgccgctgctgctgctggccctggcggccggcgcggcccggggcgccgacgacctggcatcggacgccgtggcgctgcaagccttcctcgcgccattcggatccgcgaccgtgtcgtggaactcgtcccagccgacatgctcctggacgggtgtcgtctgcaccggcggccgcgtcacggagatccacctgcccggggaaggcctccggggcgcgctccccgtcggcgcgctcggcgggctcaacaagctcgccgtgctgtcgctgcggtacaacgcgctctccggcccgctgcctcgggacctcgcctcctgcgtcgagctccgggtgatcaacttgcagtccaacctcctctcgggggagctcccggtggaggtgctggcgctaccggcgttgacgcagctcaacctcgcgcagaaccgcttgtcggggaggatatcgccggccattgccaagaacgggcggctgcagctgctcttcctgaacggcaaccgccttaccggagagctaccgaacgtcagcatgccgtcgctcaccgcgctaaacgtctccttcaacaacctcagcggcgagatacccaagagcttcggcggcatgccgtccacgtctttcctcggcatgccgttgtgcggcaagcccctcccgccgtgccgagcgccgggttcggaagcatcgccgtctcagcctcccactcccacgcttcggcccgaggcaccggccccgactgacaaccgcggacggggcaggcatcacctcgccggcggcgccatcgctggcattgtggttggctgcgcgtttggcttcctcctgatcgcggccgtcctcgtcctcgtgtgtggcgcgctgcggcgggagccgagaccgacataccgcagccgtgacgccgttgcggcggagctggccctgcacagcaaagaggcaatgagccccaacggctacaccccacgtgtctcagacgcgcgaccgccgcccccgccttcagtcccgccaccgccagccgtctccgccgcagccgtggggcggaagaagctcttcttcttcggtaggattccccggccctacgacctcgaggacctgctccgcgcgtccgccgaggttcttggcaagggcacgcacgggaccacgtacaaggccgcgatcgagtctgggccggtcatggcggtgaagcgcctcaaggagacctcgttgcccgaacgcgagttccgggacaaggtcgcggccatcggcgggatcgaccacccaaatgtcgtgcccctgcaggcctattacttcagcaaggacgagaagcttatggtgtacgagttcgtggccatgggcagcctttcctccatgcttcacggcaatcgcggctccggccggtcgccactgagctgggagtcgaggaggcgcatcgctttggcctcggcgcgcggtctcgagtacatccacgccacgggctccatggtcacgcacggcaacatcaagtcgtccaacatcctcttgagccgcaccgtggacgcgcgcgtggccgaccacgggctcgcgcacctcgtcaacccggcgggcgcggcgacgacgacccgcgtcgcggggtaccgcgcgcccgaggtggtggcggacccgcggcgggcgtcgcagaaggcggacgcgtacagcttcggcgtgctgctcctggagctgctgacggggaaggccccggcgcacgcggtgctgcacgacgagggcgtggacctcccgcgctgggcgcggtccgtggtgaaggaggagtggacgtccgaggtgttcgacacggagctgctcaggcacccgggcgccgaggacgagatggtggagatgctgcggctggccatggactgcaccgagcccgctccggaccagcggccggccatgcccgagatcgtggcgcgcatcgaggggctcggcggcacggcgtcgacgtcgacggcgacggcgcggtccggccggagtgcgtccgtggacgaggcggacgaccggccgctgaggaccaccggatcgatccgtcagagctgaggtccgtccgcgtccgatcacttgtgttattgtcactgacggaaggttctgaacaagggggaaaaaaagaagagatctttctgttctgtcttcttgcgcttgtcgtaggggcgttgtcgtgtgctgtttattctttcatgcgtctcttgacgcttgttcgccctcagatgaattctttcgttttagcagcggtgatgagtgtgcgctgatggtgtgtgaa

SEQ ID NO: 216578 - DNA, 1212 bp, Zea Mays
cttaaggcctattcaacctgccggtgtttgacgtcgaggaagcggctacataacaatgacgacaagacgtagcaagcgcaacaatggccatctatgatgtaatgcagcttgtgagggcagacgtgtccactattggaatgggcatagctggatcaacagcttctataatccttggtggtggcacgaagggcaagcgatttgccatgcccaacaccaggattatgatccatcagcctgtcggaggtgcaagcgggcaggccctagatgtagaggtccaagcgaaggagatattgaccaacaagaggaatgtcattcggatcgtatcaggcttcacaggccgcactcctgagcaggtagagaaagacattgacagagatcgttacatgggccctctcgaggctgtcgattatggactcattgatggcgtgatcgatggagacagtattatcccacttgagcctgtcccggagagggtgaagcctaagtacaactacgaagagctgtacaaggatccacagaagtttcttacaccagatgtcccagatgatgagatatactagtcgaaaagttgtattttgtgcgaatgttaagtctgttcttcagcaagcagatgtttttcgtcgcttgtagctgtcaaaccaaccatagcactagtagcttattgatcttgtttactgactggatggtgattcgagcaggcaactagaacctgttggttgtgtttctggtgttacattgtggtgttagaatggtccggctgtttcgttttgagtcctgaccatttcaggtgtggtacgttgagatcagttaactgttcgtttttttttttttgaccaccagcaaaagcttctacatcccatttcaaaacattttctttatcatgataagtcttataaaatacaaagaatacataactgtaaagtcagtatggcatgcaattgtgactgctcgattgacgattggctggaaatccgtgtttccagagacagatttcaaaggagagtaaaaagttctcagctcaacgtgttctctaatttattcgctgtcatgtggccaccaaaacaggatgaagagtttgccgtgaagtatttctttcttaagctcaaaagtacagtaatggatacaacaatcagattatttagaataggagaaaaaaaagaatacaccaaccagcgatgctggtacaatcgtaatgaatccattcctgtcatc

SEQ ID NO: 216579 - DNA, 1344 bp, Zea Mays
gaccctttattagttcttgtgtttgaggaattagagactaaaaagaactaaaaagtagggactaaagattagtcctatggaaccaagcagagcctaagtcgcaccgtccaggtgtcaactgcaagggaaaacaaagagtgtgtgctgtgtgttatccatttcttctcctctctgctctgttcacttcgttctagtggggagcgccgccgctgcagttgccgccgccaccagagcagtccacctcggtctgatatggcgaccgggagtgcaagtgccatcgcgtccttctccgtggcggcggcagcggctgctgctctgcgcgtcaggcggccatgcgctcgcgcttgcgcttgggccccctcgcagcgaccgcagcaaggggcactcgtcagcctcaagccttgcgcctcactggcaccacaagctcctctgtggcgcgcggagtcggatgccgcggggggtggtgccggcgccggcgatgtcatgggcctcctcctccgggagcgcatagtcttcctcggcaacgagatcgaggacttcctcgcggacgccgtcgtcagccagctcctcctccttgacgccatcgacccggactctgacatccgcctcttcgtcaactcaccagggggatcccttagcgcaacaatggccatctatgatgtaatgcagcttgtgagggcagacgtgtccactattggaatgggcatagctggatcaacagcttctataatccttggtggtggcacgaagggcaagcgatttgccatgcccaacaccaggattatgatccatcagcctgtcggaggtgcaagcgggcaggccctagatgtagaggtccaagcgaaggagatattgaccaacaagaggaatgtcattcggatcgtatcaggcttcacaggccgcactcctgagcaggtagagaaagacattgacagagatcgttacatgggccctctcgaggctgtcgattatggactcattgatggcgtgatcgatggagacagtattatcccacttgagcctgtcccggagagggtgaagcctaagtacaactacgaagagctgtacaaggatccacagaagtttcttacaccagatgtcccagatgatgagatatactagtcgaaaagttgtattttgtgcgaatgttaagtctgttcttcagcaagcagatgtttttcgtcgcttgtagctgtcaaaccaaccatagcactagtagcttattgatcttgtttactgactggatggtgattcgagcaggcaactagaacctgttggttgtaaaaaaaagaatacaccaaccagcgatgctggtacaatcgtaatgaatccattcctgtcatc

SEQ ID NO: 216580 - DNA, 1170 bp, Zea Mays
caataaacacagttgatgaacgacgatgtctacccatatgcatgcagtgcagccgacactgcatatggagtggacatgaatccctttctaacgactggtcatccgatggggagcgtgcgtgcgtacgggtgcgacgcgtcggtgctgctggacccgacgccggcgaacccggagacggagaagacggcgccgatcaacatcgggctggcggcgttcgaggtgatcgacgagatcaaggcggcgctggaggagcggtgcccggggacggtgtcgtgcgcggacatcgtggtgtacgcggcccgggacgcgtcgagcctgctgagcaacgggcacgtccacttcgcggcgcccgcggggcggctggacggcgtggtgtcccgcgccgccgacgcgcagcgcgacctgccggactccaccttcaccgtgtccgagctgatccgcaacttccggcgcaagaacttcacggtggaggagctggtgatcctgtcgggcgcgcacgccgtcggcgtcggccactgctcctcgttccgcgcgcgcctgtcggcgccgccggcgcagatcgtgccggcgtaccggaacctgctgtcgggcaagtgcgcggcggcggcgggcggcgccgacgaccccgtggtggccaacaacgtgcgcgacgaggacccgcgcgccgtcgcggcggccttcccgtccttcctcgggaagctgcgcaaggccagggactttctggacaacagctactaccacaacaacctggcaaggatcgtcaccttcaactccgactggcaactgctcacggagaaggaggcgctggggcacgtcaaggagtacgccgagaacggcaccctctgggacgaggacttctccgacgcgctcctcaagctcagccggctgcccatgccgccgcacagcaagggcgagatcaggaagacgtgccgctgggtcaaccaccactgatcctgctcaagctctgcacccggccggacggaaatataccagatgggtcttcacgccgatttgtttcgatcttctttcattttgttgctgtatgtttgtttgattattatctgatgatatgcatgtgtttttttatgcggttgatctcttgttgtatcttgttctttcatgtatgtatggactatgggcaacactagtaaaacaaattaaacgttggag

SEQ ID NO: 216581 - DNA, 6377 bp, Zea Mays
cgcccaccggcttccggcctccgcccgccgtgggcggcctctgccctcagcccacctggccatctccgcatccggcccccggcctccggtctccagtcgcccccggcttctggtctctgcccccgcagtggtcgtgccccactgggctgaggaggaacagcttccggttcctggtgctgatcttgaacggcgcggcgctcaggtcggaggaggcgttgccggcgagactgaggtcgcagaaggagccataccaaaaaaaatcgtcctccgctactgcctacgtgacaaaaaatcctgcggagacctggcagaagtcgcccggtctcccccgcctctggcttggcctcgccatttacgctacaccttgagatttttattcactccatccaatctggccctgcgtttctagattttgcgagggaagacgccaattaggagcctgagggtgcgacggcctagggtttgtagctactggtgtcgtcgcggcctgtggaggcggtaggggacagcgacatctgcagccatggacgacagcgagctccatgaagaggagaacccaaccaatagtgccgtagatgacgatgacgacgaggattatgaggagcctggtggaggaaatcacttattggggtttatgttcggcaatgtagatgattctggtgatttagatgctgactatcttgatgaggatgcaaaggaacacctttttgcactggcagataagcttggtccatctctcaaagacattgacctaatgaagtcttctccagcaccaactgatccttccgaacaagactatgatgagaaggcagaagatgctgttgattatgaagatattgatgaagaatatgatggacctgaagttgaggcaactacagaggaagacaatgtgttgtcaaaaaaggattacttctcttcatctacagtgtatgcatcagtcaacagtacagtttcagtgtttgacgatgaaaactacgatgaggaagaagaaccacccaatgataatgagcctcctggtgatagtgctgcccaaaatttatcttcagtttctatcgagcaggcagatacgacaacctcaagcgataaccttgccatggaaaagattggcttgttatcacatccagaggaaaacatggactttgaatatgaagatttggagaatgaaaagggcactggggaaggccagcttgagcctgaaagtgcaacttcccttcctgttttatgcatagaggatgggaacgctatcctgagattctctgaaatttttggtatccaagagcctgtaagaaaagtgaagacagatcaccacaaacgaccagtggataaagagcttcagatcgcaaatgttgctgacaatgttgaagaagatgaggaactaattctccggagcactatgcaaaatttctcaactttgaagcacattcatgtgaatgaagattttgttgagagtgacagtgatgagtctatttctgatgtcactttaaggctaaaggattcatgtctttcagaacaaccaatgaaagatgtgcatatggatattcgtattgtccagcgatctccaacttgtcctgatttttatccacttgagcattatgattgggaaagtgatatcatttggaacaattcaccagcaactgatcagcaggcttatgcaaaaatctgtgaatctgaagagagtgaggacactcatggtgaagaccagggtaaggattatggccaggcctccaggtgttgggatgtacagagtaaaaccaatggttctccagtaattaaagagactttttgttgtacagaaatgcctgctccagctaactactgcccccctgggaaaagttaccctccattgacaaacgaagataacttagatcacataatgccaaataacttagatgatgcagttaaaattgacaccatggtgcgtttaaataaccttagtgtactaaacagggaattattagaaggatcatggttggacaacataatttgggatcctaatgaggttaccccaaagcctaaactgatctttgacctcaaagatgatcatatgctttttgagatcctagatgaaaagaatgtggaccatctccagtctcatgctcgtgctatgattgttagccagtcaactaagacttcaacaccaacagttgacaattttggcgatcaaccaaagccattgagtggcaggttcaacatctccaatgacaagttttattcaaataggaagactccacaacaagctaaatctcatactaaaaaacgcgctttaatgggcataaaggtggtgcattctgctccagctcataagctgcaaaccatgaagccagtgttgagcaataaggaaattgcaaactttcatagaccaagagctaagtggtacccacatgaaaataaaattgcctctcagttacaaggacctgcttgtagccatgggaggatggctgttttacttatgtcattgggaggaaaaggagtcaagattctggtcaatgctgaggacactccggtctctgtcaaattaaaagcatcaaagaagttcgaattgaagccttctgagaagatcaaattgttctgttctgggaaagagcttcaggatgacatctcgttagcaatgcaaaatgtgcgaccaaactccattgtgcatgctgttcgcactgaagtgtacctatggccaaaagcacagaaattacctggtgaggacaagcctctacgccctcctggggctttcaggaaaaaaactgacttgtctatcaaggatggacatgtttttttaatggaatattgtgaagagagacctttgcttctctcgaatgcaggaatgggagcccgtctctgtacatattaccagaaaactacccctactgatcagacagctgcatcactgcgaaacaacagtgatggactgggcacagtgcttgcaattgatcctgctgataaatccccttttctaggagagatacattctgggtcccaccaatcttgtcttgaaacaaacatgtatagatcacctgtatttccccataaggttgcaccaactgattacttattagttcgttcagccaaaggggctctttccctccgtcgcattgacaagctatatgttgttggccaacaagaacctcatatggaagtcttttcaccagggactaagaacatgcaaaattatcttctgaaccgagttcttgcatatgtttatcgtgagtttcgtgctagagagaggcctgatgctattcctcagattcgagctgacgagttacccatacaaagtcctctgacagaagccatagtgaaaaaacgattgaagcattgtgcagatttgaagaaaggaccaaaggggcattttttctggacacagagacctgatttccgggttccatcagaagaagaactgaggagattattgacgccagaaagtgtttgctgttatgaaagtatgcaagctggtttgtatcgtctcaagcgcttaggaattctgaagcttactcagcctgttggattggcttctgccatgaatcagcttcctgatgaggctattgagcttgctgctgcatcacatatcgagagggaactgcaaatcactagctggaatcttacaagtaatttcgtcgcttgtactaatcaggacagagaaaatatagaaagattagaaatcactggtgttggagatccatctggtcgtgggttaggattcagctatgtgcgagtagcaccaaaagcacctgcctccaattcagtgctcaagaagaagtcagctgctgcaaagggtaccactgtaactggcactgatgctgatctccgcagattgagcatggatgcagcccgtgagttgctgctaaaatttggcgtacctgaagagcaaattgataaattaacaaggtggcatcggatcgctatggtgaggaagctttcaagtgagcaagctgcatcgggaattactatcgatgaaattcctgttagtaagtttgcacgtggacaaaggatgtcttttctgcaacttcagcagcaaactagggagaaatgtcaggaaatttgggacagacaagttcagtcactttcagctttagatggtgatgacaatgccagtgacacagaagctcacagtgatctagactcatttgctggggatcttgagaacttgctagacgcagaagaatttgatgatgaggatactagtacagcagacttgagaattgacaaagcagatggaatgagaggacttaaaatgagaaggtgctctacgcaagcccaaattaacaaggaaattgaagatgatgaaacagaggcttctctggcaaagaaactacttgaagacgatggcaatgatgtgaagaggaaaaaacagcctgtggaattgacaaattgtggcacctctttagttgccaataaaatgaagcagagtaagactgggcaaacgatcaaatcatctggttatgctggtgcattaaccccaaaggagaacacaccaagagaaggaaaagaggttgaaaattcttttgttgagggtggtttgtcctcaaaactaaaaccaaagatggcactcgatgtaaatgagactgttctagttaaaaagaaaagtgttccaggaaaggatggacctaaggaaaagaaacagggtgcaagaggggatagtcttgtttgtggagcctgtagtcaggttgggcatatgcggactaacaaactgtgccctaagtatcgggaggatccagaaatgtcagaaatggatgctaattcagttaagcccaactctatggatataaaccatttgcaagcaaagacacctaaaaggttgataacaaaagtttcctctgaagttactgaaactgaagggccagaaggtattgagaagacaaaatctgtcccagtaaagttcaaagtaggggcacctgataaatccttggagaggaacatgtcagtctccgtttcactcgtttctgataaacgtgtcatggatgttacagacagtagatctaccggaaaggtaaacaagatagtgatacctaataagatgaagtctgatgatttccctcctgacactccaaagccatctgttgtatttcggcctcctgctgaagaaaaggatgtacctcgcaaaaagatcaccatcaagcagcctaaaggcatagaccagcaaagacatgttgaatctaggagtgttcaggaacccaccagaaagacaagaaaaattgtagaattgtcgagttttgaggataaaagtagagaggatgatcattgggttggtggggaacccagccaggtgaattcctcacatgggaggaggctgggtctggaaggaaaaataagcaaagccacaatggaaaatgaaagatcctggagagattttgaggagcgaagagaaatgccacaagcaaggctctttgatgctacgatatatgcatcaagggaggaagatcatctaaaggcaaaaaagaaaaacaagaaaaagaaaaaacatgaattcaaagatgatgacttacttgatcacaggccatacagaaatgacaggagggtacctgaaagacatcgagcactaaaacgatctagtccagctcctgtggttggatatgcatcatctgccaagcgtcgcagaggaggagaggttgagctctccaacatattggaaaaagtagttgatcacttgcggggtttgagtggatcactgctgtttttaaaaccagtgacaaagaaagaagcttctgattaccttgatatcatacggtacccaatggatcttggtaccatcagggacaaggtgagaaagatggtgtacagaaacagggatgaattcaggcacgacgtagcacagatacaactcaatgcacacatatacaacgacactcgctatcctcacatccctccgcttgctgacgagctcatggaggtctgcgaccatctgctttacgaaaacgcagatctgctcaccgaggcggaagatgctatcgagtagcaatataaaaagctagatttagcatttggatcttgctatatcctaacatagatgatgtatctatcttctgatctgtaggaggggaaaaggttgtacattttttgggcctagcagcaatctacatgtgatcccgaatccagccagcttctgttggtattgtgttgagaggtagtggaagtacaaaatgtctaggttagccactcaatggcctcatgttgtaaaaatgtagaatgtaatcatgtccatatacatggcatatatcggtccaataatccgattgtgttgcagtatttgatatgatatggaatggcgtttcaattgcagcgtgaatcaagcacgggcctgtgtgcacactttcttccaacttgaaccttatttcttatctggaggtgtatatgcattgaaccctgaaccgcaaagctgatggacaattttt

SEQ ID NO: 216582 - DNA, 2319 bp, Zea Mays
gggcggcctctgccctcagcccacctggccatctccgcatccggcccccggcctccggtctccagtcgcccccggcttctggtctctgcccccgcagtggtcgtgccccactgggctgaggaggaacagcttccggttcctggtgctgatcttgaacggcgcggcgctcaggtcggaggaggcgttgccggcgagactgaggtcgcagaaggagccataccaaaaaaaatcgtcctccgctactgcctacgtgacaaaaaatcctgcggagacctggcagaagtcgcccggtctcccccgcctctggcttggcctcgccatttacgctacaccttgagatttttattcactccatccaatctggccctgcgtttctagattttgcgagggaagacgccaattaggagcctgagggtgcgacggcctagggtttgtagctactggtgtcgtcgcggcctgtggaggcggtaggggacagcgacatctgcagccatggacgacagcgagctccatgaagaggagaacccaaccaatagtgccgtagatgacgatgacgacgaggattatgaggagcctggtggaggaaatcacttattggggtttatgttcggcaatgtagatgattctggtgatttagatgctgactatcttgatgaggatgcaaaggaacacctttttgcactggcagataagcttggtccatctctcaaagacattgacctaatgaagtcttctccagcaccaactgatccttccgaacaagactatgatgagaaggcagaagatgctgttgattatgaagatattgatgaagaatatgatggacctgaagttgaggcaactacagaggaagacaatgtgttgtcaaaaaaggattacttctcttcatctacagtgtatgcatcagtcaacagtacagtttcagtgtttgacgatgaaaactacgatgaggaagaagaaccacccaatgataatgagcctcctggtgatagtgctgcccaaaatttatcttcagtttctatcgagcaggcagatacgacaacctcaagcgataaccttgccatggaaaagattggcttgttatcacatccagaggaaaacatggactttgaatatgaagatttggagaatgaaaagggcactggggaaggccagcttgagcctgaaagtgcaacttcccttcctgttttatgcatagaggatgggaacgctatcctgagattctctgaaatttttggtatccaagagcctgtaagaaaagtgaagacagatcaccacaaacgaccagtggataaagagcttcagatcgcaaatgttgctgacaatgttgaagaagatgaggaactaattctccggagcactatgcaaaatttctcaactttgaagcacattcatgtgaatgaagattttgttgagagtgacagtgatgagtctatttctgatgtcactttaaggctaaaggattcatgtctttcagaacaaccaatgaaagatgtgcatatggatattcgtattgtccagcgatctccaacttgtcctgatttttatccacttgagcattatgattgggaaagtgatatcatttggaacaattcaccagcaactgatcagcaggcttatgcaaaaatctgtgaatctgaagagagtgaggacactcatggtgaagaccagggtaaggattatggccaggcctccaggtgttgggatgtacagagtaaaaccaatggttctccagtaattaaagagactttttgttgtacagaaatgcctgctccagctaactactgcccccctgggaaaagttaccctccattgacaaacgaagataacttagatcacataatgccaaataacttagatgatgcagttaaaattgacaccatggtgcgtttaaataaccttagtgtactaaacagggaattattagaaggatcatggttggacaacataatttgggatcctaatgaggttaccccaaagcctaaactgatctttgacctcaaagatgatcatatgctttttgagatcctagatgaaaagaatgtggaccatctccagtctcatgctcgtgctatgattgttagccagtcaactaagacttcaacaccaacagttgacaattttggcgatcaaccaaagccattgagtggcaggttcaacatctccaatgacaagttttattcaaataggaagactccacaacaagctaaatctcatactaaaaaacgcgctttaatgggcataaaggtggtgcattctgctccagctcataagctgcaaaccatgaagccagtgttgagcaatgaagagaacaactag

SEQ ID NO: 216583 - DNA, 6214 bp, Zea Mays
ctgccctcagcccacctggccatctccgcatccggcccccggcctccggtctccagtcgcccccggcttctggtctctgcccccgcagtggtcgtgccccactgggctgaggaggaacagcttccggttcctggtgctgatcttgaacggcgcggcgctcaggtcggaggaggcgttgccggcgagactgaggtcgcagaaggagccataccaaaaaaaatcgtcctccgctactgcctacgtgacaaaaaatcctgcggagacctggcagaagtcgcccggtctcccccgcctctggcttggcctcgccatttacgctacaccttgagatttttattcactccatccaatctggccctgcgtttctagattttgcgagggaagacgccaattaggagcctgagggtgcgacggcctagggtttgtagctactggtgtcgtcgcggcctgtggaggcggtaggggacagcgacatctgcagccatggacgacagcgagctccatgaagaggagaacccaaccaatagtgccgtagatgacgatgacgacgaggattatgaggagcctggtggaggaaatcacttattggggtttatgttcggcaatgtagatgattctggtgatttagatgctgactatcttgatgaggatgcaaaggaacacctttttgcactggcagataagcttggtccatctctcaaagacattgacctaatgaagtcttctccagcaccaactgatccttccgaacaagactatgatgagaaggcagaagatgctgttgattatgaagatattgatgaagaatatgatggacctgaagttgaggcaactacagaggaagacaatgtgttgtcaaaaaaggattacttctcttcatctacagtgtatgcatcagtcaacagtacagtttcagtgtttgacgatgaaaactacgatgaggaagaagaaccacccaatgataatgagcctcctggtgatagtgctgcccaaaatttatcttcagtttctatcgagcaggcagatacgacaacctcaagcgataaccttgccatggaaaagattggcttgttatcacatccagaggaaaacatggactttgaatatgaagatttggagaatgaaaagggcactggggaaggccagcttgagcctgaaagtgcaacttcccttcctgttttatgcatagaggatgggaacgctatcctgagattctctgaaatttttggtatccaagagcctgtaagaaaagtgaagacagatcaccacaaacgaccagtggataaagagcttcagatcgcaaatgttgctgacaatgttgaagaagatgaggaactaattctccggagcactatgcaaaatttctcaactttgaagcacattcatgtgaatgaagattttgttgagagtgacagtgatgagtctatttctgatgtcactttaaggctaaaggattcatgtctttcagaacaaccaatgaaagatgtgcatatggatattcgtattgtccagcgatctccaacttgtcctgatttttatccacttgagcattatgattgggaaagtgatatcatttggaacaattcaccagcaactgatcagcaggcttatgcaaaaatctgtgaatctgaagagagtgaggacactcatggtgaagaccagggtaaggattatggccaggcctccaggtgttgggatgtacagagtaaaaccaatggttctccagtaattaaagagactttttgttgtacagaaatgcctgctccagctaactactgcccccctgggaaaagttaccctccattgacaaacgaagataacttagatcacataatgccaaataacttagatgatgcagttaaaattgacaccatggtgcgtttaaataaccttagtgtactaaacagggaattattagaaggatcatggttggacaacataatttgggatcctaatgaggttaccccaaagcctaaactgatctttgacctcaaagatgatcatatgctttttgagatcctagatgaaaagaatgtggaccatctccagtctcatgctcgtgctatgattgttagccagtcaactaagacttcaacaccaacagttgacaattttggcgatcaaccaaagccattgagtggcaggttcaacatctccaatgacaagttttattcaaataggaagactccacaacaagctaaatctcatactaaaaaacgcgctttaatgggcataaaggtggtgcattctgctccagctcataagctgcaaaccatgaagccagtgttgagcaataaggaaattgcaaactttcatagaccaagagctaagtggtacccacatgaaaataaaattgcctctcagttacaaggacctgcttgtagccatgggaggatggctgttttacttatgtcattgggaggaaaaggagtcaagattctggtcaatgctgaggacactccggtctctgtcaaattaaaagcatcaaagaagttcgaattgaagccttctgagaagatcaaattgttctgttctgggaaagagcttcaggatgacatctcgttagcaatgcaaaatgtgcgaccaaactccattgtgcatgctgttcgcactgaagtgtacctatggccaaaagcacagaaattacctggaatgggagcccgtctctgtacatattaccagaaaactacccctactgatcagacagctgcatcactgcgaaacaacagtgatggactgggcacagtgcttgcaattgatcctgctgataaatccccttttctaggagagatacattctgggtcccaccaatcttgtcttgaaacaaacatgtatagatcacctgtatttccccataaggttgcaccaactgattacttattagttcgttcagccaaaggggctctttccctccgtcgcattgacaagctatatgttgttggccaacaagaacctcatatggaagtcttttcaccagggactaagaacatgcaaaattatcttctgaaccgagttcttgcatatgtttatcgtgagtttcgtgctagagagaggcctgatgctattcctcagattcgagctgacgagttacccatacaaagtcctctgacagaagccatagtgaaaaaacgattgaagcattgtgcagatttgaagaaaggaccaaaggggcattttttctggacacagagacctgatttccgggttccatcagaagaagaactgaggagattattgacgccagaaagtgtttgctgttatgaaagtatgcaagctggtttgtatcgtctcaagcgcttaggaattctgaagcttactcagcctgttggattggcttctgccatgaatcagcttcctgatgaggctattgagcttgctgctgcatcacatatcgagagggaactgcaaatcactagctggaatcttacaagtaatttcgtcgcttgtactaatcaggacagagaaaatatagaaagattagaaatcactggtgttggagatccatctggtcgtgggttaggattcagctatgtgcgagtagcaccaaaagcacctgcctccaattcagtgctcaagaagaagtcagctgctgcaaagggtaccactgtaactggcactgatgctgatctccgcagattgagcatggatgcagcccgtgagttgctgctaaaatttggcgtacctgaagagcaaattgataaattaacaaggtggcatcggatcgctatggtgaggaagctttcaagtgagcaagctgcatcgggaattactatcgatgaaattcctgttagtaagtttgcacgtggacaaaggatgtcttttctgcaacttcagcagcaaactagggagaaatgtcaggaaatttgggacagacaagttcagtcactttcagctttagatggtgatgacaatgccagtgacacagaagctcacagtgatctagactcatttgctggggatcttgagaacttgctagacgcagaagaatttgatgatgaggatactagtacagcagacttgagaattgacaaagcagatggaatgagaggacttaaaatgagaaggtgctctacgcaagcccaaattaacaaggaaattgaagatgatgaaacagaggcttctctggcaaagaaactacttgaagacgatggcaatgatgtgaagaggaaaaaacagcctgtggaattgacaaattgtggcacctctttagttgccaataaaatgaagcagagtaagactgggcaaacgatcaaatcatctggttatgctggtgcattaaccccaaaggagaacacaccaagagaaggaaaagaggttgaaaattcttttgttgagggtggtttgtcctcaaaactaaaaccaaagatggcactcgatgtaaatgagactgttctagttaaaaagaaaagtgttccaggaaaggatggacctaaggaaaagaaacagggtgcaagaggggatagtcttgtttgtggagcctgtagtcaggttgggcatatgcggactaacaaactgtgccctaagtatcgggaggatccagaaatgtcagaaatggatgctaattcagttaagcccaactctatggatataaaccatttgcaagcaaagacacctaaaaggttgataacaaaagtttcctctgaagttactgaaactgaagggccagaaggtattgagaagacaaaatctgtcccagtaaagttcaaagtaggggcacctgataaatccttggagaggaacatgtcagtctccgtttcactcgtttctgataaacgtgtcatggatgttacagacagtagatctaccggaaaggtaaacaagatagtgatacctaataagatgaagtctgatgatttccctcctgacactccaaagccatctgttgtatttcggcctcctgctgaagaaaaggatgtacctcgcaaaaagatcaccatcaagcagcctaaaggcatagaccagcaaagacatgttgaatctaggagtgttcaggaacccaccagaaagacaagaaaaattgtagaattgtcgagttttgaggataaaagtagagaggatgatcattgggttggtggggaacccagccaggtgaattcctcacatgggaggaggctgggtctggaaggaaaaataagcaaagccacaatggaaaatgaaagatcctggagagattttgaggagcgaagagaaatgccacaagcaaggctctttgatgctacgatatatgcatcaagggaggaagatcatctaaaggcaaaaaagaaaaacaagaaaaagaaaaaacatgaattcaaagatgatgacttacttgatcacaggccatacagaaatgacaggagggtacctgaaagacatcgagcactaaaacgatctagtccagctcctgtggttggatatgcatcatctgccaagcgtcgcagaggaggagaggttgagctctccaacatattggaaaaagtagttgatcacttgcggggtttgagtggatcactgctgtttttaaaaccagtgacaaagaaagaagcttctgattaccttgatatcatacggtacccaatggatcttggtaccatcagggacaaggtgagaaagatggtgtacagaaacagggatgaattcaggcacgacgtagcacagatacaactcaatgcacacatatacaacgacactcgctatcctcacatccctccgcttgctgacgagctcatggaggtctgcgaccatctgctttacgaaaacgcagatctgctcaccgaggcggaagatgctatcgagtagcaatataaaaagctagatttagcatttggatcttgctatatcctaacatagatgatgtatctatcttctgatctgtaggaggggaaaaggttgtacattttttgggcctagcagcaatctacatgtgatcccgaatccagccagcttctgttggtattgtgttgagaggtagtggaagtacaaaatgtctaggttagccactcaatggcctcatgttgtaaaaatgtagaatgtaatcatgtccatatacatggcatatatcggtccaataatccgattgtgttgcagtatttgatatgatatggaatggcgtttcaattgcagcgtgaatcaagcacgggcctgtgtgcacactttcttccaacttgaaccttatttcttatctggaggtgtatatgcattgaaccctgaaccgcaaagctgatggacaattttt

SEQ ID NO: 216584 - DNA, 1491 bp, Zea Mays
tcagcccacctggccatctccgcatccggcccccggcctccggtctccagtcgcccccggcttctggtctctgcccccgcagtggtcgtgccccactgggctgaggaggaacagcttccggttcctggtgctgatcttgaacggcgcggcgctcaggtcggaggaggcgttgccggcgagactgaggtcgcagaaggagccataccaaaaaaaatcgtcctccgctactgcctacgtgacaaaaaatcctgcggagacctggcagaagtcgcccggtctcccccgcctctggcttggcctcgccatttacgctacaccttgagatttttattcactccatccaatctggccctgcgtttctagattttgcgagggaagacgccaattaggagcctgagggtgcgacggcctagggtttgtagctactggtgtcgtcgcggcctgtggaggcggtaggggacagcgacatctgcagccatggacgacagcgagctccatgaagaggagaacccaaccaatagtgccgtagatgacgatgacgacgaggattatgaggagcctggtggaggaaatcacttattggggtttatgttcggcaatgtagatgattctggtgatttagatgctgactatcttgatgaggatgcaaaggaacacctttttgcactggcagataagcttggtccatctctcaaagacattgacctaatgaagtcttctccagcaccaactgatccttccgaacaagactatgatgagaaggcagaagatgctgttgattatgaagatattgatgaagaatatgatggacctgaagttgaggcaactacagaggaagacaatgtgttgtcaaaaaaggattacttctcttcatctacagtgtatgcatcagtcaacagtacagtttcagtgtttgacgatgaaaactacgatgaggaagaagaaccacccaatgataatgagcctcctggtgatagtgctgcccaaaatttatcttcagtttctatcgagcaggcagatacgacaacctcaagcgataaccttgccatggaaaagattggcttgttatcacatccagaggaaaacatggactttgaatatgaagatttggagaatgaaaagggcactggggaaggccagcttgagcctgaaagtgcaacttcccttcctgttttatgcatagaggatgggaacgctatcctgagattctctgaaatttttggtatccaagagcctgtaagaaaagtgaagacagatcaccacaaacgaccagtggataaaggtattgtgcatgttgcaacaaaaagatccaagaagcaccatcctcccccatgtatgcaagacattgatagatagatggtagctggagggtgttacctgaaagcaatggttactgagcataattatccttactgcttatgttttcactttgagatgaaaaaaattaactgccactgtctatgtcaatggtttatacttatcatttctaaa

SEQ ID NO: 216585 - DNA, 6328 bp, Zea Mays
ccatctccgcatccggcccccggcctccggtctccagtcgcccccggcttctggtctctgcccccgcagtggtcgtgccccactgggctgaggaggaacagcttccggttcctggtgctgatcttgaacggcgcggcgctcaggtcggaggaggcgttgccggcgagactgaggtcgcagaaggagccataccaaaaaaaatcgtcctccgctactgcctacgtgacaaaaaatcctgcggagacctggcagaagtcgcccggtctcccccgcctctggcttggcctcgccatttacgctacaccttgagatttttattcactccatccaatctggccctgcgtttctagattttgcgagggaagacgccaattaggagcctgagggtgcgacggcctagggtttgtagctactggtgtcgtcgcggcctgtggaggcggtaggggacagcgacatctgcagccatggacgacagcgagctccatgaagaggagaacccaaccaatagtgccgtagatgacgatgacgacgaggattatgaggagcctggtggaggaaatcacttattggggtttatgttcggcaatgtagatgattctggtgatttagatgctgactatcttgatgaggatgcaaaggaacacctttttgcactggcagataagcttggtccatctctcaaagacattgacctaatgaagtcttctccagcaccaactgatccttccgaacaagactatgatgagaaggcagaagatgctgttgattatgaagatattgatgaagaatatgatggacctgaagttgaggcaactacagaggaagacaatgtgttgtcaaaaaaggattacttctcttcatctacagtgtatgcatcagtcaacagtacagtttcagtgtttgacgatgaaaactacgatgaggaagaagaaccacccaatgataatgagcctcctggtgatagtgctgcccaaaatttatcttcagtttctatcgagcaggcagatacgacaacctcaagcgataaccttgccatggaaaagattggcttgttatcacatccagaggaaaacatggactttgaatatgaagatttggagaatgaaaagggcactggggaaggccagcttgagcctgaaagtgcaacttcccttcctgttttatgcatagaggatgggaacgctatcctgagattctctgaaatttttggtatccaagagcctgtaagaaaagtgaagacagatcaccacaaacgaccagtggataaagagcttcagatcgcaaatgttgctgacaatgttgaagaagatgaggaactaattctccggagcactatgcaaaatttctcaactttgaagcacattcatgtgaatgaagattttgttgagagtgacagtgatgagtctatttctgatgtcactttaaggctaaaggattcatgtctttcagaacaaccaatgaaagatgtgcatatggatattcgtattgtccagcgatctccaacttgtcctgatttttatccacttgagcattatgattgggaaagtgatatcatttggaacaattcaccagcaactgatcagcaggcttatgcaaaaatctgtgaatctgaagagagtgaggacactcatggtgaagaccagggtaaggattatggccaggcctccaggtgttgggatgtacagagtaaaaccaatggttctccagtaattaaagagactttttgttgtacagaaatgcctgctccagctaactactgcccccctgggaaaagttaccctccattgacaaacgaagataacttagatcacataatgccaaataacttagatgatgcagttaaaattgacaccatggtgcgtttaaataaccttagtgtactaaacagggaattattagaaggatcatggttggacaacataatttgggatcctaatgaggttaccccaaagcctaaactgatctttgacctcaaagatgatcatatgctttttgagatcctagatgaaaagaatgtggaccatctccagtctcatgctcgtgctatgattgttagccagtcaactaagacttcaacaccaacagttgacaattttggcgatcaaccaaagccattgagtggcaggttcaacatctccaatgacaagttttattcaaataggaagactccacaacaagctaaatctcatactaaaaaacgcgctttaatgggcataaaggtggtgcattctgctccagctcataagctgcaaaccatgaagccagtgttgagcaataaggaaattgcaaactttcatagaccaagagctaagtggtacccacatgaaaataaaattgcctctcagttacaaggacctgcttgtagccatgggaggatggctgttttacttatgtcattgggaggaaaaggagtcaagattctggtcaatgctgaggacactccggtctctgtcaaattaaaagcatcaaagaagttcgctttttgcagaattgaagccttctgagaagatcaaattgttctgttctgggaaagagcttcaggatgacatctcgttagcaatgcaaaatgtgcgaccaaactccattgtgcatgctgttcgcactgaagtgtacctatggccaaaagcacagaaattacctggtgaggacaagcctctacgccctcctggggctttcaggaaaaaaactgacttgtctatcaaggatggacatgtttttttaatggaatattgtgaagagagacctttgcttctctcgaatgcaggaatgggagcccgtctctgtacatattaccagaaaactacccctactgatcagacagctgcatcactgcgaaacaacagtgatggactgggcacagtgcttgcaattgatcctgctgataaatccccttttctaggagagatacattctgggtcccaccaatcttgtcttgaaacaaacatgtatagatcacctgtatttccccataaggttgcaccaactgattacttattagttcgttcagccaaaggggctctttccctccgtcgcattgacaagctatatgttgttggccaacaagaacctcatatggaagtcttttcaccagggactaagaacatgcaaaattatcttctgaaccgagttcttgcatatgtttatcgtgagtttcgtgctagagagaggcctgatgctattcctcagattcgagctgacgagttacccatacaaagtcctctgacagaagccatagtgaaaaaacgattgaagcattgtgcagatttgaagaaaggaccaaaggggcattttttctggacacagagacctgatttccgggttccatcagaagaagaactgaggagattattgacgccagaaagtgtttgctgttatgaaagtatgcaagctggtttgtatcgtctcaagcgcttaggaattctgaagcttactcagcctgttggattggcttctgccatgaatcagcttcctgatgaggctattgagcttgctgctgcatcacatatcgagagggaactgcaaatcactagctggaatcttacaagtaatttcgtcgcttgtactaatcaggacagagaaaatatagaaagattagaaatcactggtgttggagatccatctggtcgtgggttaggattcagctatgtgcgagtagcaccaaaagcacctgcctccaattcagtgctcaagaagaagtcagctgctgcaaagggtaccactgtaactggcactgatgctgatctccgcagattgagcatggatgcagcccgtgagttgctgctaaaatttggcgtacctgaagagcaaattgataaattaacaaggtggcatcggatcgctatggtgaggaagctttcaagtgagcaagctgcatcgggaattactatcgatgaaattcctgttagtaagtttgcacgtggacaaaggatgtcttttctgcaacttcagcagcaaactagggagaaatgtcaggaaatttgggacagacaagttcagtcactttcagctttagatggtgatgacaatgccagtgacacagaagctcacagtgatctagactcatttgctggggatcttgagaacttgctagacgcagaagaatttgatgatgaggatactagtacagcagacttgagaattgacaaagcagatggaatgagaggacttaaaatgagaaggtgctctacgcaagcccaaattaacaaggaaattgaagatgatgaaacagaggcttctctggcaaagaaactacttgaagacgatggcaatgatgtgaagaggaaaaaacagcctgtggaattgacaaattgtggcacctctttagttgccaataaaatgaagcagagtaagactgggcaaacgatcaaatcatctggttatgctggtgcattaaccccaaaggagaacacaccaagagaaggaaaagaggttgaaaattcttttgttgagggtggtttgtcctcaaaactaaaaccaaagatggcactcgatgtaaatgagactgttctagttaaaaagaaaagtgttccaggaaaggatggacctaaggaaaagaaacagggtgcaagaggggatagtcttgtttgtggagcctgtagtcaggttgggcatatgcggactaacaaactgtgccctaagtatcgggaggatccagaaatgtcagaaatggatgctaattcagttaagcccaactctatggatataaaccatttgcaagcaaagacacctaaaaggttgataacaaaagtttcctctgaagttactgaaactgaagggccagaaggtattgagaagacaaaatctgtcccagtaaagttcaaagtaggggcacctgataaatccttggagaggaacatgtcagtctccgtttcactcgtttctgataaacgtgtcatggatgttacagacagtagatctaccggaaaggtaaacaagatagtgatacctaataagatgaagtctgatgatttccctcctgacactccaaagccatctgttgtatttcggcctcctgctgaagaaaaggatgtacctcgcaaaaagatcaccatcaagcagcctaaaggcatagaccagcaaagacatgttgaatctaggagtgttcaggaacccaccagaaagacaagaaaaattgtagaattgtcgagttttgaggataaaagtagagaggatgatcattgggttggtggggaacccagccaggtgaattcctcacatgggaggaggctgggtctggaaggaaaaataagcaaagccacaatggaaaatgaaagatcctggagagattttgaggagcgaagagaaatgccacaagcaaggctctttgatgctacgatatatgcatcaagggaggaagatcatctaaaggcaaaaaagaaaaacaagaaaaagaaaaaacatgaattcaaagatgatgacttacttgatcacaggccatacagaaatgacaggagggtacctgaaagacatcgagcactaaaacgatctagtccagctcctgtggttggatatgcatcatctgccaagcgtcgcagaggaggagaggttgagctctccaacatattggaaaaagtagttgatcacttgcggggtttgagtggatcactgctgtttttaaaaccagtgacaaagaaagaagcttctgattaccttgatatcatacggtacccaatggatcttggtaccatcagggacaaggtgagaaagatggtgtacagaaacagggatgaattcaggcacgacgtagcacagatacaactcaatgcacacatatacaacgacactcgctatcctcacatccctccgcttgctgacgagctcatggaggtctgcgaccatctgctttacgaaaacgcagatctgctcaccgaggcggaagatgctatcgagtagcaatataaaaagctagatttagcatttggatcttgctatatcctaacatagatgatgtatctatcttctgatctgtaggaggggaaaaggttgtacattttttgggcctagcagcaatctacatgtgatcccgaatccagccagcttctgttggtattgtgttgagaggtagtggaagtacaaaatgtctaggttagccactcaatggcctcatgttgtaaaaatgtagaatgtaatcatgtccatatacatggcatatatcggtccaataatccgattgtgttgcagtatttgatatgatatggaatggcgtttcaattgcagcgtgaatcaagcacgggcctgtgtgcacactttcttccaacttgaaccttatttcttatctggaggtgtatatgcattgaaccctgaaccgcaaagctgatggacaattttt

SEQ ID NO: 216586 - DNA, 6322 bp, Zea Mays
ccatctccgcatccggcccccggcctccggtctccagtcgcccccggcttctggtctctgcccccgcagtggtcgtgccccactgggctgaggaggaacagcttccggttcctggtgctgatcttgaacggcgcggcgctcaggtcggaggaggcgttgccggcgagactgaggtcgcagaaggagccataccaaaaaaaatcgtcctccgctactgcctacgtgacaaaaaatcctgcggagacctggcagaagtcgcccggtctcccccgcctctggcttggcctcgccatttacgctacaccttgagatttttattcactccatccaatctggccctgcgtttctagattttgcgagggaagacgccaattaggagcctgagggtgcgacggcctagggtttgtagctactggtgtcgtcgcggcctgtggaggcggtaggggacagcgacatctgcagccatggacgacagcgagctccatgaagaggagaacccaaccaatagtgccgtagatgacgatgacgacgaggattatgaggagcctggtggaggaaatcacttattggggtttatgttcggcaatgtagatgattctggtgatttagatgctgactatcttgatgaggatgcaaaggaacacctttttgcactggcagataagcttggtccatctctcaaagacattgacctaatgaagtcttctccagcaccaactgatccttccgaacaagactatgatgagaaggcagaagatgctgttgattatgaagatattgatgaagaatatgatggacctgaagttgaggcaactacagaggaagacaatgtgttgtcaaaaaaggattacttctcttcatctacagtgtatgcatcagtcaacagtacagtttcagtgtttgacgatgaaaactacgatgaggaagaagaaccacccaatgataatgagcctcctggtgatagtgctgcccaaaatttatcttcagtttctatcgagcaggcagatacgacaacctcaagcgataaccttgccatggaaaagattggcttgttatcacatccagaggaaaacatggactttgaatatgaagatttggagaatgaaaagggcactggggaaggccagcttgagcctgaaagtgcaacttcccttcctgttttatgcatagaggatgggaacgctatcctgagattctctgaaatttttggtatccaagagcctgtaagaaaagtgaagacagatcaccacaaacgaccagtggataaagagcttcagatcgcaaatgttgctgacaatgttgaagaagatgaggaactaattctccggagcactatgcaaaatttctcaactttgaagcacattcatgtgaatgaagattttgttgagagtgacagtgatgagtctatttctgatgtcactttaaggctaaaggattcatgtctttcagaacaaccaatgaaagatgtgcatatggatattcgtattgtccagcgatctccaacttgtcctgatttttatccacttgagcattatgattgggaaagtgatatcatttggaacaattcaccagcaactgatcagcaggcttatgcaaaaatctgtgaatctgaagagagtgaggacactcatggtgaagaccagggtaaggattatggccaggcctccaggtgttgggatgtacagagtaaaaccaatggttctccagtaattaaagagactttttgttgtacagaaatgcctgctccagctaactactgcccccctgggaaaagttaccctccattgacaaacgaagataacttagatcacataatgccaaataacttagatgatgcagttaaaattgacaccatggtgcgtttaaataaccttagtgtactaaacagggaattattagaaggatcatggttggacaacataatttgggatcctaatgaggttaccccaaagcctaaactgatctttgacctcaaagatgatcatatgctttttgagatcctagatgaaaagaatgtggaccatctccagtctcatgctcgtgctatgattgttagccagtcaactaagacttcaacaccaacagttgacaattttggcgatcaaccaaagccattgagtggcaggttcaacatctccaatgacaagttttattcaaataggaagactccacaacaagctaaatctcatactaaaaaacgcgctttaatgggcataaaggtggtgcattctgctccagctcataagctgcaaaccatgaagccagtgttgagcaataaggaaattgcaaactttcatagaccaagagctaagtggtacccacatgaaaataaaattgcctctcagttacaaggacctgcttgtagccatgggaggatggctgttttacttatgtcattgggaggaaaaggagtcaagattctggtcaatgctgaggacactccggtctctgtcaaattaaaagcatcaaagaagttcggttgaattgaagccttctgagaagatcaaattgttctgttctgggaaagagcttcaggatgacatctcgttagcaatgcaaaatgtgcgaccaaactccattgtgcatgctgttcgcactgaagtgtacctatggccaaaagcacagaaattacctggtgaggacaagcctctacgccctcctggggctttcaggaaaaaaactgacttgtctatcaaggatggacatgtttttttaatggaatattgtgaagagagacctttgcttctctcgaatgcaggaatgggagcccgtctctgtacatattaccagaaaactacccctactgatcagacagctgcatcactgcgaaacaacagtgatggactgggcacagtgcttgcaattgatcctgctgataaatccccttttctaggagagatacattctgggtcccaccaatcttgtcttgaaacaaacatgtatagatcacctgtatttccccataaggttgcaccaactgattacttattagttcgttcagccaaaggggctctttccctccgtcgcattgacaagctatatgttgttggccaacaagaacctcatatggaagtcttttcaccagggactaagaacatgcaaaattatcttctgaaccgagttcttgcatatgtttatcgtgagtttcgtgctagagagaggcctgatgctattcctcagattcgagctgacgagttacccatacaaagtcctctgacagaagccatagtgaaaaaacgattgaagcattgtgcagatttgaagaaaggaccaaaggggcattttttctggacacagagacctgatttccgggttccatcagaagaagaactgaggagattattgacgccagaaagtgtttgctgttatgaaagtatgcaagctggtttgtatcgtctcaagcgcttaggaattctgaagcttactcagcctgttggattggcttctgccatgaatcagcttcctgatgaggctattgagcttgctgctgcatcacatatcgagagggaactgcaaatcactagctggaatcttacaagtaatttcgtcgcttgtactaatcaggacagagaaaatatagaaagattagaaatcactggtgttggagatccatctggtcgtgggttaggattcagctatgtgcgagtagcaccaaaagcacctgcctccaattcagtgctcaagaagaagtcagctgctgcaaagggtaccactgtaactggcactgatgctgatctccgcagattgagcatggatgcagcccgtgagttgctgctaaaatttggcgtacctgaagagcaaattgataaattaacaaggtggcatcggatcgctatggtgaggaagctttcaagtgagcaagctgcatcgggaattactatcgatgaaattcctgttagtaagtttgcacgtggacaaaggatgtcttttctgcaacttcagcagcaaactagggagaaatgtcaggaaatttgggacagacaagttcagtcactttcagctttagatggtgatgacaatgccagtgacacagaagctcacagtgatctagactcatttgctggggatcttgagaacttgctagacgcagaagaatttgatgatgaggatactagtacagcagacttgagaattgacaaagcagatggaatgagaggacttaaaatgagaaggtgctctacgcaagcccaaattaacaaggaaattgaagatgatgaaacagaggcttctctggcaaagaaactacttgaagacgatggcaatgatgtgaagaggaaaaaacagcctgtggaattgacaaattgtggcacctctttagttgccaataaaatgaagcagagtaagactgggcaaacgatcaaatcatctggttatgctggtgcattaaccccaaaggagaacacaccaagagaaggaaaagaggttgaaaattcttttgttgagggtggtttgtcctcaaaactaaaaccaaagatggcactcgatgtaaatgagactgttctagttaaaaagaaaagtgttccaggaaaggatggacctaaggaaaagaaacagggtgcaagaggggatagtcttgtttgtggagcctgtagtcaggttgggcatatgcggactaacaaactgtgccctaagtatcgggaggatccagaaatgtcagaaatggatgctaattcagttaagcccaactctatggatataaaccatttgcaagcaaagacacctaaaaggttgataacaaaagtttcctctgaagttactgaaactgaagggccagaaggtattgagaagacaaaatctgtcccagtaaagttcaaagtaggggcacctgataaatccttggagaggaacatgtcagtctccgtttcactcgtttctgataaacgtgtcatggatgttacagacagtagatctaccggaaaggtaaacaagatagtgatacctaataagatgaagtctgatgatttccctcctgacactccaaagccatctgttgtatttcggcctcctgctgaagaaaaggatgtacctcgcaaaaagatcaccatcaagcagcctaaaggcatagaccagcaaagacatgttgaatctaggagtgttcaggaacccaccagaaagacaagaaaaattgtagaattgtcgagttttgaggataaaagtagagaggatgatcattgggttggtggggaacccagccaggtgaattcctcacatgggaggaggctgggtctggaaggaaaaataagcaaagccacaatggaaaatgaaagatcctggagagattttgaggagcgaagagaaatgccacaagcaaggctctttgatgctacgatatatgcatcaagggaggaagatcatctaaaggcaaaaaagaaaaacaagaaaaagaaaaaacatgaattcaaagatgatgacttacttgatcacaggccatacagaaatgacaggagggtacctgaaagacatcgagcactaaaacgatctagtccagctcctgtggttggatatgcatcatctgccaagcgtcgcagaggaggagaggttgagctctccaacatattggaaaaagtagttgatcacttgcggggtttgagtggatcactgctgtttttaaaaccagtgacaaagaaagaagcttctgattaccttgatatcatacggtacccaatggatcttggtaccatcagggacaaggtgagaaagatggtgtacagaaacagggatgaattcaggcacgacgtagcacagatacaactcaatgcacacatatacaacgacactcgctatcctcacatccctccgcttgctgacgagctcatggaggtctgcgaccatctgctttacgaaaacgcagatctgctcaccgaggcggaagatgctatcgagtagcaatataaaaagctagatttagcatttggatcttgctatatcctaacatagatgatgtatctatcttctgatctgtaggaggggaaaaggttgtacattttttgggcctagcagcaatctacatgtgatcccgaatccagccagcttctgttggtattgtgttgagaggtagtggaagtacaaaatgtctaggttagccactcaatggcctcatgttgtaaaaatgtagaatgtaatcatgtccatatacatggcatatatcggtccaataatccgattgtgttgcagtatttgatatgatatggaatggcgtttcaattgcagcgtgaatcaagcacgggcctgtgtgcacactttcttccaacttgaaccttatttcttatctggaggtgtatatgcattgaaccctgaaccgcaaagctgatggacaattttt

SEQ ID NO: 216587 - DNA, 6290 bp, Zea Mays
ccatctccgcatccggcccccggcctccggtctccagtcgcccccggcttctggtctctgcccccgcagtggtcgtgccccactgggctgaggaggaacagcttccggttcctggtgctgatcttgaacggcgcggcgctcaggtcggaggaggcgttgccggcgagactgaggtcgcagaaggagccataccaaaaaaaatcgtcctccgctactgcctacgtgacaaaaaatcctgcggagacctggcagaagtcgcccggtctcccccgcctctggcttggcctcgccatttacgctacaccttgagatttttattcactccatccaatctggccctgcgtttctagattttgcgagggaagacgccaattaggagcctgagggtgcgacggcctagggtttgtagctactggtgtcgtcgcggcctgtggaggcggtaggggacagcgacatctgcagccatggacgacagcgagctccatgaagaggagaacccaaccaatagtgccgtagatgacgatgacgacgaggattatgaggagcctggtggaggaaatcacttattggggtttatgttcggcaatgtagatgattctggtgatttagatgctgactatcttgatgaggatgcaaaggaacacctttttgcactggcagataagcttggtccatctctcaaagacattgacctaatgaagtcttctccagcaccaactgatccttccgaacaagactatgatgagaaggcagaagatgctgttgattatgaagatattgatgaagaatatgatggacctgaagttgaggcaactacagaggaagacaatgtgttgtcaaaaaaggattacttctcttcatctacagtgtatgcatcagtcaacagtacagtttcagtgtttgacgatgaaaactacgatgaggaagaagaaccacccaatgataatgagcctcctggtgatagtgctgcccaaaatttatcttcagtttctatcgagcaggcagatacgacaacctcaagcgataaccttgccatggaaaagattggcttgttatcacatccagaggaaaacatggactttgaatatgaagatttggagaatgaaaagggcactggggaaggccagcttgagcctgaaagtgcaacttcccttcctgttttatgcatagaggatgggaacgctatcctgagattctctgaaatttttggtatccaagagcctgtaagaaaagtgaagacagatcaccacaaacgaccagtggataaagagcttcagatcgcaaatgttgctgacaatgttgaagaagatgaggaactaattctccggagcactatgcaaaatttctcaactttgaagcacattcatgtgaatgaagattttgttgagagtgacagtgatgagtctatttctgatgtcactttaaggctaaaggattcatgtctttcagaacaaccaatgaaagatgtgcatatggatattcgtattgtccagcgatctccaacttgtcctgatttttatccacttgagcattatgattgggaaagtgatatcatttggaacaattcaccagcaactgatcagcaggcttatgcaaaaatctgtgaatctgaagagagtgaggacactcatggtgaagaccagggtaaggattatggccaggcctccaggtgttgggatgtacagagtaaaaccaatggttctccagtaattaaagagactttttgttgtacagaaatgcctgctccagctaactactgcccccctgggaaaagttaccctccattgacaaacgaagataacttagatcacataatgccaaataacttagatgatgcagttaaaattgacaccatggtgcgtttaaataaccttagtgtactaaacagggaattattagaaggatcatggttggacaacataatttgggatcctaatgaggttaccccaaagcctaaactgatctttgacctcaaagatgatcatatgctttttgagatcctagatgaaaagaatgtggaccatctccagtctcatgctcgtgctatgattgttagccagtcaactaagacttcaacaccaacagttgacaattttggcgatcaaccaaagccattgagtggcaggttcaacatctccaatgacaagttttattcaaataggaagactccacaacaagctaaatctcatactaaaaaacgcgctttaatgggcataaaggtggtgcattctgctccagctcataagctgcaaaccatgaagccagtgttgagcaataaggaaattgcaaactttcatagaccaagagctaagtggtacccacatgaaaataaaattgcctctcagttacaaggacctgcttgtagccatgggaggatggctgttttacttatgtcattgggaggaaaaggagtcaagattctggtcaatgctgaggacactccggtctctgtcaaattaaaagcatcaaagaagttcgaattgaagccttctgagaagatcaaattgttctgttctgggaaagagcttcaggatgacatctcgttagcaatgcaaaatgtgcgaccaaactccattgtgcatgctgttcgcactgaagtgtacctatggccaaaagcacagaaattacctggtgaggacaagcctctacgccctcctggggctttcaggaaaaaaactgacttgtctatcaaggatggacatgtttttttaatggaatattgtgaagagagacctttgcttctctcgaatgcaggaatgggagcccgtctctgtacatattaccagaaaactacccctactgatcagacagctgcatcactgcgaaacaacagtgatggactgggcacagtgcttgcaattgatcctgctgataaatccccttttctaggagagatacattctgggtcccaccaatcttgtcttgaaacaaacatgtatagatcacctgtatttccccataaggttgcaccaactgattacttattagttcgttcagccaaaggggctctttccctccgtcgcattgacaagctatatgttgttggccaacaaggactaagaacatgcaaaattatcttctgaaccgagttcttgcatatgtttatcgtgagtttcgtgctagagagaggcctgatgctattcctcagattcgagctgacgagttacccatacaaagtcctctgacagaagccatagtgaaaaaacgattgaagcattgtgcagatttgaagaaaggaccaaaggggcattttttctggacacagagacctgatttccgggttccatcagaagaagaactgaggagattattgacgccagaaagtgtttgctgttatgaaagtatgcaagctggtttgtatcgtctcaagcgcttaggaattctgaagcttactcagcctgttggattggcttctgccatgaatcagcttcctgatgaggctattgagcttgctgctgcatcacatatcgagagggaactgcaaatcactagctggaatcttacaagtaatttcgtcgcttgtactaatcaggacagagaaaatatagaaagattagaaatcactggtgttggagatccatctggtcgtgggttaggattcagctatgtgcgagtagcaccaaaagcacctgcctccaattcagtgctcaagaagaagtcagctgctgcaaagggtaccactgtaactggcactgatgctgatctccgcagattgagcatggatgcagcccgtgagttgctgctaaaatttggcgtacctgaagagcaaattgataaattaacaaggtggcatcggatcgctatggtgaggaagctttcaagtgagcaagctgcatcgggaattactatcgatgaaattcctgttagtaagtttgcacgtggacaaaggatgtcttttctgcaacttcagcagcaaactagggagaaatgtcaggaaatttgggacagacaagttcagtcactttcagctttagatggtgatgacaatgccagtgacacagaagctcacagtgatctagactcatttgctggggatcttgagaacttgctagacgcagaagaatttgatgatgaggatactagtacagcagacttgagaattgacaaagcagatggaatgagaggacttaaaatgagaaggtgctctacgcaagcccaaattaacaaggaaattgaagatgatgaaacagaggcttctctggcaaagaaactacttgaagacgatggcaatgatgtgaagaggaaaaaacagcctgtggaattgacaaattgtggcacctctttagttgccaataaaatgaagcagagtaagactgggcaaacgatcaaatcatctggttatgctggtgcattaaccccaaaggagaacacaccaagagaaggaaaagaggttgaaaattcttttgttgagggtggtttgtcctcaaaactaaaaccaaagatggcactcgatgtaaatgagactgttctagttaaaaagaaaagtgttccaggaaaggatggacctaaggaaaagaaacagggtgcaagaggggatagtcttgtttgtggagcctgtagtcaggttgggcatatgcggactaacaaactgtgccctaagtatcgggaggatccagaaatgtcagaaatggatgctaattcagttaagcccaactctatggatataaaccatttgcaagcaaagacacctaaaaggttgataacaaaagtttcctctgaagttactgaaactgaagggccagaaggtattgagaagacaaaatctgtcccagtaaagttcaaagtaggggcacctgataaatccttggagaggaacatgtcagtctccgtttcactcgtttctgataaacgtgtcatggatgttacagacagtagatctaccggaaaggtaaacaagatagtgatacctaataagatgaagtctgatgatttccctcctgacactccaaagccatctgttgtatttcggcctcctgctgaagaaaaggatgtacctcgcaaaaagatcaccatcaagcagcctaaaggcatagaccagcaaagacatgttgaatctaggagtgttcaggaacccaccagaaagacaagaaaaattgtagaattgtcgagttttgaggataaaagtagagaggatgatcattgggttggtggggaacccagccaggtgaattcctcacatgggaggaggctgggtctggaaggaaaaataagcaaagccacaatggaaaatgaaagatcctggagagattttgaggagcgaagagaaatgccacaagcaaggctctttgatgctacgatatatgcatcaagggaggaagatcatctaaaggcaaaaaagaaaaacaagaaaaagaaaaaacatgaattcaaagatgatgacttacttgatcacaggccatacagaaatgacaggagggtacctgaaagacatcgagcactaaaacgatctagtccagctcctgtggttggatatgcatcatctgccaagcgtcgcagaggaggagaggttgagctctccaacatattggaaaaagtagttgatcacttgcggggtttgagtggatcactgctgtttttaaaaccagtgacaaagaaagaagcttctgattaccttgatatcatacggtacccaatggatcttggtaccatcagggacaaggtgagaaagatggtgtacagaaacagggatgaattcaggcacgacgtagcacagatacaactcaatgcacacatatacaacgacactcgctatcctcacatccctccgcttgctgacgagctcatggaggtctgcgaccatctgctttacgaaaacgcagatctgctcaccgaggcggaagatgctatcgagtagcaatataaaaagctagatttagcatttggatcttgctatatcctaacatagatgatgtatctatcttctgatctgtaggaggggaaaaggttgtacattttttgggcctagcagcaatctacatgtgatcccgaatccagccagcttctgttggtattgtgttgagaggtagtggaagtacaaaatgtctaggttagccactcaatggcctcatgttgtaaaaatgtagaatgtaatcatgtccatatacatggcatatatcggtccaataatccgattgtgttgcagtatttgatatgatatggaatggcgtttcaattgcagcgtgaatcaagcacgggcctgtgtgcacactttcttccaacttgaaccttatttcttatctggaggtgtatatgcattgaaccctgaaccgcaaagctgatggacaattttt

SEQ ID NO: 216588 - DNA, 2005 bp, Zea Mays
tccaccacctctctctcggacgaatccgcccacccgccgcctccaccctatttcgatgccaccaagaccatgcttcactcccagtatgcctcgcagacgtccaaacagaacccgggcactaaccagcagctggagatcgagatgaccgctgagaagtctcgccgcctcatcacatctgattgtggaggcggaggtgccgatgccaagccagaggctccggtctccgaaggagtggtcaatggggacaagtggccacgttttgctgatctcggcgggatggagcaggtgttagatcagcttctggtagaagtgttggtccccctgcgtcgtctggagctgccgaattaccttggggttaggcctgttgctgggctactgttgtacggaccgccaggttgcgggaagaccacccttgcacatgccattgccaatgagactggtgtgccgttctacaagatctcagccccagatatcgtctctagagtatctggaggttctgaagaaaacatcaggggcttatttcagaaggcatataggactgctccctcaattgtattcatagatgagatagatgcaattgcatccaagagggagaatcgagagatggagcgacgaatagttactcagctgatgacatgcatggatgaattccaccagaatattggtggtgatggttctgatgtcgattcatctaaaaagaaaccaggttatgttattgtcattggagctacaaataggcctgatgctgtggatcaagctcttcgaaggccaggaagatttaatcgagatatatatcttggggttccagatgtgaatttaaggaaacagatactgatgatcaggggcggatatgggccctgggccacctgggccgtggcccgggtcgtagcaaaaaaatgcaatagagattttagcccaaataaaatcaaaccctaactgtacaggtgtgagcgttcgtattctacgtccgtgctggctggcggctgccgctgcctccctggtcgtgccgtcgtgcgtccagcggcgtcccgtccgcccgctcgtgactcctcccgtcgtccgcgcccagccagttgaccaggcgtccagtccagccgtccacgcccagccaagccagttttctccccatccagcagtgcgtctagcagccgcgtccagaggccagagcggtagagcctctccgtccggccatgcgtgacgacatgtcacatgcgtccagcggttccagcacggtctccagccagctagccaggcgtccagacctccagccgctagccaatcttagttacggtaaggacttctcattttcttattttttcactagaacaacaaactaaatactaaattgttaaatatttatgtgatggtagattgatctcaaaacaagagaatgaagagaacaaaaacattgagattgtttattgtctggctcctacattgtttgatacgaactgattcatcaacaccaaaccaaccgtctattatttccttttattgtccatagattccttttattgcaaacacttgtttttcgtggacatggtgaatcctctacctcaagcaataagggaaacttatacaatatgaccatttcaagaattagctaagatttattctgcagacttctctcaatatgaccattttcaagaattgaagagtccaatgaaaaagctacctccacaaagttcaaatggttcaaattcaggtgctaacgttgatgaagttattagagggggaccaaatcgtctctaattagtcaataatgcagggtatctggcaatgaagagattaattaataaaagaagagctcagtattgttctgaggtaaaggtggatgaggcagccatgttagctttggaagatagatggaggtaccttgatagcgggacatcaatgagtccaccttttctgattgagccatcacactttgaacaagccttatcaaaggtgaagccatcagtatccaaaaagcaaaggaaacattacgagacaatgtgaagtgctg

SEQ ID NO: 216589 - DNA, 990 bp, Zea Mays
gtaaatgactttgtatataatctttttcaggatagttcttgtgcaaaagaattacaaaaagatgggacttcaaatttaaattttgaattggaacttgactccttaaggagtctgaaaatcttgaaagagagatgtcgtcattgaaaaggcaaagtatgtacaaaagaaaacttgattcttcagtctcccagcacaaaagttgtttgaagataagttcattcaaggatttgaaggaggtgattcttcagtacaagaaatttgtatcctccttttcttgacagaatctatgacataataacatctcaggcatgcatggcaatgaggcacaatcaggattgagaacggatgggctacaaagttctttgaagatgctgctagaggtagagcgcccacacttatgttcatgacttttgttgataatttcccagcttgtcgacagttagaggctctcccattcttggatccactgaagcattttagagatctgaaagaccacatcgatgagttcatccatgcctccatggacgagcacaagacctgctttaagaagacgatccagaagatgtttgggatgtcgaaggctattgcagagagatccgcggcagaagcgaaggaagctggagttgaaagtgctttgccacttcagaccagtgtctcgcagtagaatttcacaaaaattaatgcactgcgctgaaaaaggacagaacaaagaaagatcttcaaatcaaagctaaagaagcggagattcaaaatctgaaaaagctaatgtgtaagtactactggtttcatatgtacataagttatcgtgttattatacggttccgttgcaacgcacgggcactcacctagtagtagaatagtaggagaagaagaggagcaccgtttccaatcaaattgtcttgttaaatttatgcgatcgattattttcccatatgatattttgtaatcactttgtgatgatgttcaattcttttcactcttgcactgttg

SEQ ID NO: 216590 - DNA, 1275 bp, Zea Mays
gtaaatgactttgtatataatctttttcaggatagttcttgtgcaaaagaattacaaaaagatgggacttcaaatttaaattttgaattggaacttgactccttaagtagagatgtcgtcattgaaaaggcaaagtatgtacaaaagaaaacttgattcttcagtctcccagcacaaaagttgtttgaagataagttcattcaaggatttgaaggaggtgattcttcagtacaagaaatttgtatcctccttttcttgacagaatctatgacataataacatctcaggcatgcatggcaatgaggcacaatcaggattgagaacggatgggctacaaagttctttgaagatgctgctagaggtagagcgcccacacttatgttcatgacttttgttgataatttcccagcttgtcgacagttagaggctctcccattcttggatccactgaagcattttagagatctgaaagaccacatcgatgagttcatccatgcctccatggacgagcacaagacctgctttaagaagacgatccagaagatgtttgggatgtcgaaggctattgcagagagatccgcggcagaagcgaaggaagctggagttgaaagtgctttgccacttcagaccagtgtctcgcagtagaatttcacgttggtagtttcttgctcgatgctggctgaaagggaattaggcttacacctagttcctaaataattttggtggttgaattgcccaacacaaataattggactaactagtttgctctagtgtataagttatacaggtgccaaaggttcacaacaagccaattaaaaagaccaacgttgagttcaaaatggagagctaaaagcataccgaagtgtgccctggtctggcgcaccgaacatgtccggtgcaccaccggacactctacagtacctgtccggtgcaccaggggactccgcgctgaactcctcaccttcgggaatttccagaggcactccgctataattcactggacagtgtccggtgctccaaagggacgcggctctggaacttggcagcctcgggaaaacgcagcggctgctccgctatatttcaccggacatgtccggtgtacaccggactgtccggtgcgactgcggagcaacggctacttcgcgccaacggtcacctgaaggcgcattcaatgcgcgccagaagcgcgcagaagtcaggcacgcccatactggcgcaccggacattgaacagtacatgtccggtgtgcaccggacatccaggcgggtccagaag

SEQ ID NO: 216591 - DNA, 3405 bp, Zea Mays
cggagatattgtttcatcagttgattcattgagattgatgatggaagaggaagaaaggaaaaaaagaatgttcaggcaattgaactcagaacatagctcgcttagtgggacttttacgtgcttttctgtggatggatctaaatcattgtgcaaagggaacccaagctctgcatctgctaatagcctcttgaaaatacgtaatgtccaaagaggacctcagaaacggatagcctgggacaatgaacttctgtacgtaccaaaggagggtattacagaaatgcttagaagcttcatggatcaatttttatctggagcatacaatatcctgatgcagtcagtctgtggtgatatcatggatgagcaccactccattgagaaatctgacataactacattcttcaaagttgctcggtttgttctagcttttcaacatgaaaaggcttcaaatgatcagctaccgcagttatatcttggcttatttgtgatgaatatcataactatgtctatccagaaatctgctaaagggattcaaccatctggggtttctcctagcaatgaacctgatgataatctgccatttcatggtgatatatgtggacctgttgcggccacgttgaatgaagatatgttcaatatagtcatttccaggtggcgtgagacgtatgaggctcttaaggaaactaacgactacaaaactctttcagcagctgggtctttaatgaagaacatgattgacatgatatatttggtgctaaaagtactccctgaagattcaagggaatctcaaacagctcgtgttttgctctataaactgttttatgatcagacagaacatggtctcactcaatttctgctgaacttgttcagatcgtttgatagtcacaagcaacccaaaagtgatctagtggatttattagaaacaattcatatcatgctacagctcatggaaaagcttcaagcacgtggtgcattaagggttgcaaaaaagacaaaaaaggtcagaagaaagaagtccacaaatgataaaaaggagaattcagaacccaaagtggataatgcagaaccaaacgatgctaatcctacagatggaacgaaatgctcacctgaaacacttccagatttgagaagcgagggtcctgctttagaatcttctccctcagaacctggaaaagtagacactagtggcgcacatgtactggatacacttgtggacactgtagttaacattgagagtaccgcacatgctgaaggtgacccatcttgcacagacagtggcgtaatgaagagaaatctcattgaagaagagggtgagacttcagattcttcagttgatcaccaacctgctacaagtgaagttgattttaatgtttctcggttaatatctagtcttgcaaacaattctgttgtgcaaaatatttgctggctgttgaagcattacaaaagtaactcctaccgtacaaaccattacataatatgcatgctacggagattctgtgaagacctagagctgtcaccgatgctgtatcagctatcacttttaacaactttctatgatatattagcggaacaaaagttgtctagttcaaaggagtacacaaacattgtaaattttctttctaaagttgtgaggaaaatgttgagaacaataaaaaaacagccactgctatttgtcgacatactattttggaagacgcgaaaggagtgtcattgcattgatgctgatgcactactgaatgagcttaagaatgatgttggaagcaaagacagtgaaattggttcaagtaaggggtggagagatcgaataaatatagcagattctcttggtgacgatgaagttgacgtagttataccgcaggcaccttatgatgctgataaggatggagatctatcagctggtgaacatactgatgactttaggaagagtagtactaaatataaacggagcagattgtcactttcagatagtgaggctgatgaaatcgagaggttcttgaaccatgtatcaagagattcggtgcccaaagttccaaaacgacgaggtcgttctctttttacggaagagcaagagaggctcataagagacctttatgaaaaatataaggatggtcctaaatgcagtcatataatagctgagtctttagaccccagcgggaagatatcttctgctcaagtttctcgtaagcttacacagttaggtctcaggaatgtcacaaggagaaaaaaggttgcaggcccagaaggaaaaaattacacacggcaagtgatgaccatgatgacacaagtcagagaaaatcatctgatgaagacacattacaagtacttaaaagcagatcaaaaagtaagaaagttccattggtggatagttcactgagtggatcacagcatcaagaagctcagcatgacccagactctgatgatgcgaccataggatccatgattagaagtagaaaaaagaagaggttatccacgtcagattttgaagggaatgtacgaaaccatcaagaatcttcagacaacaccaaagccaaggactgttcaccgattatatcccaacatgagaaagcattgcaagacatttatcctgatgatgagaccattggatccatcattagaagtgtgaaaaagaagagatcagtgacatcaaatttctcagcgaatatagaagcccaagagtctttgagaaatattaacctacaagatgaaactgttgtttctaatatcatggatgcttctgtaaatcatgggtctgatccagtcaataacagtgacaatactgttgaagatgaacttttggatgattttgaaactgagctagtcaataacggtggcaatactgttgaagctgaacttttggatgattttgaagttgagctagatgatcatgagcatactgaccaaaggatcactgatgatgaaattatgactgaatcagggaaagcaacaaactccgatgctaagggaagggctggtttgaaaagaagacacagaatggttattgacgatgaggatgatgattagtaactgttcaggactgaagaacccgtaactattgaggagtggagtttcaaatgggaaatgggattaaaaaaagaacttttcaggattgtttcccttgcactgctaagctctgagcacgattcaagctgtttcacacctactagtgccagatgttcttccatctgtaatgtttagtggggtcacaatctaatggaattttgcagatgcaaagttcaggctgccctgctgtgtggcctgctgtacagactgataatttcgagtactgttttttttgaaatgaaatactgtagagaagccccccgcagcaatttcgagtactgttggctgtatttgaaactccgaacactgcaactctagcgaatgcgctcagttatactgttttcactt

SEQ ID NO: 216592 - DNA, 3888 bp, Zea Mays
tttacccctgttgcacttgtttactgaaacatctccaagaccaaggtgattgtattcaccaactgtagtctagtttttttcacatcattcaacccatatttcaatgatatcgtttttgtggatcatagttggatgaccaatgataaatgtgataagttgcaaactttattctcagaagatgactggaagttagttcagttggtgcttactttgttccgcaacgtcttggctattcaagaaatcacattgacgcagaaagcatctggagaagctacccacttactcttcctgtctgataactttttggagctcatgttccaagagaatgtgatggacataatcttagttttgactcagcatattgatgagccctctggttaccttaaggaggaaaaccttcttttaatggagatttaccattatctcttcttaggccgagacccaggactgattgcccgagcttctaataaaggtttaaaggatggatctaaatcattgtgcaaagggaacccaagctctgcatctgctaatagcctcttgaaaatacgtaatgtccaaagaggacctcagaaacggatagcctgggacaatgaacttctgtacgtaccaaaggagggtattacagaaatgcttagaagcttcatggatcaatttttatctggagcatacaatatcctgatgcagtcagtctgtggtgatatcatggatgagcaccactccattgagaaatctgacataactacattcttcaaagttgctcggtttgttctagcttttcaacatgaaaaggcttcaaatgatcagaaatctgctaaagggattcaaccatctggggtttctcctagcaatgaacctgatgataatctgccatttcatggtgatatatgtggacctgttgcggccacgttgaatgaagatatgttcaatatagtcatttccaggtggcgtgagacgtatgaggctcttaaggaaactaacgactacaaaactctttcagcagctgggtctttaatgaagaacatgggctcacattttaaccttgattctctatctagttatttaaaggtttataaaaaaactcgatctgtggggcatcttgcattgcagattgacatgatatatttggtgctaaaagtactccctgaagattcaagggaatctcaaacagctcgtgttttgctctataaactgttttatgatcagacagaacatggtctcactcaatttctgctgaacttgttcagatcgtttgatagtcacaagcaacccaaaagtgatctagtggatttattagaaacaattcatatcatgctacagctcatggaaaagcttcaagcacgtggtgcattaagggttgcaaaaaagacaaaaaaggtcagaagaaagaagtccacaaatgataaaaaggagaattcagaacccaaagtggataatgcagaaccaaacgatgctaatcctacagatggaacgaaatgctcacctgaaacacttccagatttgagaagcgagggtcctgctttagaatcttctccctcagaacctggaaaagtagacactagtggcgcacatgtactggatacacttgtggacactgtagttaacattgagagtaccgcacatgctgaaggtgacccatcttgcacagacagtggcgtaatgaagagaaatctcattgaagaagagggtgagacttcagattcttcagttgatcaccaacctgctacaagtgaagttgattttaatgtttctcggttaatatctagtcttgcaaacaattctgttgtgcaaaatatttgctggctgttgaagcattacaaaagtaactcctaccgtacaaaccattacataatatgcatgctacggagattctgtgaagacctagagctgtcaccgatgctgtatcagctatcacttttaacaactttctatgatatattagcggaacaaaagttgtctagttcaaaggagtacacaaacattgtaaattttctttctaaagttgtgaggaaaatgttgagaacaataaaaaaacagccactgctatttgtcgacatactattttggaagacgcgaaaggagtgtcattgcattgatgctgatgcactactgaatgagcttaagaatgatgttggaagcaaagacagtgaaattggttcaagtaaggggtggagagatcgaataaatatagcagattctcttggtgacgatgaagttgacgtagttataccgcaggcaccttatgatgctgataaggatggagatctatcagctggtgaacatactgatgactttaggaagagtagtactaaatataaacggagcagattgtcactttcagatagtgaggctgatgaaatcgagaggaaccatgtatcaagagattcggtgcccaaagttccaaaacgacgaggtcgttctctttttacggaagagcaagagaggctcataagagacctttatgaaaaatataaggatggtcctaaatgcagtcatataatagctgagtctttagaccccagcgggaagatatcttctgctcaagtttctcgtaagcttacacagttaggtctcaggaatgtcacaaggagaaaaaaggttgcaggtgaatctctttcaactggagatcggactatagaacaacaagacaactcgcttgatgatctgaaccccatgctaggcgaacagaaccatggctccaaggctaaaagctccaggcccagaaggaaaaaattacacacggcaagtgatgaccatgatgacacaagtcagagaaaatcatctgatgaagacacattacaagtacttaaaagcagatcaaaaagtaagaaagttccattggtggatagttcactgagtggatcacagcatcaagaagctcagcatgacccagactctgatgatgcgaccataggatccatgattagaagtagaaaaaagaagaggttatccacgtcagattttgaagggaatgtacgaaaccatcaagaatcttcagacaacaccaaagccaaggactgttcaccgattatatcccaacatgagaaagcattgcaagacatttatcctgatgatgagaccattggatccatcattagaagtgtgaaaaagaagagatcagtgacatcaaatttctcagcgaatatagaagcccaagagtctttgagaaatattaacctacaagatgaaactgttgtttctaatatcatggatgcttctgtaaatcatgggtctgatccagtcaataacagtgacaatactgttgaagatgaacttttggatgattttgaaactgagctagtcaataacggtggcaatactgttgaagctgaacttttggatgattttgaagttgagctagatgatcatgagcatactgaccaaaggatcactgatgatgaaattatgactgaatcagggaaagcaacaaactccgatgctaagggaagggctggtttgaaaagaagacacagaatggttattgacgatgaggatgatgattagtaactgttcaggactgaagaacccgtaactattgaggagtggagtttcaaatgggaaatgggattaaaaaaagaacttttcaggattgtttcccttgcactgctaagctctgagcacgattcaagctgtttcacacctactagtgccagatgttcttccatctgtaatgtttagtggggtcacaatctaatggaattttgcagatgcaaagttcaggctgccctgctgtgtggcctgctgtacagactgataatttcgagtactgttttttttgaaatgaaatactgtagagaagccccccgcagcaatttcgagtactgttggctgtatttgaaactccgaacactgcaactctagcgaatgcgctcagttatactgttttcactt

SEQ ID NO: 216593 - DNA, 309 bp, Zea Mays
tcctggtggcgcagctccggccggcgaggtggtaccggtccaagttccaggacttcccgccgaggatcaaagcgttgattccgtacgtgctgtagtgagctagctaggagagtgatgagtcgcatgtacaagacagtaagacactgttcatttggtacgtacagagcatcatctgttgcagctgaacgtaaacttcatgggaaacaaattgttatctcccttgcaacatactaatgtgttagataagatctgaatccacttaattccaaacgacgataaaccttagccgttttgtgtacaaactctctg

SEQ ID NO: 216594 - DNA, 8959 bp, Zea Mays
cgccgtacgcggtgcataggggacatgagggtgctgctgtctaggtcgtgtaggtcggtcgccggtcccgcccgccgtctccacggccaagaccgtggtggcgtcctcctccaacgttcgtccgtgtttgtctccatggcgctctcgaatgcctaagccaaggccgaccgcctcgagctggtgctcgacgaaacgccccgcaggaccgagttctggtagaccatgctcgtcgattcgctggcgagggccggccgacagcacgacgcattctgcctctctgcggagatgcgggcctccagcgtggcctgcgactcccacgtctgcgtatgtcactacgggaagagctacatattcatcgtaaattatgtgcaaaggatgtacaagcaagctgcccttgtgcagacagactcagaggtgtagagaagacatggtgtccgctgaggattgcaagatccattgctgcataggctgatgtatgcggcacaccatcaggagcagactgatcccgcacacataagtgcacgctttgcggattttatcctgggaattctgaatttggcttgccctttgcggattttcaagtggtgtgtgctatttgtggataggtttggtgctgcgaacagagtgttagaaccaaattcttgtcaggctaaaccgatttatatcatagatgcagaaaaaagaaataaaggagatttttgacgagtttcatttttttatggaaccttcgttggtggctcgagcaacatataaaggcgatcatcacttccgatgagttgagttttattgcttactatttccttccttccgattcttagctgctaggagctttcaagttgttccctcccataatctagagtaattacagatctgtacacgttatataagcaatttcccttatgcaaacctggatgattagttatgtatatagaattttgaagagaaaatatattttttcgaatacagactttgttctgccctcgaatcctccattttaaatagcagcttgatgtactagttctcacgtcatgctgctataaaataattggaaggccatagtttatttgattgccatagcccaaagtttcacttccattgccatggttgagtgatgaatttccatgatgctcctatggcgtaaaacaaactaaaaaaggtcgtcattaatcattgttggagttgtggtaaaacatatatcaaatcatttggttcatgtgaactgatctagaaaccacgttctgtatcagcaactcagcgcacaaggctgactagagagcaactgtaagcttaccacaaacactaaaagccttcttccaactggtatgacagttccacttggcttctccctatgtgtgtttcaaatcaaaatgtgcaagagacacatacccaattgaagacccatccatggtgcctgaaacattaataaaccttatgtagttccaaacctcacggcataatatagcaagctgattgcggttaacttaccactgagagggcattttttgtaacggtcgatggtgcccggcacgatttcaccaattaaggacccactttcatcatttgtttgtggagtcctcaacgattgatgattactacctagccatgtaccagcagttgacactggactcgttaaaaaagatcttgtgacctgtacaatcaactacaaacttataatttcgtaaacctgtatttgactatttgttagcatactgcacagcagtgaaagcagagacattcagtagttagataggtagaaacttaagagcatacttcttgacttatgaggtccacacacaaaaacgaaaaatcgtctaacatttgttcaaacagatgaagcgcatgtcattagagttggttgcccgtactatatctgtggacatgtgagcagatgttaacttggtttttattgtccaccttcccatcattggacatgtgagcacggctatcatggagttcttcaaccaatggcccacaatagtgcttgcccttttgaactcacccgcgttcaaaaacatcacatgctcacaaaatcagtaaggaaagcaataaaagacataacttgtttctaaaacggtggcttttgtttcttcagttcaccatcatattcaactttgtcattgtatgttgctaaaaaaactcggtcggggagggaaagaccgtcctcccggtattatattaagaaaagaccgaaacaatggtctcggtcgagaaaaacttcgaaccctggccctatcactaatgggcctcgtcaacggtccactctgcaacggctcaaccggagataagaataaaaaggggcccaaaggagcacccatatacaaacctcttgttacggcggccaaaaacaagcatacacaaaactatccataaaaacaccgagaaaactactgcagccctccagcactagtactgggagcagccaaaaaggagagaccctttgctccagcagcttgccatttctccctcttctcattgacaaaatccaagagcatggtgaggcttggtgacacaccatcaaataccactccgttcctatgcttccaaatcaaccatgccccaagaatgaccagagagtccaatccttgtcaagccagacacaatggctgaaattcttttccaccacaataggaagtgagtgtcatcatgaagaggagccaaactttcttagaatgttataccagcacacccttcagaaaacacaagataccagcaaatggttggtctctggctcttaatcacaaatggggcatctaggagggtgattcaagcctcttttttccagcctgtcagcagtccagcatctattatgagccaccaacaacaaaaaagaacttgcatttgggggtgcccaagacttctagatcctttgataatgttcaaaggaaacagatccaaaaagaggccattgtatacgaactagcagaatattggatatcgggggcaactgaaaaaatatgtttatccttagtattaggttgcaacaccataccagataaagagttccaaaggtgaagatagtcagtcaaagctcccacagttaatgcccctctaatatcagcaatccaacctctgtttaacaaggcttcttcatttggctagcctctattaatcattgttggacgactgatcgtctagcccgtagaggtttgggccacccccagtgttgcttactttgtgataagcaggaagagacggtgcaacacttgttggtgtcttgtgtttttgcaagggaggtctggttcagaagtttgggcagaatgaggttgcagcactcggcgcccattcctgattctgctgtgttccaggattggtggagagaatctgaggaattggtgcctaagccacaaaagtaaggattcaattccttggtgattttagtggcttggcaaatttggaaacataggaacacttgtgtttttgaagctgcttctccgtatatcagcaagattttgcatgatattcatgatgaagctgttttgtggggtatggctgggggtaggggcctatgaggccagtaaccatccctctccttcctgaggtctagtgtgtttggattggttgtgtgtgtctgatggattgtttcagttttctgtgtttttgccctccgtaaggaaacccatgtatttgcctatttggtcttcttagaccttttcctttcctgttaatataatgaggcacagttatcctgcgttttcgagaaaaacaaggtttcctgtacagttgttctggaagcaattctttttgggataatactgaacaaccttggggcaatatctgagactctctttccattaatccatttgtcagtccaaaaaagggtattacagccattcccaacctcagtgataagaataacagaaaagaatgatctggccttactaggaacttgtatagggagatcaatccatggtttggtagggttagttttttccaaccaaagccatctcattataagtgcccaacaaagctcagggaaactagagatacccacacctcccattgcctgaggtctgcacacttcccccaagcaaccagacaatggccacccttcgcttccctccttcctcttcataagaaacccttcccgatcttatcaaattcattaatgccccatttggggaagtcaatagccattgcagtatagacagacatcccagtaagaacatgctgcaccaaaactcttctgcctgccctgttaagcaaatcagccttccagttgggtaacctatcagcaattttgtccaccaagggccaggattgatgcttagaaagtttttgtaaggataatggaaggcccaaatatttgcaagggaaggaagcaatctcacaaggtaagatgttttgaacagccaggatagtttcctcagaacatcttatgggataaatattagacttttgagcattgttatggagtccagaagcatccccaaaaagttttaggatgtcaagggtggtagagatatcagcctgggtgggatgcaaaaacagggccacatcatcaacatagattgatattctgtgtaattttttcctgctgcataaatgttgtaacaaaccttcctcagctttgaaaaatagaaaactcagaacatccatagaaagaataaacagcattggagacaaatggtctccctgtctgaggcctcttctatgttggataattgtgcctggaccgccattcaaaagcacttgagtggtagatgatccaagaagctcacatatgatgtctctccatatcagaccaaaacccatctgtttcattacttcaatcaagaaaggacaagaaacagaatcaaatgcttttattatatctaacttgaagagcaatctggccttattctgtgaatgcagtaatctggatttctgttggaccaacatgaaattgtcttgaataaatcttcctttgatgacagcactttggtttggggagactatctcattcagtttttttgccagtcggttggcaagcaccttggtgactaatttggcaaaactatgtaccaaactaatgggtctgaaatccttgacctgatcagccccctccactttagggatcatagtaatatatgctgaattgagtctgctcatatttgtgaaatttctgtgccaaacagctcccactgcctttagcacatcttttttgataatattccagcatactttatagaaccttccagtgaaaccatcaggcccaggggccttgttagaaggcaaatttctaatagtgtcccaagtttcctgttctgaaaatgggagatccaattcagagagattatgcacaggtaacccaagagcctcaaggtttatagttctttccctccctgcagccagccctataaggttgtatagaagtgatctacaagagcttctttctcagtatggctagttaaagtattctccccatctctgagtttggtcaccaagttctttctctttctatgtctggcatgcatgtgaaaaaacttggtgtttgcatccccatccttcaaccaactgattcttgatcttaatcttgccatagtccttttgaatgaggtcaacaacaaggattgctttttaagcttatttttaagccacaattcagcaggagtaaggaagatcctgggcaatctcaaacctgtgcaaaagctcctttgccaaagccaactaggaagtcacatggccaacctgcctatcactccaactctgtagtctcctctcctagaattttctttaagcttcctttgcaaggtcagataaggacaaggagaaggtccaacagaagtccaagcagcctgtacagtatcaaggaatccctccatgtttggccaaaatgcttgaaagtgaaatcctttctttccatggaaattatcctttagaccgagaagcaggggtcaatgatcagaatcttgggaggcagagctttgaagcagaacattagggaaatatgatgtcaatgagcagaaaaccctatcaagcttaaccaacacagggttgtcctgctaattagaccaggtgtattttctaccatgtagttgtattgtatctctcttagagcaagatcattgatcacagacctgaatctacccatcatagccctatttaggtttgaattatttttgtcagagtcccatgcaatgacccatgtcccatcacaagcagccctgatgtcctaaatttcttgaaggaaaagaattttctcagcatcagtctgaggcccatacacacaagttaaccaccagggaattccatcatctttgcaaaactggacagaaacacaatgggcatccatcctttgtactcctgtatgtcctacatttcttttcgaagcaactagaattcctccgctagcaccaacagaaggtagaaaaacaaattcagtaaactcaactcccgatgtcaccctgagtaataagttacatttttgtttcctgacagcacactatatccacctgaaaggaatccaccaggtctctaacagtatccatccgaacagaagaattaagacccctaacattccaaacaagaattttagaaggatccatagaaaacaaaatagatcaaccaagggggtgggaccagaacactaatacttcaaattatcaggaagtgcccagccaaatagggcagaaggggcttccacctgatcctaattcagaaagtgattgaacagcctagcatattcttttagagcttcccaatggggatggcaacgggaaattccccgtcggggaatagctccccatccccgtccccgcggcatccacacgaatgcttgtggggaacatttcttctccatccccatttcccacggggataaatccccaacggggatccccatccccgtttaaattataattaagacttacgttctttgttattgatgttaaacattgtcacttatacacattgtcagatgtaagaaatcattatgcatacatcaaaatgaacatgtttgtacaattagtggcctcttaacaaggtaattatttatttttgtcgttaactagtacacgaaaaaaacgtcacatgcaagtttaacgggccccgcggggaacggggaatgggaatgcttccccgtccccatccccgtttacccgtcgggggataaattttccccgtttatatccccgcgggggaagtttcttccccatcccctaatggaggacttctacgcggggaatcggagatcgggtccccattgccatctctacttcccaacacagattctctatatatgtttgatgatgtggttatatttatccaaccaacagttagagatattagtactgtactggacattcttcatatttttggggaggcttccgagttgcgaaccaatatccagaaaagcaatgtatacccaattagatgcggggaacaagacttgaccttgctgcaaaactcgtcgccttgtgagatctcgcaatttccctgcaaatacttgggtctacctcttgccataaaggaacttaccaaggaccaagtacaaccgattattgataaaattgctaaccaactgacagggtggaaagctgatttgatgactaaggctagattaaaggtacatgtgcagtttgtcctcacatggatggtcatatatctcgcaatggctgtggatttaccaccttgggctatcaaagtattgacaagatccgacgaggctttctttgccgagggcgcaaagaagcgagggaaggacactgtcttgttgcttggggaaaagtttgtcggccgcttgagcttggtgggctggggatttccaatctcaatgatcttgcttgggcacttcgtatgcgttggctctggttagcaaaaactgatccaagacggccatgggcatctcttgctatacaagttcccagcaatgctaaagatttcttctcagtggctatgcaaactgaaattcgtaatggggcctctactctgttttggtcttatcgttggttgatgggacacagggtcgtggacattgccccatcattattccagaatattcctaaaagaagggttaataagaagattgtcttggattatctctctaatcatacatggatttcggacatacaaggagctcttactgtatatcttgctctatgggataatcaccttggttcaacttagacctgaagtggatgacactcacttttttcgtctcgtcaccaatgggaagtattcagcaaaggcagcctatggggttttttccttgggtcgacgacttttgaaccgtactacagaatttggaaaacctgggttcctccaaagaccaagttcttcatgtggctggtagctcaacgaaggctttggatagttgacatgatgcaaaagaggcatggatcaccctgtgatcaggagcaggaaacacttgaccatctactgattgggtgcgtgttcgcccgggatttctggtttaaacttatatctcaagttaatctccaaagcatggcctctcagcatgttgatgcatcttttatgggctggtggagatggctgggcaatcaggtccatggagtggctgggtaaactctggtaattttaggagcatggacactgtagaaacaacggaataactttgtcttcgacagaactagacctaatgtggatcttgctgttaggatggctgatcaagagcgagagaagtggaagctggctggagcaagaaagctatccttgctaactagtcacatcccgggtcagtaggctgtgttagagttagtagttttgtgtgttttatacatggatgagtattagtgtgcctgtacttggcccccgtaaggtggctgttttgtattatctttgtatttcttcttaatggaatggtatgcagccctcctgcgtttttcgagaaaaaaacttcttgagctaaaacactatgtgatgctgtttggggggcatttgcaggatgttatactaccatgaatattggatgatgccactctagcaagtttaaacacaatgatacactcaaataatgtttatg

SEQ ID NO: 216595 - DNA, 2142 bp, Zea Mays
atgcctaagccaaggccgaccgcctcgagctggtgctcgacgaaacgccccgcaggaccgagttctggtagaccatgctcgtcgattcgctggcgagggccggccgacagcacgacgcattctgcctctctgcggagatgcgggcctccagcgtggcctgcgactcccacgtctgcgtatgtcactacgggaagagctacatattcatcgtaaattatgtgcaaaggatgtacaagcaagctgcccttgtgcagacagactcagaggtgtagagaagacatggtgtccgctgaggattgcaagatccattgctgcataggctgatgtatgcggcacaccatcaggagcagactgatcccgcacacataaggtcagaatgtcttggaaaggagtgcagatgttactagacatgtatctggagaaggtgttcaacaagcattgttgaaaatcctagaaggaactgtaagttactaaagttgcctttggttttgtgcctgtggaattaggagtttagaagctatcttcgattcacttttttttataaggatctttgattgactttaaacctcagtaatgattctttgtatgttgcctacttattcctaacgcatgttgttaatattcatgagaaagtatcacacaagaattctcgcaatgatagtatacaggttacataccctatatggtccttaatgaatacgtgcactatatatcatatgggttaaatttggattcaattgaatgaaaaaggatctttaaaatgttcttttttatgtcataaggaccctgtactacattacacataatgagcagaggaagtgttacctcaaaaacatttattgacaaccagataacagcaaacacgctggttgtgttaaaaatgtgcagggcataagtattctactccctccgtcttaaaatataagaaatctagagttcaaaatttgcaccaaaatacaagtattctggagttccctttttctttgtcttttagcatacaatattgagattccttttaaaattagcatcacccaaacagccactcagttgtttgcagtcttattttcaatcttggattcatgcttttctgtttttctgctgaagatatttagttaccaatcttcctttctgtttggctttaaatatgtttttatctatcccaaaaagttgctcaacctatgtgcttttgaaatgctactacattttcagggcatagaataaggtgattgaccacttccatttaaaaattgcttccaacttttcctaaagaacattccacgaagtcataactcacgccctattggtgatgggcaaaaattagcgcattagctaccattcaagtgcttatataggttgtgaatgttttagtttgtgttatttgataatatatcaaacttgttttatttgaatgtaaatgatttggactgatatcttgcttcaagatcatctatgttttgttgtcttggatattgttactttatcttcataatttaccgctatcatttgtccttctcatattgatgttaggtagttccagttgacgatgtgtgaatcaggcaatcgtcgcccttgtgcagctttgctccatggtgcttgtttctttgtgaggagacaccggataggatgggacattgctcgccctccccaagctcggtagttccatggaatgaacaaccaattagttaaagcaatgtcaagtcttattttcacacaaaagtgcaagatgttgattgtacatcatcaacatgtgccatttgcttggaagactacatcagaaacgtcatatattttggaacagaggtagtagtcaataattagcttattcgttttttatatggttgtatatatcctagcaagagaccactctgtagtcatttccttagtttcttgagagctgggaccacacttatagtgaagaaaactatgttcaactaacagaattaacttggatgcacctttgcacaatcatatctgtacaagttttggcggcatatgcttatttcaaattaggcttgtggtgttagattaatatattcattggatatggtgtgaatttctgagggataccggatgatgtgtacacctgtttgtctttgtcaaaatgttatcatgcattctttttgtctttgtcaaaatgttatc

SEQ ID NO: 216596 - DNA, 3165 bp, Zea Mays
gtctgcgcacacccaaaccaccccgccacacaaagagcaaaaccctctttctctgcccctcagtcaccgccgcgaacttgcgtcttgcgatcgagggaggaacccaccaaatggctcgcgtggagaggcagccgcggaaccctagtaggctcgcccccacctcccacccggcgccggcgcttccgacgacgccggctgctcgccgccccggcacgccacggaacgctgcccagggcacagtttgtgcaacatgtgtttgcggttcaggaaataatgcccgctgtcactgcaagcaagacgcaagatccagacataaccaaacacaccacggtaatgatggaacagccacagccgggggaattgcaaaaccagactctcaagataagctcaagatggctagattttctggtggtacatattcaaaacctgatgcaagagtgaagctgattcctgcagaagatattacctatttacagcgtcggaaaccatgtggtagaactgttgggtcagttgggtcacagaaaagacattgcagaagaagtgtcacaccacctccaagttcacgaagagtgtctctcctaggatctagatcgcttgctgaaaatcctatcccatcagtgtcatcccatgactcgtgtttaccccataagaggcttgagacagctgaaaatagggacccatgtgctggggggcacataagtagctctgtgactccctgcacttctttgaaaaaccttgcatcaccgagttgcaaatcctcacaacctttgagtactaatttgaatactgatgctactccaagaaatttagacagaatggtaggcatacaaacacaagcactcgccaggagctccagttcgagtattttgcattctcaaggccagaacagtgaaaaagtgtctgctagtttgccaaaagaggcagtgacaaatcctgcgtctcctagtcccaagcaaattggtgctcaacatccaagtgacaatcctcttgttacgaaggcaggaccttctaagagtgtgtgcacacatgagagtgaaaagttgtgcagcagagacatcaatttaactgcaacaagtactacagttcctgtcttgcaagctcctgttgtggagcctgcattgctaagctcaacatctgtgttcactgaaaggccctttgaggtttatcctgacacaagaactgctgctcctggcatgcaggaacttagtgtgaagcatgtgttgctgaccccaatacctgtgcgtcatgaaccttctacggagtgcctaaaggttcctccaaaacacagcctgcattccattgcatctgcgcaacatggtgcattgtcgcaagaaagaaactcaggggcatcaattagccatggcagatcttcagcttcaggtgcactatcaatcttacatatgaagctggccaagaagcattatcaatcacaagcctgctggaagggcaactttcatgttactggaggactgatacatacttgtgatggacttgaagcccatttccctttagaaatttctgtaagagtttatgaagcttcaaaccaaatgcctgaaattttaaatctagaggctgtacctatttcccagctgtggccaaaaaaattcaagatggtacctcccgacattgaggatattggactatggtttctgagcagtcgccaaaggccacactggagttttgatcaccttcttgaaaaagtttgttcacatactggtctgttcacaaaaattggtgatattgagttggcagtgttttcatcgaagttgcttacaccacaagatcagaggaaagatggcaaattatatttctggggtgtttttgggaagcatatgaggaagaagtcatgccaaccaaacagtcatataaaaaatgtggagataagcaatcccagtcaaccaaatggcaaatctgaggaagtaggcatgaaattggatatgagaaaaggcaaagaaaaagagagtgctaaatctgacgaggtattggattcaacaggaggcaatgataccgatagggtcaatggctgcgtggcagtgcttgaggctcctgattcagaccctgcatccagttgctcggttccggctgcctcttctcttggcggatattgccatcatgactctgcaaaaaatagctcttctatcttagattcttcatgccagcctgctgacggatcttctgttagcccagacctcatgctggacataccccctggaatttctgcgcatatacctcctggcttcacaaaagcccactgtcagcttcagatgggaactgctgctctgtcttttgctgataggcatcgcagtctgatttcggacattcctccaggctttactgaagttcatcgtggactccctcctgcaattccacctgctggaccagcttgtgtgtcgacccctgggactgaaaagaagcccttcgttaggttctcgcttaatgtcccaaggcctgttggaatgggagctccacctggatttactccactgcatgcagtgaagaaagagcctgggctgcctgatgtccatgagaccgcagataagcacacactacattctttggcagctgcggcagctgcagtggttaagcctgggaaaggaggtgaaatgaaaatcgcagacaatgaggtaaagactgaacaagatgaaaactcagaggaacgagattttccaaagatcaggaggctttcagacctgtactgtaggccttcggaggacagcactgaattttcccagcgtatgcctgcacgcttgcccgacaagtttcaggagcagagacccgagaaacgtcttgtgcatccacgggaggaggtcgggcggcgatgatgcctgcaaaggggccgatggcagcatcgccaggtggtcgtctggatagcgagtgcgttgtatgtggtgaagagttccccgcagagtgatttctaggattacctcgacaaagggtactagactgctttgtgttagtgattatcctgttcagcggcaatgatgtacatgcctggacaattagcatgctgagcttgtgcgtacaggccagcacttatcgtgaagtccgtgctacatcatcgaaacggttaacgatattgggtagttttggtgaaacccatgcatcaaatgtgatggtcgagcagcattactgtttttatagtgggaccaacctatcaaatgtgac

SEQ ID NO: 216597 - DNA, 1831 bp, Zea Mays
atgaaccaagagatgacaacaatgttccctagtggcatcaaagccttgattgtggaggatgatgcaaggttcatcaagtcatcttccatgcttttttctctcctaaacttcaaggtggcatcttgtggaagccctatttctgcacttagactcctctccggtgacaagatcaaagacgtgcacgtggtcctcgtcaacgctgagaaggctaccacctgcggcttcgacttccgcgccattgtcgagaccgatctctgtatcccggtcatctacttcttgccgcgcgaccacgtggccaccggcgacgaggcggacgagctgctccgcacgctgagggactcgacctacgtactcaggagcccgctgcaggccagcgatgtcggcgacctgtggacggtcgtcgcgtggcgcaagtgctacctggagaacaaggcgaagaaggcggccgaccgccgccggcgcgtggttcccgccgccgttcaggcgtttctggccggtggttattctaccgtgggcgagggaaggaacgacgacgaaagccgggtccacttcaaggcggtgagcgccggtggtcgtaggggccgcaagaggaagagcggcggccacaccgtcgtcgtcggttcctcaggagacgaccagacaggcaagggacatgggaagatgaacgcgacaggcgggcacgagaacgacgacgacgacgacggcggcgtgtctagccagcaacagcagcagcaacccgtggccactgctgcaacatcccgctggaaccaacccgcggccggcagcgtcgcaccgccgacggcggcagtaggaaacatggctaccaccgtcacagacgagccggagttctcccgcggcagccaccaccaccaggccgtttctctgccgctgatgttcggaccgtttccgtaccagggcccgcggccgcaagtgctgaagcaggccatgttcgtgccgctgccgcgatacagcgggactgagagcatcggtggcgcaaccgtcgctgcagatgcaagagagtacggcaacgctgccggttcacttcttcagcccctgaaccttggcacaggaccacacggccacgacgagcttgcagccatgacggcgtacaccgagtccaatgatccaccggtggcagaggcagctaccaatcctaccatagaagaagtgctcaacaatggcgacagcttcagcacctacagcacctcgctcatggcacctaatcaggttcttgatgacatggcttcggatgtgaatgagttggcaatggcaggaggagcaattttcagcaacgacgacgcatcgtttacggcgcctcaggatctcgccgcggcgctagatggtggccagctagcaccaggagcattggacgccatcagtgcatcgctcatggagacggacgggaaccctggtctcgagctagaggcaatgttttctcctgatcagtacgagaacaccttgtttccgctggaagctctgctggggctggatgatgctcccgtgtacgaggacggccaagactaccggcagggtggcgggagtgccgacgatgaggctgcagggacctcgctgatcggcggcgctgatgacagtcttgacgtcctggatgattatttgttcatggacagcgctggggatttcaacgacgatgaacgtgactaattcctggagtgcagtatcagcagtacctgatgagctgagaataagagagggacgggatcatgagtttctgtttcctcaagtaaaccagctttgaataatgtatgtactctctacatttttaaatgtgcgatgttttttttaacagtaaggggattcccctatcattatg

SEQ ID NO: 216598 - DNA, 2283 bp, Zea Mays
ctccatttcgtcgaatcccctcctctcttcttttataatggcaattgtctcctctctaccacattctccccattccgcggttccgccctctcgcgtgcctccaggtccctcctctgcgtaactgggcggccgctgatccgccgccaccgctctgtgccctgcgtctggtgttccggtgacaagcgtccacctgcaagatgttggaataccaaaacgtagttggggggagactgaagctgaagggtaaagcgctggacgtaaaggatggtggggtgaagaaaaagaagaagaagtaccagcgtgaggagtcgtctcagattgcgcacgatgagctccacaaaggggggagatctgaattaccaattgatcccaacaatgagcggattgaatctgacaagactggagatgaagggaacccacatcctgactatggccatctcacaccagcagagcgacgctacatggaacagaagcagaagatcgacatgcagaagatggccaaagtcgccaacaagtcgcatagagaccgcatccaagacttcaatcagtatctcgcaaacctaagcgagcactacgacatccccaaagttggccctggctaacatagccaaactggctgtgttacgcacaacaattgtgtgctgggtctatccatttatgttagcatgttacgtatcgtttaaaacgatttgttgccaccagaagttgatatttaatttcaaaagcatgttccaactattctgatcctgtgtttaagttgtttgttgccccttttagttgcaatcgttttattcaaaatgtgatcaaaatttgatatttccagggaactaattttctttcaatatagcggcagagcctaccaataaattatgcacaaaattttccacacaagtcagatcaacatgaccttaaatttgggaaatgggaaataggggttgggacagagaaatgtgaatatgtgatcccatgtttggataattgaaatgaagatagggatagaaaaataaagactacccatcccataccccttccttttataaagaaaattccattggtgatgcagaagaagaaaaataagcatgccaatgttaagagtaatcatgatacggcagatgctgtggtggaatttctgtcagacagtaaatatgatgctccactgaagctaaagaagaagagcaaaaagaagaaaatggaaagtagtggtcctgcagtcgtatatgaaagttcagttgttactgaagatgctggagcatctaagctgaagaaaaagaaaaggaaggtaaagggagggaaggtctctgctgggattactgatgcagaagaaattctgcatgaaaatcaaattgaagaaactagtgctgatgtcaaccaacttgcagcactgagtgaagatgtggataatgaagagcctcagaaattaaagaggggaaagaaaatggaagttaaaaaatctgggaaggccaagaagaaggacaagcatgcatcgcgtaaagataataacaacttggagagacatgttgatgttagtactgcaaacgctgatgagaatatgagattccattagttgatgaagactgctctagaggactgaaaaaatggatcttggagtgcaaacacaagagacctggcttgaaagccttgcaagaagcaatagatgaatttattgttgctcatgaggaacaacaagagaaggagaagagagagaggcccgtgcagcagaagatggatgggcagttgttcatcacaaggggaggaaaaagaccacagatgctgaaactggaatagctgttggctctgtatctcttgctgcaatgcaacataaaatggctaaaatgaaacccaaggaagttgatatgaacttctacagatttcagagaagagaagcccacctcagtggtatgtcatcattgcttaacgagacttattatttgttattccactccctgattagctacacatgatagaacccagactatatattgcacattatgaagtgcttggacttggtagttgtaatgcaatgcagttcaccagccacgataaaatgtaatctgttcacttgtttgccatttgaatacgagtaacctgtacctgcagcttgatattttctgttctggttttgggggtagtatttggttctattagaagtttactgttttgcatcttcagtttggttggagtcacaagtccacagccattgtactatcttgattggacttcaaatgaaccatatgtgtgggaagtttctctttctcttgtgtgtgtgtgtgtgatacattgagg

SEQ ID NO: 216599 - DNA, 2257 bp, Zea Mays
tttcgtcgaatcccctcctctcttcttttataatggcaattgtctcctctctaccacattctccccattccgcggttccgccctctcgcgtgcctccaggtccctcctctgcgtaactgggcggccgctgatccgccgccaccgctctgtgccctgcgtctggtgttccggtgacaagcgtccacctgcaagatgttggaataccaaaacgtagttggggggagactgaagctgaagggtaaagcgctggacgtaaaggatggtggggtgaagaaaaagaagaagaagtaccagcgtgaggagtcgtctcagattgcgcacgatgagctccacaaaggggggagatctgaattaccaattgatcccaacaatgagcggattgaatctgacaagactggagatgaagggaacccacatcctgactatggccatctcacaccagcagagcgacgctacatggaacagaagcagaagatcgacatgcagaagatggccaaagtcgccaacaagtcgcatagagaccgcatccaagacttcaatcagtatctcgcaaacctaagcgagcactacgacatccccaaagttggccctggctaacatagccaaactggctgtgttacgcacaacaattgtgtgctgggtctatccatttatgttagcatgttacgtatcgtttaaaacgatttgttgccaccagaagttgatatttaatttcaaaagcatgttccaactattctgatcctgtgtttaagttgtttgttgccccttttagttgcaatcgttttattcaaaatgtgatcaaaatttgatatttccagggaactaattttctttcaatatagcggcagagcctaccaataaattatgcacaaaattttccacacaagtcagatcaacatgaccttaaatttgggaaatgggaaataggggttgggacagagaaatgtgaatatgtgatcccatgtttggataattgaaatgaagatagggatagaaaaataaagactacccatcccataccccttccttttataaagaaaattccattggtgatgcagaagaagaaaaataagcatgccaatgttaagagtaatcatgatacggcagatgctgtggtggaatttctgtcagacagtaaatatgatgctccactgaagctaaagaagaagagcaaaaagaagaaaatggaaagtagtggtcctgcagtcgtatatgaaagttcagttgttactgaagatgctggagcatctaagctgaagaaaaagaaaaggaaggtaaagggagggaaggtctctgctgggattactgatgcagaagaaattctgcatgaaaatcaaattgaagaaactagtgcactgagtgaagatgtggataatgaagagcctcagaaattaaagaggggaaagaaaatggaagttaaaaaatctgggaaggccaagaagaaggacaagcatgcatcgcgtaaagataataacaacttggagagacatgttgatgttagtactgcaaacgctgatgagaatatgagattccattagttgatgaagactgctctagaggactgaaaaaatggatcttggagtgcaaacacaagagacctggcttgaaagccttgcaagaagcaatagatgaatttattgttgctcatgaggaacaacaagagaaggagaagagagagaggcccgtgcagcagaagatggatgggcagttgttcatcacaaggggaggaaaaagaccacagatgctgaaactggaatagctgttggctctgtatctcttgctgcaatgcaacataaaatggctaaaatgaaacccaaggaagttgatatgaacttctacagatttcagagaagagaagcccacctcagtggtatgtcatcattgcttaacgagacttattatttgttattccactccctgattagctacacatgatagaacccagactatatattgcacattatgaagtgcttggacttggtagttgtaatgcaatgcagttcaccagccacgataaaatgtaatctgttcacttgtttgccatttgaatacgagtaacctgtacctgcagcttgatattttctgttctggttttgggggtagtatttggttctattagaagtttactgttttgcatcttcagtttggttggagtcacaagtccacagccattgtactatcttgattggacttcaaatgaaccatatgtgtgggaagtttctctttctcttgtgtgtgtgtgtgtgatacattgagg

SEQ ID NO: 216600 - DNA, 2274 bp, Zea Mays
tttcgtcgaatcccctcctctcttcttttataatggcaattgtctcctctctaccacattctccccattccgcggttccgccctctcgcgtgcctccaggtccctcctctgcgtaactgggcggccgctgatccgccgccaccgctctgtgccctgcgtctggtgttccggtgacaagcgtccacctgatgttggaataccaaaacgtagttggggggagactgaagctgaagggtaaagcgctggacgtaaaggatggtggggtgaagaaaaagaagaagaagtaccagcgtgaggagtcgtctcagattgcgcacgatgagctccacaaaggggggagatctgaattaccaattgatcccaacaatgagcggattgaatctgacaagactggagatgaagggaacccacatcctgactatggccatctcacaccagcagagcgacgctacatggaacagaagcagaagatcgacatgcagaagatggccaaagtcgccaacaagtcgcatagagaccgcatccaagacttcaatcagtatctcgcaaacctaagcgagcactacgacatccccaaagttggccctggctaacatagccaaactggctgtgttacgcacaacaattgtgtgctgggtctatccatttatgttagcatgttacgtatcgtttaaaacgatttgttgccaccagaagttgatatttaatttcaaaagcatgttccaactattctgatcctgtgtttaagttgtttgttgccccttttagttgcaatcgttttattcaaaatgtgatcaaaatttgatatttccagggaactaattttctttcaatatagcggcagagcctaccaataaattatgcacaaaattttccacacaagtcagatcaacatgaccttaaatttgggaaatgggaaataggggttgggacagagaaatgtgaatatgtgatcccatgtttggataattgaaatgaagatagggatagaaaaataaagactacccatcccataccccttccttttataaagaaaattccattggtgatgcagaagaagaaaaataagcatgccaatgttaagagtaatcatgatacggcagatgctgtggtggaatttctgtcagacagtaaatatgatgctccactgaagctaaagaagaagagcaaaaagaagaaaatggaaagtagtggtcctgcagtcgtatatgaaagttcagttgttactgaagatgctggagcatctaagctgaagaaaaagaaaaggaaggtaaagggagggaaggtctctgctgggattactgatgcagaagaaattctgcatgaaaatcaaattgaagaaactagtgctgatgtcaaccaacttgcagcactgagtgaagatgtggataatgaagagcctcagaaattaaagaggggaaagaaaatggaagttaaaaaatctgggaaggccaagaagaaggacaagcatgcatcgcgtaaagataataacaacttggagagacatgttgatgttagtactgcaaacgctgatgagaatatgagattccattagttgatgaagactgctctagaggactgaaaaaatggatcttggagtgcaaacacaagagacctggcttgaaagccttgcaagaagcaatagatgaatttattgttgctcatgaggaacaacaagagaaggagaagagagagaggcccgtgcagcagaagatggatgggcagttgttcatcacaaggggaggaaaaagaccacagatgctgaaactggaatagctgttggctctgtatctcttgctgcaatgcaacataaaatggctaaaatgaaacccaaggaagttgatatgaacttctacagatttcagagaagagaagcccacctcagtggtatgtcatcattgcttaacgagacttattatttgttattccactccctgattagctacacatgatagaacccagactatatattgcacattatgaagtgcttggacttggtagttgtaatgcaatgcagttcaccagccacgataaaatgtaatctgttcacttgtttgccatttgaatacgagtaacctgtacctgcagcttgatattttctgttctggttttgggggtagtatttggttctattagaagtttactgttttgcatcttcagtttggttggagtcacaagtccacagccattgtactatcttgattggacttcaaatgaaccatatgtgtgggaagtttctctttctcttgtgtgtgtgtgtgtgatacattgagg

SEQ ID NO: 216601 - DNA, 2982 bp, Zea Mays
gtctagatccgatccagcaatatttgttgagccgaaggcaaggacagttttgatgggcccatcaaagggttctcgaactattaacaagatcatagtaaaaggatctgaatatcaacagcagcatgatgatccatctagttcaagcaaagctaaacagaaaaggaggaaactctcagactttgatcccaaatggagcaaggatgaacttacaaatttttatgaagcctaccgtcaatatgggatggactggagaaagatcagcatagcgataggcactaagtcatcggacatggtgcagtctcttttcactttacatcggactttcttatctcttccagaacatcaagccactgccatgggatttattgcgctggtgactggtcatcacaatgcttcggagaaaaccacgactcatagaggatatgatcacgtagtcagagcatctggaaaggcaaggaaacatggtgaaaaaccgaaatcaattgatggacctgacctgcccaactgtcaagaagcgaaaatttctggattttcagatttattccagagtcgatactatggcgaattggtcaggtacatccgaaatcatgctgttcggaggcgtactcctcgtataccagctatagtttctgcagacaggagtaccattgatgaggccacaccaggaattgaaaatgtcatcagttctaccaagagaaaatatgaagcagccaataacgactctgctattgtcccaacaaataagtactctcctgacagagtttctggcttcgctgaagcacacaaggctggtcaagatcattgtttgttggagaccataggaactgggcatgtagcgacatgtcaacaacattcaaagaaaacaagaattcagcaaactatggaggaaggtcagactggtgtagttgatcatgagacaacgatggcatctaaagaagggaataagccagttgatttattaaacaacaatcagttatttatcgacaatatttctgaaggttcggttggaaaaactgactctacgctatctcagagaagggaggaaggccaccctaccattgatttatctaaacaagggaagccagttggtaaatccagtgcttccaagactaggaagaaaaaatataagatattagacgcagaggtgcctgctgtagcacaaaacgtttgtggtaatagtttagccctgccggaaacactgagggttgttatcactgatgattcttccttgtgtactgactctggaagagtggggataccggaagcatctgaagatattcctgctgaagttcccagtgcacaaacagaaaccaagcctgaagtgagaatgtctggaaggaccagacggaaatctcaaatgcattgcaaaacaaagcatatgtcatgcaatgaaggttcagataatttacaggcaaaaaaattgctgcactgtttgtcatccgaaccacttcgtagatggtgcacatatgagtggttctacagcgcagttgattatccatggttttcaagtaatgagtttgtgcactacttagatcatgcaaaattgagtcatctttcaaggttgactataccagaatggggtacaattcgaagctcccttggtattccacgtcgattttcaaattattttctggccgtggaaaaagaaaatcttgaggattatcgggagaaagttagaaaaatctatgctcaactcagtgatggttcaagggattttctacctgcagacctagctagaccattttcaattggtcagcaagttattgttcgtcatccaaattctagggaactttgtgatggcaaagtggtgatgatgggtccggattgttacaaggttcattttgatgatcctgacattggtgttgatattgtaaaggacactgattgtatgccagtcaactggctgtataaccgtcctgacaacatgaggagctgcctttcaaatgatgcgtacagcatactggagatggatcacattcctgaccttacagcaagtgagaatgaggatcatgctgtaaacggatctactgtacttgaggggctcaaaagtctgcgcttaacatcagatagacaacctaaggcagaatctattgtaaacagtgaaagaccaccatataggagtacatctgacagccctgcaaaatctagagattgcccagacaataatagtgctggccactacgatgagctagagtcatatatagccgcatttgcagaaagatcactatcacaagccaggcagatggttgacaaagccatgcaggcgaaccctggaggtaatgaggatgaaaaggtatgcacgtcaaatcaagtggcaggttgtgcaggcccaggttttgaacctgcccgtggcgcccaacttccttctgacctgatatcgaacggcatcgccacggttctttcaatcaagagccttagcgactcgcgacatccgtttgctaacgtagcaggcgtcttggatcacgcttgctccatgctgcgtccaagctgtccgcagaacctcgctttgtacgatcaaataaagagagacatcggtatcataaagacccagatatttgcacttatgccaacagcattgggcaattgcagccctcctgtcccgcccatgtaactgggccctgagcaagatacttccgctgccttcatgcaggccctgcagtagtacacgcttcttcctttgctgtgagtacaaaacgcagcgaacttgatgttatggaggaagtcctatgtatatacctcgatggcttaatagtttataggtatacacatattcaggatagttgacatatgattttggagtgaataaagttatgtctgtagtcatttaggatgtagtgaataaagatgtatgcctgcagtaagtggcggacccagaaattggccaaggcctgggtcgaagcgaccaaaaactctaatagtagtatataaaaaaaattgtacggcgaaacaacgttgtcatggatattaaagatgacatacaag

SEQ ID NO: 216602 - DNA, 3103 bp, Zea Mays
cgaaaggcgccctcgcgcgcgctgtttcgtctagatccgatccagcaatatttgttgagccgaaggcaaggacagttttgatgggcccatcaaagggttctcgaactattaacaagatcatagtaaaaggatctgaatatcaacagcagcatgatgatccatctagttcaagcaaagctaaacagaaaaggaggaaactctcagactttgatcccaaatggagcaaggatgaacttacaaatttttatgaagcctaccgtcaatatgggatggactggagaaagatcagcatagcgataggcactaagtcatcggacatggtgcagtctcttttcactttacatcggactttcttatctcttccagaacatcaagccactgccatgggatttattgcgctggtgactggtcatcacaatgcttcggagaaaaccacgactcatagaggatatgatcacgtagtcagagcatctggaaaggcaaggaaacatggtgaaaaaccgaaatcaattgatggacctgacctgcccaactgtcaagaagcgaaaatttctggattttcagatttattccagagtcgatactatggcgtttcttcagaattggtcaggtacatccgaaatcatgctgttcggaggcgtactcctcgtataccagctatagtttctgcagacaggagtaccattgatgaggccacaccaggaattgaaaatgtcatcagttctaccaagagaaaatatgaagcagccaataacgactctgctattgtcccaacaaataagtactctcctgacagagtttctggcttcgctgaagcacacaaggctggtcaagatcattgtttgttggagaccataggaactgggcatgtagcgacatgtcaacaacattcaaagaaaacaagaattcagcaaactatggaggaaggtcagactggtgtagttgatcatgagacaacgatggcatctaaagaagggaataagccagttgatttattaaacaacaatcagttatttatcgacaatatttctgaagatgatatgttggtcttggatgtattgtgtagcctgatgaatgcaccctctaaaatgccaaaactagagattaatattccttcaggttcggttggaaaaactgactctacgctatctcagagaagggaggaaggccaccctaccattgatttatctaaacaagggaagccagttggtaaatccagtgcttccaagactaggaagaaaaaatataagatattagacgcagaggtgcctgctgtagcacaaaacgtttgtggtaatagtttagccctgccggaaacactgagggttgttatcactgatgattcttccttgtgtactgactctggaagagtggggataccggaagcatctgaagatattcctgctgaagttcccagtgcacaaacagaaaccaagcctgaagtgagaatgtctggaaggaccagacggaaatctcaaatgcattgcaaaacaaagcatatgtcatgcaatgaaggttcagataatttacaggcaaaaaaattgctgcactgtttgtcatccgaaccacttcgtagatggtgcacatatgagtggttctacagcgcagttgattatccatggttttcaagtaatgagtttgtgcactacttagatcatgcaaaattgagtcatctttcaaggttgactataccagaatggggtacaattcgaagctcccttggtattccacgtcgattttcaaattattttctggccgtggaaaaagaaaatcttgaggattatcgggagaaagttagaaaaatctatgctcaactcagtgatggttcaagggattttctacctgcagacctagctagaccattttcaattggtcagcaagttattgttcgtcatccaaattctagggaactttgtgatggcaaagtggtgatgatgggtccggattgttacaaggttcattttgatgatcctgacattggtgttgatattgtaaaggacactgattgtatgccagtcaactggctgtataaccgtcctgacaacatgaggagctgcctttcaaatgatgcgtacagcatactggagatggatcacattcctgaccttacagcaagtgagaatgaggatcatgctgtaaacggatctactgtacttgaggggctcaaaagtctgcgcttaacatcagatagacaacctaaggcagaatctattgtaaacagtgaaagaccaccatataggagtacatctgacagccctgcaaaatctagagattgcccagacaataatagtgctggccactacgatgagctagagtcatatatagccgcatttgcagaaagatcactatcacaagccaggcagatggttgacaaagccatgcaggcgaaccctggaggtaatgaggatgaaaaggtatgcacgtcaaatcaagtggcaggttgtgcaggcccaggttttgaacctgcccgtggcgcccaacttccttctgacctgatatcgaacggcatcgccacggttctttcaatcaagagccttagcgactcgcgacatccgtttgctaacgtagcaggcgtcttggatcacgcttgctccatgctgcgtccaagctgtccgcagaacctcgctttgtacgatcaaataaagagagacatcggtatcataaagacccagatatttgcacttatgccaacagcattgggcaattgcagccctcctgtcccgcccatgtaactgggccctgagcaagatacttccgctgccttcatgcaggccctgcagtagtacacgcttcttcctttgctgtgagtacaaaacgcagcgaacttgatgttatggaggaagtcctatgtatatacctcgatggcttaatagtttataggtatacacatattcaggatagttgacatatgattttggagtgaataaagttatgtctgtagtcatttaggatgtagtgaataaagatgtatgcctgcagtaagtggcggacccagaaattggccaaggcctgggtcgaagcgaccaaaaactctaatagtagtatataaaaaaaattgtacggcgaaacaacgttgtcatggatattaaagatgacatacaag

SEQ ID NO: 216603 - DNA, 3163 bp, Zea Mays
aagcctctgcccgcgtggttgcgcctccgcggcggcgccggcgccgtctgggagcgcggctcgggcgttcgaaaggcgccctcgcgcgcgctgtttcgtctagatccgatccagcaatatttgttgagccgaaggcaaggacagttttgatgggcccatcaaagggttctcgaactattaacaagatcatagtaaaaggatctgaatatcaacagcagcatgatgatccatctagttcaagcaaagctaaacagaaaaggaggaaactctcagactttgatcccaaatggagcaaggatgaacttacaaatttttatgaagcctaccgtcaatatgggatggactggagaaagatcagcatagcgataggcactaagtcatcggacatggtgcagtctcttttcactttacatcggactttcttatctcttccagaacatcaagccactgccatgggatttattgcgctggtgactggtcatcacaatgcttcggagaaaaccacgactcatagaggatatgatcacgtagtcagagcatctggaaaggcaaggaaacatggtgaaaaaccgaaatcaattgatggacctgacctgcccaactgtcaagaagcgaaaatttctggattttcagatttattccagagtcgatactatggcgaattggtcaggtacatccgaaatcatgctgttcggaggcgtactcctcgtataccagctatagtttctgcagacaggagtaccattgatgaggccacaccaggaattgaaaatgtcatcagttctaccaagagaaaatatgaagcagccaataacgactctgctattgtcccaacaaataagtactctcctgacagagtttctggcttcgctgaagcacacaaggctggtcaagatcattgtttgttggagaccataggaactgggcatgtagcgacatgtcaacaacattcaaagaaaacaagaattcagcaaactatggaggaaggtcagactggtgtagttgatcatgagacaacgatggcatctaaagaagggaataagccagttgatttattaaacaacaatcagttatttatcgacaatatttctgaagatgatatgttggtcttggatgtattgtgtagcctgatgaatgcaccctctaaaatgccaaaactagagattaatattccttcaggttcggttggaaaaactgactctacgctatctcagagaagggaggaaggccaccctaccattgatttatctaaacaagggaagccagttggtaaatccagtgcttccaagactaggaagaaaaaatataagatattagacgcagaggtgcctgctgtagcacaaaacgtttgtggtaatagtttagccctgccggaaacactgagggttgttatcactgatgattcttccttgtgtactgactctggaagagtggggataccggaagcatctgaagatattcctgctgaagttcccagtgcacaaacagaaaccaagcctgaagtgagaatgtctggaaggaccagacggaaatctcaaatgcattgcaaaacaaagcatatgtcatgcaatgaaggttcagataatttacaggcaaaaaaattgctgcactgtttgtcatccgaaccacttcgtagatggtgcacatatgagtggttctacagcgcagttgattatccatggttttcaagtaatgagtttgtgcactacttagatcatgcaaaattgagtcatctttcaaggttgactataccagaatggggtacaattcgaagctcccttggtattccacgtcgattttcaaattattttctggccgtggaaaaagaaaatcttgaggattatcgggagaaagttagaaaaatctatgctcaactcagtgatggttcaagggattttctacctgcagacctagctagaccattttcaattggtcagcaagttattgttcgtcatccaaattctagggaactttgtgatggcaaagtggtgatgatgggtccggattgttacaaggttcattttgatgatcctgacattggtgttgatattgtaaaggacactgattgtatgccagtcaactggctgtataaccgtcctgacaacatgaggagctgcctttcaaatgatgcgtacagcatactggagatggatcacattcctgaccttacagcaagtgagaatgaggatcatgctgtaaacggatctactgtacttgaggggctcaaaagtctgcgcttaacatcagatagacaacctaaggcagaatctattgtaaacagtgaaagaccaccatataggagtacatctgacagccctgcaaaatctagagattgcccagacaataatagtgctggccactacgatgagctagagtcatatatagccgcatttgcagaaagatcactatcacaagccaggcagatggttgacaaagccatgcaggcgaaccctggaggtaatgaggatgaaaaggtatgcacgtcaaatcaagtggcaggttgtgcaggcccaggttttgaacctgcccgtggcgcccaacttccttctgacctgatatcgaacggcatcgccacggttctttcaatcaagagccttagcgactcgcgacatccgtttgctaacgtagcaggcgtcttggatcacgcttgctccatgctgcgtccaagctgtccgcagaacctcgctttgtacgatcaaataaagagagacatcggtatcataaagacccagatatttgcacttatgccaacagcattgggcaattgcagccctcctgtcccgcccatgtaactgggccctgagcaagatacttccgctgccttcatgcaggccctgcagtagtacacgcttcttcctttgctgtgagtacaaaacgcagcgaacttgatgttatggaggaagtcctatgtatatacctcgatggcttaatagtttataggtatacacatattcaggatagttgacatatgattttggagtgaataaagttatgtctgtagtcatttaggatgtagtgaataaagatgtatgcctgcagtaagtggcggacccagaaattggccaaggcctgggtcgaagcgaccaaaaactctaatagtagtatataaaaaaaattgtacggcgaaacaacgttgtcatggatattaaagatgacatacaag

SEQ ID NO: 216604 - DNA, 2853 bp, Zea Mays
cttgtttctacccacttatctttgcagtcgccactgcacgccactgcttggctcgcgtgattcgtgaaccttcttgccatggcgacgatgtctgcagcgtctcatcgctgctgtgcttcttccttgagagctttaaccgtgttgtttgtgttggcagctcttgtttcagatgtaggcggccgacatcatcatcatgtttgtcgtccttatttctcctgcggtggttttagcaatatatcgtatccattccgtcggcaaggtgatccatctgggtgtggtgtccaatcgtatgagctggtttgcacggatacagacgccacaattcgcatcggcagtggaacatacaccgtgcttagcatcaactccacgtattcttacttctgggttgtcgatgccaacctggacatccagagcagttgcccccttccctggtgggattaccatggcataccggtgcccaagaatacaagctatccagatgttgttaagttaatgaggaatggatttggccttagatttccttcttcgattggtgaccgcggcatcagagaatgtttcgcagagtctgtgcgtaatttccttaaagagccaagaaagtatcagattgtggacattctaatggtcgaggaattatggtcttgttttctcgatcaacatggatcaactaataatgttgtcacttctgttatcatcgacattatcaaaacaataccaatatgtatgtggcttctgaaatctacacatgttttttgcaggcttgtattgatgccgctagcagtatttgtcttcctagcccataaatactggaaagcaaggattacaatagatgcagtcgagaagttcctgcggatgcagcagatgctcgttccgatgagatatgcatacacaaacatcattgctatcaccggtcatttcagagaaaagctcggacaaggaggctacggttctgtatacaagggggtgctacagccaggtgaagtacatgttgctgtcaagatgttaggcaactccaactgtaatggagaagagttcatcagtgaggttgccaccattggcaagatccaccatttcaatgttgtgcgcctcattgggttttgctccgaggaaaatagcagggcacttatctacgagttcatgccccatggatctctcgataagtacatcttctcgtcggagaagagtttctcatgggacaaactcaatgagatcgctctgggcattgctagaggtctcaactacctacatcacgggtgcgatatgcaaattgtacacttcgacatcaagccacacaacatccttcttgacagcaactttgttccaaaagttgctgattttgggcttgccaaactgttcccaagagacgacagtttcgtgccactgagcgctatgcggggaacgataggctatatagctccagagatggtatctcgaagctttggtgtcatctctagcaaatctgatgtgtatagctttggaatgctactgttggagatgacgggcgggcgaaggaacgcagatcctcatgcaggaagctctagtcaagcatactacccatccttggtgtacaaccagctaagccaaggagatgtgggcgagatcagtgaaggtgttgatatgcacgagttaaagaagaaactatgtatcattggactttggtgcatccagatgaagccgcaagatcgaccaacgatgagcgaggtcatagagatgcttgaagctggtgtcgatggcatccaaatgccttcaagaccattcttttgtgatgacgaggttatttgcaggttcgtattgatgccgctgatagtatttatcttcctagcctataaatactggaaaacaaggataacaatagatgcaatcgagaagttcctgcgaatgcagcagatgctcgttccaatgagatatgcatacacgaacaacatcgctatcactgcccatttcaaagacaagctcggacaaggaggctacgatactatatacaagggggtgttacagtcaggtgaagttcaagtttctatcaagatgttgggcaactccaactataacagtgaagagttcatcagtgaggtcgccaccattggcaagctccatgatgtcaatggtgtgcgcctcatcgggttttgctccgaggaaaataggagagcactcatatatgagttcatgccccgtggatccctcgataggtacatcttctcgtcggagaagagtttctcatgggacaaactcaatgaaatcgctctgggcattgctagaggtctcaactacttgcgtcacgggtgtgacatgcagattgtacacttcgacatcaagccacacaacatccttcttgacaacaactttgttccaaaagttgctgattttgggctcgccaaccaaactattccaaagatatgacagttttgtgccattaagcgctatgcggggaacgataggctatatagctctagagatggtatatcggagcttcggtgtcatctctagcaaatccaatgtgtatagatttgggatgctactattggagatggtaggagatcgaagaaacgtagatcctcaagcaggaagctccatccaagcatactacccatccttcagctgagccaaggagacgttgatgggatcagtgaaggtgttgatatgcatgagttagagaagaagttatgtatcattgggctttggtgaatctagatgaacccgcaggatcgaccgacgatgagcgaggtcataaagatgttttgtgataatttgatgtcatctaaaatacctccatgaaccccttttttatcaaaaactcctcaagaacaatttgtttgcctacaaacagaggatcacggtcctagacgttgtattcttgaa

SEQ ID NO: 216605 - DNA, 1262 bp, Zea Mays
atttgataccccgcgggtcacgtttccgcaaagggaaagcctcaaaaggcgacgcgcaagggccgaggagagaaaggaacctgaggaaggcacaccagtttcaagcaatccctaggccgtggcgacgtgctgggaaggattcaaatcaggggcgaagcctaggtgacggcgctgttagtcgcctctagtagctgcgcgacgcgggctggcttgtccgatcggtttgcctcggccatgtcgactaagaaagttctttgcaagttcttcatgcatggagcttgcttgaaaggagagtactgtgaattctcccacgactggagtgatcaagcaaataatgtttgcacattctaccaaaaaggtgcatgctcgtatggtagccgttgcagatatgaccatgtcaaagtttctcgtaaccccacagtgccaccaccacgcccaacgtcaagtacttcaagacgtgcatctacttctcttcaactttcaagttacaatcatccacctcatatggtgcaccaaacagattcaagcaaccaaagacatcagatatctgtggatgtgttggcacattctgccagtaagcctgcatggagaaatgattttcagcatgatattgtttcagatgatggaattgactggtcttctaatcaaaatttgataaaccagacatcattgaaacctgtggatctccctatttgttcttttgctgctgctggtaattgtccttatggggaagggtgccctcaaatgcatggagatctgtgtgcaacctgtggaaaactgtgcttgcatccttatcgtcctgatgagagggaggagcatatcaagttatgtgagaaaaatcacaaacgccttgtagctctgaaacgcagccaagaaatagaatgcagtgtatgtttggatcgtgtgctttcaaagcctactgctgctgaaaggaagtttggactcttatccgaatgtgatcatcctttctgtattgaatgcattagaaattggcgtagcaattctcctgcatctggtatggatgtgaactcagcattgagggcttgtccaatatgtcggaaactttcatactatgtcattccaagtgttctttggtacttctcaaaggaagagaaagaggagatcactgaaagctacaaatccaagctcaagtctattgattgcaagtacttcgactttgggactggctcatgccccttcggaacaagttgtttctataagagcgtattgtgctcactgatgtcctggatagctgtttgaag

SEQ ID NO: 216606 - DNA, 2122 bp, Zea Mays
gtttccgcaaagggaaagcctcaaaaggcgacgcgcaagggccgaggagagaaaggaacctgaggaaggcacaccagtttcaagcaatccctaggccgtggcgacgtgctgggaaggattcaaatcaggggcgaagcctaggtgacggcgctgttagtcgcctctagtagctgcgcgacgcgggctggcttgtccgatcggtttgcctcggccatgtcgactaagaaagttctttgcaagttcttcatgcatggagcttgcttgaaaggagagtactgtgaattctcccacgactggagtgatcaagcaaataatgtttgcacattctaccaaaaaggtgcatgctcgtatggtagccgttgcagatatgaccatgtcaaagtttctcgtaaccccacagtgccaccaccacgcccaacgtcaagtacttcaagacgtgcatctacttctcttcaactttcaagttacaatcatccacctcatatggtgcaccaaacagattcaagcaaccaaagacatcagatatctgtggatgtgttggcacattctgccagtaagcctgcatggagaaatgattttcagcatgatattgtttcagatgatggaattgactggtcttctaatcaaaatttgataaaccagacatcattgaaacctgtggatctccctatttgttcttttgctgctgctggtaattgtccttatggggaagggtgccctcaaatgcatggagatctgtgtgcaacctgtggaaaactgtgcttgcatccttatcgtcctgatgagagggaggagcatatcaagttatgtgagaaaaatcacaaacgccttgtagctctgaaacgcagccaagaaatagaatgcagtgtatgtttggatcgtgtgctttcaaagcctactgctgctgaaaggaagtttggactcttatccgaatgtgatcatcctttctgtattgaatgcattagaaattggcgtagcaattctcctgcatctggtatggatgtgaactcagcattgagggcttgtccaatatgtcggaaactttcatactatgtcattccaagtgttctttggtacttctcaaaggaagagaaagaggagatcactgaaagctacaaatccaagctcaagtctattgattgcaagtacttcgactttgggactggctcatgccccttcggaacaagttgtttctataagcatgcctacagagatggccgcttggaagaggtaatactgcggcatcttgatgctgatgatggaagtacagtaattgcaaaaagtatcaggttatcagacttccttggtaggatggatctttagggaccagcagctgtattgatatcaaatgcattctgggatatcgttatccaccaattatttacaatattctgaagatcagtttagcttgaggcatcttcggaaagtacagctttgtctccatttagtggttggttgctttgtcgccagttgaaacaagaaagtttgaagatctccatggtcctgtagatgctgggattaccttttcagagcactgttgacctgagggcgacggaaacaagtctgacaacaattgtgcttgaatatcaaaacagaagtaatactcgtatttatagacttcactaagtgtggctctatgtatcaattgctggtcttctaggccaccagataatagctgaacatttcctggccgacaagtgaaaggggcagccgtataaatttgcttccattccacctgaatgttctcttcatattgtggaagggtactgcaccaataggtccaataaggccatttgtttgctttacttaatatacaaaaaaagtatagcagatgaaatgcaatgacaactgtaatgcagcattgttgaatgtgagcgtgagcggtggttttttatcgatgacctgctgaggaaggtcctcttagtaggcaggtaaactgagaacatttttttgttatatatatacagcataattgtacgagaaaaatagcaaatgaaccgagaatgatcattaaatgcagtcgtcggttgtatggttgtaacatctcaaaaccatcagttaaaaataatacatgtagaatattagtggtaataatattaaataaaattttatttcttcaagt

SEQ ID NO: 216607 - DNA, 2092 bp, Zea Mays
gtttccgcaaagggaaagcctcaaaaggcgacgcgcaagggccgaggagagaaaggaacctgaggaaggcacaccagtttcaagcaatccctaggccgtggcgacgtgctgggaaggattcaaatcaggggcgaagcctaggtgacggcgctgttagtcgcctctagtagctgcgcgacgcgggctggcttgtccgatcggtttgcctcggccatgtcgactaagaaagttctttgcaagttcttcatgcatggagcttgcttgaaaggagagtactgtgaattctcccacgactggagtgatcaagcaaataatgtttgcacattctaccaaaaaggtgcatgctcgtatggtagccgttgcagatatgaccatgtcaaagtttctcgtaaccccacagtgccaccaccacgcccaacgtcaagtacttcaagacgtgcatctacttctcttcaactttcaagttacaatcatccacctcatatggtgcaccaaacagattcaagcaaccaaagacatcagatatctgtggatgtgttggcacattctgccagtaagcctgcatggagaaatgattttcagcatgatattgtttcagatgatggaattgactggtcttctaatcaaaatttgataaaccagacatcattgaaacctgtggatctccctatttgttcttttgctgctgctggtaattgtccttatggggaagggtgccctcaaatgcatggagatctgtgtgcaacctgtggaaaactgtgcttgcatccttatcgtcctgatgagagggaggagcatatcaagttatgtgagaaaaatcacaaacgccttgtagctctgaaacgcagccaagaaatagaatgcagtgtatgtttggatcgtgtgctttcaaagcctactgctgctgaaaggaagtttggactcttatccgaatgtgatcatcctttctgtattgaatgcattagaaattggcgtagcaattctcctgcatctggtatggatgtgaactcagcattgagggcttgtccaatatgtcggaaactttcatactatgtcattccaagtgttctttggtacttctcaaaggaagagaaagaggagatcactgaaagctacaaatccaagctcaagtctattgattgcaagtacttcgactttgggactggctcatgccccttcggaacaagttgtttctataagcatgcctacagagatggccgcttggaagaggtaatactgcggcatcttgatgctgatgatggaagtacagtaattgcaaaaagtatcaggttatcagacttccttggtaggatggatctttagggaccagcagctgtattgatatcaaatgcattctgggatatcgttatccaccaattatttacaatattctgaagatcagtttagcttgaggcatcttcggaaagtacagctttgtctccatttagtgaaagtttgaagatctccatggtcctgtagatgctgggattaccttttcagagcactgttgacctgagggcgacggaaacaagtctgacaacaattgtgcttgaatatcaaaacagaagtaatactcgtatttatagacttcactaagtgtggctctatgtatcaattgctggtcttctaggccaccagataatagctgaacatttcctggccgacaagtgaaaggggcagccgtataaatttgcttccattccacctgaatgttctcttcatattgtggaagggtactgcaccaataggtccaataaggccatttgtttgctttacttaatatacaaaaaaagtatagcagatgaaatgcaatgacaactgtaatgcagcattgttgaatgtgagcgtgagcggtggttttttatcgatgacctgctgaggaaggtcctcttagtaggcaggtaaactgagaacatttttttgttatatatatacagcataattgtacgagaaaaatagcaaatgaaccgagaatgatcattaaatgcagtcgtcggttgtatggttgtaacatctcaaaaccatcagttaaaaataatacatgtagaatattagtggtaataatattaaataaaattttatttcttcaagt

SEQ ID NO: 216608 - DNA, 2241 bp, Zea Mays
agggaaagcctcaaaaggcgacgcgcaagggccgaggagagaaaggaacctgaggaaggcacaccagtttcaagcaatccctaggccgtggcgacgtgctgggaaggattcaaatcaggggcgaagcctaggtgacggcgctgttagtcgcctctagtagctgcgcgacgcgggctggcttgtccgatcggtttgcctcggccatgtcgactaagaaagttctttgcaagttcttcatgcatggagcttgcttgaaaggagagtactgtgaattctcccacgactggagtgatcaagcaaataatgtttgcacattctaccaaaaaggtgcatgctcgtatggtagccgttgcagatatgaccatgtcaaagtttctcgtaaccccacagtgccaccaccacgcccaacgtcaagtacttcaagacgtgcatctacttctcttcaactttcaagttacaatcatccacctcatatggtgcaccaaacagattcaagcaaccaaagacatcagatatctgtggatgtgttggcacattctgccagtaagcctgcatggagaaatgattttcagcatgatattgtttcagatgatggaattgactggtcttctaatcaaaatttgataaaccagacatcattgaaacctgtggatctccctatttgttcttttgctgctgctggtaattgtccttatggggaagggtgccctcaaatgcatggagatctgtgtgcaacctgtggaaaactgtgcttgcatccttatcgtcctgatgagagggaggagcatatcaagttatgtgagaaaaatcacaaacgccttgtagctctgaaacgcagccaagaaatagaatgcagtgtatgtttggatcgtgtgctttcaaagcctactgctgctgaaaggaagtttggactcttatccgaatgtgatcatcctttctgtattgaatgcattagaaattggcgtagcaattctcctgcatctggtatggatgtgaactcagcattgagggcttgtccaatatgtcggaaactttcatactatgtcattccaagtgttctttggtacttctcaaaggaagagaaagaggagatcactgaaagctacaaatccaagctcaagataaattttgcaggtctattgattgcaagtacttcgactttgggactggctcatgccccttcggaacaagttgtttctataagcatgcctacagagatggccgcttggaagaggtaatactgcggcatcttgatgctgatgatggaagtacagtaattgcaaaaagtatcaggttatcagacttccttggtaggatggatctttagggaccagcagctgtattgatatcaaatgcattctgggatatcgttatccaccaattatttacaatattctgaagatcagtttagcttgaggcatcttcggaaagtacagctttgtctccatttagtggttggttgctttgtcgccagttgaaacaaggcaatccttgtgcgctaaaaattcgctgttccttttcttttatcttgcatagttcactcgcataatcttttattcttagctatatgcctaatattgaacactccattcaaatcagaaagtttgaagatctccatggtcctgtagatgctgggattaccttttcagagcactgttgacctgagggcgacggaaacaagtctgacaacaattgtgcttgaatatcaaaacagaagtaatactcgtatttatagacttcactaagtgtggctctatgtatcaattgctggtcttctaggccaccagataatagctgaacatttcctggccgacaagtgaaaggggcagccgtataaatttgcttccattccacctgaatgttctcttcatattgtggaagggtactgcaccaataggtccaataaggccatttgtttgctttacttaatatacaaaaaaagtatagcagatgaaatgcaatgacaactgtaatgcagcattgttgaatgtgagcgtgagcggtggttttttatcgatgacctgctgaggaaggtcctcttagtaggcaggtaaactgagaacatttttttgttatatatatacagcataattgtacgagaaaaatagcaaatgaaccgagaatgatcattaaatgcagtcgtcggttgtatggttgtaacatctcaaaaccatcagttaaaaataatacatgtagaatattagtggtaataatattaaataaaattttatttcttcaagt

SEQ ID NO: 216609 - DNA, 1132 bp, Zea Mays
atggtggcggagacagcggctattggaggtcgaccgtcgtcgcagccttcgcgggtgcgcaagtcggctgtgctctccgtcgccgcttcgtcggcctcctccgctcaccagtaccgtgcctcgcctcgccttccatttggttgtgagagggaagagatggggctcacgttcaccaagctgttcagccggctgttcgccaagaaggagatgcggatcctgatggtgggactcgacgccgccggaaagaccaccatcctctacaagctgaagctcggcgagatcgtcaccaccatccccaccatcggattcaatgttgaaactgtggagtacaagaacatcagcttcactgtctgggatgtcgggggccaggacaagatcaggccactgtggaggcattacttccagaacacgcagggtctcatctttgttgtggacagcaatgatagggaccgtgttgttgaagcaagggatgagctccaccgaatgctgaatgaggatgagttacgtgatgctgtgttgcttgtttttgctaacaagcaagatcttccaaatgctatgaatgccgctgagatcactgataagcttggactgcattcacttcgccaacgtcattggtacattcaaagcacttgtgctacaacgggtgagggattgtatgaaggcctggactggctgtccagcaacattgcaaccaaggtaagctccccaattatgtcacctactatttcgaaaaagatgatgactgcaaacgtttacttgactgtgacctcatattaacagaaattgttgggttgggttggtatttccgtatgtaagatgtatgcccctgagctcggcagtttttgagctctgcttaagattctcacagttaaattgttttatgtaatttgggccttgagatgtttctgaaccaaacagctaaaagagttcagttgagttaactggttgccattattacattatgagattctttgatgctccatatgttcaacaccacatcagaaagatgcctgtttttgtgccaggaattgacttgggtctttacctttctgtttgggattaccgaaaacctccgcagtaaaacagtcccatgaaaaatctttgatcaccacttcttttacagagccgagtt

SEQ ID NO: 216610 - DNA, 8523 bp, Zea Mays
  misc_feature (8522)..(8523): n is a, c, g, or t
tcgccctcgtcttcctccaagtccgtccccgtctctacccccaccccaaaccctcggctcgcgagcgcgagggagaccccttcctccgagtccataacacggggttgccattcgcgtcgggggaaacgagcccgcgcctcctgcccctgcactcttacggtcctacctccagccatccgctcctccgcccagctcgcggagtcttcccagcgccgatcttcaaaaccctaagctctggcgcggtaaggttggagccggacgcgcacgggcggggcgcccgccatggcgcccatcaacagcggcaacatggagcagcactcgcagcggctcctcgagcccgacctccctgtgcaagtccgactgcagcttgccatggaagttcgggacagcctggagatgacgcacactccagactacctcaactttcttcgctgctatttcagagccttctcagcaattctcaccgcttacaccaagccacaggccacagagaatgctgagcacaagctacggaatgttgtgatcgagatactcaaccgccttccacacagcgaggtgctcagaccatttgtgcaggatctgctcaagctttctctccgtgtgttgacacaggacaacgaggacaatgctctccttgccatccgaattgtgtttgacctcctccgtaacttccgccctactgtcgaggcggaggtgcagccatttcttgactttgtggttaacatataccataaatttcccacaaccgttagctacttcttcgataatcccaacacaagtgccagtatggctgcctccatgcccatgcagcatttggaccccactgccgatgcctcagtcatgatgcaagtgcctggtggtggtcaactcaacccaagcgcacgttccttcaagatagtcacagagagccctcttgttgtgatgtttctcttccagttgtatgcaaagcttgtgcagacaaatatcccgcacttgttgccactcatggtggcggccatctctatcaagggtcccgacaaggtgccgccacaccttaagacacccttcaacgatttaaagggtgcacagaccttgtcatttctgacgtacctcctgaagagcaatgcagattacataaagtcatatgaggaaagcatatgcaagagcattgtgaacttgcttgttacgtgtcctcctgattctgtctccatcagaaaggagctattggttggtctgaaacaagttctcaacaccgagtacaagcgagggctgttccccttgattgacacacttcttgatgaaagggttctgattggcacaggtcgagtttgcatcgaaactttaagacctcttgcttacacccttcttgctgaattggtgcattatgttcgagaagatatttctcttccacagttgtcacggatcatctatttgttctctcggaatatgcatgattcttctttgacccttataattcatacaacatctgcccgcttgatgctgaacctggttgagcccatatatcaaaaaggtgttgaccagcaaagcatggacgaagcacgagttttattggggcgcatattggatgcattcgttgggaagtttaggaccctgaagcgaacaatccctcagttgcttgaagaaggtgaggaagggaaggaacaaccgaatctgagaatgaagcttgaagtcccattacagactgtgctgaatttgcagcaacctttggagtatactaaggaaatcaacgattacaaaagtctgataaagactcttgctgtcggaatgaagacaataatatggagcataacccatgctcactggccacgcccccagcaacaaaatcaacagtcttccaatttgtcacttcaacacttcagggggctgagggaggatgaggtgcggaagacatctggtgttctgaagtctggcgttcactgtctggctctttttaaggaaaaagacgatgatagggaaattctgcaatcattttcgcagatgctggctataatggaagctcgtgatattatggatatgttctccttttgcatgtctgacctctttgattctatgataaccaacaaccagctattgcacatattttcaacccttttgcaagctcccaaggttctgcggcctttcacagatgtattaattaatttccttgttagctcaaagcttgaagccctgaagcagccagattcacctgctgcaaagcttgttttgcaacttttccggttcttgttcattgctgcagctaaagctccagaaagctgtgaacgcacacttcagccacacgtgccggttataatggaagtctgcatgaggagtgccactgaagttgagaaacccctaggttacatgcaccttcttcgaaacatgtttcgtgcattgaacagtgctaaatttgattcattgatgcgtgatcttataccatctctgcaaccctgcctcaatatgttactctccatgcttgatggtccgataagtgaagatatgcgggacttgattttggagctttgcctgattttacctgcccgcttgagttctttattgccccacatacctcgtctaatgaaacctcttgttcttgctctaaaaggtagtgatgaccttgtgagcttagctctacgtacacttgagttctggattgatagtctgaatcctgactttttggaacctagcatggcaaatttaatgtcagaagtcattcttgctttatggtctcatttaaggcctcctccatacacatggggcacaaagtctttggaacttttagggaagctggggggacgaaataggcgatttttgcgggagcctcttgcacttgaatccaaggaaaatccggagcatggattacgtttagttctgacttttgagcctgcgacaccttttttggttcctctggacagatgcatacaccaagctgttggtgcagttatgcaaggcaatggcttggaagcattctacaggaagaaggctcttcaattcattcgggtgtgcctcgattctttgttaaatctgagggaaaatgtacctggcgagggtgtgagccctggtgttctcggtacattgctaatctctaacctggatccctcaagacgtcggaatgatgcttcagatatgaagggagatttaggtgtgaagacaaaaacacaactactggctgaaaaatctgttttcaagactcttcttgtagctatcattgcagctaatgctgacaccagtcttcatgatgagaaggatgattatgttgtcgatatatgccggcattttgctatgcttttccatgttgactcaccatcctccagccaatctggatttatgcatcctattggttcttcactcccatctatcatcatgggatcaagatcaagatgcaacacttcatctaatctccgggagctggaccctttaatatttttggatgctttagttgaagtgctatccagcgaaaatcgtcaacatgcaaaagctgccctatctgctttgaatatttttgccgagacattaatctttcttgcacggatgaaacacactggtatgctaaggggaggtcctagcacccccatgctagtctctagtccatctttaaatccagtatattcacctcccccaagtgtgcgggttgctgtatttgaggaattgttacctcggttattgcattgttgctacagtagcacatggcaagctcagatgggtggtgtaatgggtctcggggcattggtcggtaaagtgtctgtggataccctatgcatttttcaggtcagagtcgtgcgtggtcttctttttgttcttaagaggttaccagtgcatgcaaacaaagagcaggaggagacaaatcatgtcctaacacaagtacttagagtagtaaacaacgcagatgaagcaaacagtgaacctcgacggcaaagttttcagggagttgttgaattccttgcacaggagttgtttaacccaaacgcttcaatggttgtgagaaagaacgtgcaggcttgcttatcactgcttgcaagcagaactggcagtgaggtttctgaattgcttgagcctctctatttgccattgcttcagcctctgatttcacgacctcttcgttcgaagaatattgagcaacaggtgggcaccgttactgctttgaacttctgtcttgcactcagaccaccccttctaaaactatctcctgaacttgtcaattttttgcaagaagcactacaaattgccgaggctgatgaaactatatgggtcactaggatgatgaatgcgaaagtagttctcacatggaacaaactcagaaccgcatgcattgaactactctgtactgcaatggcatggggagatctaaaagctcaaaatcatactgaattgcgagcaaagattatttcaatgtttttcaaatctctaacatgcagaacaacagagattgtcaatgttgctaaggagggacttcgtcaggtggttcaacagcaaaggatgccaaaggatcttctacagagcagcttaaggcccattctagtaaacttagcaaacacaaagagccttagcatgccattgctacaaggattggctcgcctgcttgaattactgtcaaattggtttaatgtcactttgggtgccaagctattggatcacttgaaaaaatggctggagccagaaaagcttgtccagactcaaaaatcttggaaggctggagatgaaccaaaaatagcagcagctatgatcgagctgtttcaccttcttcccccggcagcaagcaaattcttggatgaccttgttaccttggtaattgatctggaaagggcacttcctgaagatcagttttacagtgagatcaacagtccataccgtgctccactggcaaaatttttgaatcgttatgttctggaggctgttgactattttcttgctcgattaagccatccaaagtatttcaggaggtttatgtacataatctgctcggatactggggacctaagggatgcacttgcaaggtcacctcagaaaatacttgcaagtgccttttctcagttttactctcaaagtgaagcatctgctgctcaattatcttctgtaaaggatgaagcccttactggggctgtatctgagagtattactgtacaatcttcatcaaacatggttactacttctgagagttactttaatggattagagcttgtctcagcccttgtgaaattgatgccagagtggctccgtaacaaccgggttgtctttgacaccttgctacttgcttggaaatcacctgcaagacttgcgaggttgcagaacgagcaggatttgagtttaccccaggtgatggaaagcaagaggctgatcaaatgcttcctgaattacttaagacacgatcgaactgaagttggtgcactctttgatatgttatcagtattcttgtaccgcagtcgtatagattatagctttcttaaggaattttatgtcatagaggttgctgaaggatactccccgaatttgaagaaaactatccttaatcattttctgaacattttccagtcaaaacaatatggacaagatcatttagttgttaccatgcagattcttatacttccaatgctagctcattcatttcaaaatggacaaagttgggaagttgttgatcctactataattaaaactattgttgagaagcttcttgatcctccagaagaggtcagcgctgaatacgacgaaccattgaggatagaacttcttcagctagctacattacttttgaagtatctacagactgatcttgttcaccatcgaaaggaactcataaagtttggttggaatcatctcaagcgtgaagataactcgagcaaacagtgggcctttgtgaatgtttgtcatttcttagaggcctatcaagctcctgaaaagattattttacaggtcttcattgctctgctacggacatgccaaccagaaaacaagctgttggtgaagcaagctctcgatatcctcatgcctgccctacctaggagacttcctcctgaaaaaaatgatagccgcatgccgatatggatcagatacaccaagaaagttctcgtagaggaagggcattcaattccaaatatgattcacatattccagcttattgttcgccatgcggacctcttctatagttgcagagcccactttgttcctcagatggtcaactctcttagtcgccttggattaccatacaacacaacagcggaaaatagaaggcttgcaattgaacttgctgggttggtagtggcatgggaaagacagagacaaagtgagatgaaagtggcgcaggaaagtgagagccagaatcaattaggtgacatgcttaatccttctgttattggtggtgatccaaaacgctcctctgatgttccgtcgtttgctgatgatttgagtctacctgatgaggagtataaacctaatgcagcaatggaggagatgatcattaccttcctaattagggtatcacttgtgattgagcctaaggataaggaatctagctcaatgtacaagcaagctcttgatctactgactcaagctctggaagtctggccaaatgccaatgttaaattcaattatctggagaaattacttgggaatctgtcacccactcctcagtccaaggaccctgcatcagccctcgcacaaggacttgatgttatgaacaaagtcttggagaaacaaccccgtctcttcatccgaaataacatcaatcatatttctcaaatactggaaccttgctttggcaacaaaatgctggatgctggaaagtcactttgttccttgctcaagatggtgttcagtgcttttcctcttgaagcagcaacaacgccacaagatataaagttgttgcatcaaagggttcaagaactcattcacaagaatcttgctgctgttacaactcagcagatagcacttgagctcaacaatgctcactcaatcattagcttttcattgtttgtcctcaatgcacttgcagaagtacagaagaatttcattgacccgttcattggcttgcttttccgtgttctgcaacgtcttgcacgtgacatggggtcttctgctggcagccatatccgacaaggacagaggcctgaactggattcatcagttaactcacggtctaccatagattctactgtcatatctaacatgaagactgtcttaaaacttataagtgagagggtgatgtcctcttctgaccacagaaaatctatgggccaaatacttcaagctcttctttcagagaaaggcactgattccagcattcttctgtgcatgctagacatgataaaaacttggattgaggaagattgtaggcttgcttcatcaactggttctgttagttcacttaacccaaaggaaataataacttatcttcataagttatcattagttgacagaaaaagctttcctccagctgcacaagaagaatgggatgcaaaatacttgcagcttctttattcactgtgtgcagattcaaccaagtatccgttgtcttttcggcaagaatttttccataagattgagagacagtatatgcttggacttagagctaaagatccagaaatgaggaagcgattcttcaagctttaccatgatacagtgggaaaaacattattttctagattgcaatttataatacagttacaggactgggaagctgtgagtgatgttttctggttgaagcaaggtcttgatctcgttttggcaatattagtagaaaatgaaccaattacacttgcagcaaattctgctcgagtaccaacgcttatgatagctgggcctgttccagatcgcatcaccatgccacagcaggttcctgatgctcaggaaagcatggatggtacaacactatcgtttgactctcttgctgcaaggcatgctcagttcttaaatgacgcgaacaagcttgtggtggcagatatcatggctccattgaaggaacttgcatttgctgatcccaatgttgcatatcatttgtgggtgcttgttttcccaattgtttgggtcaccttacataaagaggaacaagttgccctagctaagccaataatcgcgcttctatcgaaagattaccacaagaggcagcagggctgcagacctaacgttgctcaggcacttcttgagggtcttcatttgagccatccccaaccacgcatgcctagtgagcttatcaaatatattggaaaaacttgcaatgtgtggtatattgcaattgcattactcgagagtcatatagtgcatatgaatgaggccaagtgctccgagtcattggctgagttatacagacttcttaatgaagacgacatgaggtgtggattatggaagagaaaatcaatcactgcagaaacaagggctggtctttcacttgcccagcatggttactggcaacaagcacaaaatctattttaccaggctatgattaaagctactcagggaacatacaataataccgtcccaaaggctgaaatgtgcctttgggaggaacagtggttgtcctgtgcgtctcatttaggtcagtgggaagtcttagctgnn

SEQ ID NO: 216611 - DNA, 8643 bp, Zea Mays
  misc_feature (8642)..(8643): n is a, c, g, or t
tcgccctcgtcttcctccaagtccgtccccgtctctacccccaccccaaaccctcggctcgcgagcgcgagggagaccccttcctccgagtccataacacggggttgccattcgcgtcgggggaaacgagcccgcgcctcctgcccctgcactcttacggtcctacctccagccatccgctcctccgcccagctcgcggagtcttcccagcgccgatcttcaaaaccctaagctctggcgcggtaaggttggagccggacgcgcacgggcggggcgcccgccatggcgcccatcaacagcggcaacatggagcagcactcgcagcggctcctcgagcccgacctccctgtgcaagtccgactgcagcttgccatggaagttcgggacagcctggagatgacgcacactccagactacctcaactttcttcgctgctatttcagagccttctcagcaattctcaccgcttacaccaagccacaggccacagagaatgctgagcacaagctacggaatgttgtgatcgagatactcaaccgccttccacacagcgaggtgctcagaccatttgtgcaggatctgctcaagctttctctccgtgtgttgacacaggacaacgaggacaatgctctccttgccatccgaattgtgtttgacctcctccgtaacttccgccctactgtcgaggcggaggtgcagccatttcttgactttgtggttaacatataccataaatttcccacaaccgttagctacttcttcgataatcccaacacaagtgccagtatggctgcctccatgcccatgcagcatttggaccccactgccgatgcctcagtcatgatgcaagtgcctggtggtggtcaactcaacccaagcgcacgttccttcaagatagtcacagagagccctcttgttgtgatgtttctcttccagttgtatgcaaagcttgtgcagacaaatatcccgcacttgttgccactcatggtggcggccatctctatcaagggtcccgacaaggtgccgccacaccttaagacacccttcaacgatttaaagggtgcacaggtcaagaccttgtcatttctgacgtacctcctgaagagcaatgcagattacataaagtcatatgaggaaagcatatgcaagagcattgtgaacttgcttgttacgtgtcctcctgattctgtctccatcagaaaggcaagatacgacctggagctattggttggtctgaaacaagttctcaacaccgagtacaagcgagggctgttccccttgattgacacacttcttgatgaaagggttctgattggcacaggtcgagtttgcatcgaaactttaagacctcttgcttacacccttcttgctgaattggtgcattatgttcgagaagatatttctcttccacagcagttgtcacggatcatctatttgttctctcggaatatgcatgattcttctttgacccttataattcatacaacatctgcccgcttgatgctgaacctggttgagcccatatatcaaaaaggtgttgaccagcaaagcatggacgaagcacgagttttattggggcgcatattggatgcattcgttgggaagtttaggaccctgaagcgaacaatccctcagttgcttgaagaaggtgaggaagggaaggaacaaccgaatctgagaatgaagcttgaagtcccattacagactgtgctgaatttgcagcaacctttggagtatactaaggaaatcaacgattacaaaagtctgataaagactcttgctgtcggaatgaagacaataatatggagcataacccatgctcactggccacgcccccagcaacaaaatcaacagtcttccaatttgtcacttcaacacttcagggggctgagggaggatgaggtgcggaagacatctggtgttctgaagtctggcgttcactgtctggctctttttaaggaaaaagacgatgatagggaaattctgcaatcattttcgcagatgctggctataatggaagctcgtgatattatggatatgttctccttttgcatgtctgacctctttgattctatgataaccaacaaccagctattgcacatattttcaacccttttgcaagctcccaaggttctgcggcctttcacagatgtattaattaatttccttgttagctcaaagcttgaagccctgaagcagccagattcacctgctgcaaagcttgttttgcaacttttccggttcttgttcattgctgcagctaaagctccagaaagctgtgaacgcacacttcagccacacgtgccggttataatggaagtctgcatgaggagtgccactgaagttgagaaacccctaggttacatgcaccttcttcgaaacatgtttcgtgcattgaacagtgctaaatttgattcattgatgcgtgatcttataccatctctgcaaccctgcctcaatatgttactctccatgcttgatggtccgataagtgaagatatgcgggacttgattttggagctttgcctgattttacctgcccgcttgagttctttattgccccacatacctcgtctaatgaaacctcttgttcttgctctaaaaggtagtgatgaccttgtgagcttagctctacgtacacttgagttctggattgatagtctgaatcctgactttttggaacctagcatggcaaatttaatgtcagaagtcattcttgctttatggtctcatttaaggcctcctccatacacatggggcacaaagtctttggaacttttagggaagctggggggacgaaataggcgatttttgcgggagcctcttgcacttgaatccaaggaaaatccggagcatggattacgtttagttctgacttttgagcctgcgacaccttttttggttcctctggacagatgcatacaccaagctgttggtgcagttatgcaaggcaatggcttggaagcattctacaggaagaaggctcttcaattcattcgggtgtgcctcgattctttgttaaatctgagggaaaatgtacctggcgagggtgtgagccctggtgttctcggtacattgctaatctctaacctggatccctcaagacgtcggaatgatgcttcagatatgaagggagatttaggtgtgaagacaaaaacacaactactggctgaaaaatctgttttcaagactcttcttgtagctatcattgcagctaatgctgacaccagtcttcatgatgagaaggatgattatgttgtcgatatatgccggcattttgctatgcttttccatgttgactcaccatcctccagccaatctggatttatgcatcctattggttcttcactcccatctatcatcatgggatcaagatcaagatgcaacacttcatctaatctccgggagctggaccctttaatatttttggatgctttagttgaagtgctatccagcgaaaatcgtcaacatgcaaaagctgccctatctgctttgaatatttttgccgagacattaatctttcttgcacggatgaaacacactggtatgctaaggggaggtcctagcacccccatgctagtctctagtccatctttaaatccagtatattcacctcccccaagtgtgcgggttgctgtatttgaggaattgttacctcggttattgcattgttgctacagtagcacatggcaagctcagatgggtggtgtaatgggtctcggggcattggtcggtaaagtgtctgtggataccctatgcatttttcaggtcagagtcgtgcgtggtcttctttttgttcttaagaggttaccagtgcatgcaaacaaagagcaggaggagacaaatcatgtcctaacacaagtacttagagtagtaaacaacgcagatgaagcaaacagtgaacctcgacggcaaagttttcagggagttgttgaattccttgcacaggagttgtttaacccaaacgcttcaatggttgtgagaaagaacgtgcaggcttgcttatcactgcttgcaagcagaactggcagtgaggtttctgaattgcttgagcctctctatttgccattgcttcagcctctgatttcacgacctcttcgttcgaagaatattgagcaacaggtgggcaccgttactgctttgaacttctgtcttgcactcagaccaccccttctaaaactatctcctgaacttgtcaattttttgcaagaagcactacaaattgccgaggctgatgaaactatatgggtcactaggatgatgaatgcgaaagtagttctcacatggaacaaactcagaaccgcatgcattgaactactctgtactgcaatggcatggggagatctaaaagctcaaaatcatactgaattgcgagcaaagattatttcaatgtttttcaaatctctaacatgcagaacaacagagattgtcaatgttgctaaggagggacttcgtcaggtggttcaacagcaaaggatgccaaaggatcttctacagagcagcttaaggcccattctagtaaacttagcaaacacaaagagccttagcatgccattgctacaaggattggctcgcctgcttgaattactgtcaaattggtttaatgtcactttgggtgccaagctattggatcacttgaaaaaatggctggagccagaaaagcttgtccagactcaaaaatcttggaaggctggagatgaaccaaaaatagcagcagctatgatcgagctgtttcaccttcttcccccggcagcaagcaaattcttggatgaccttgttaccttggtaattgatctggaaagggcacttcctgaagatcagttttacagtgagatcaacagtccataccgtgctccactggcaaaatttttgaatcgttatgttctggaggctgttgactattttcttgctcgattaagccatccaaagtatttcaggaggtttatgtacataatctgctcggatactggggacctaagggatgcacttgcaaggtcacctcagaaaatacttgcaagtgccttttctcagttttactctcaaagtgaagcatctgctgctcaattatcttctgtaaaggatgaagcccttactggggctgtatctgagagtattactgtacaatcttcatcaaacatggttactacttctgagagttactttaatggattagagcttgtctcagcccttgtgaaattgatgccagagtggctccgtaacaaccgggttgtctttgacaccttgctacttgcttggaaatcacctgcaagacttgcgaggttgcagaacgagcaggatttgagtttaccccaggtgatggaaagcaagaggctgatcaaatgcttcctgaattacttaagacacgatcgaactgaagttggtgcactctttgatatgttatcagtattcttgtaccgcagtcgtatagattatagctttcttaaggaattttatgtcatagaggttgctgaaggatactccccgaatttgaagaaaactatccttaatcattttctgaacattttccagtcaaaacaatatggacaagatcatttagttgttaccatgcagattcttatacttccaatgctagctcattcatttcaaaatggacaaagttgggaagttgttgatcctactataattaaaactattgttgagaagcttcttgatcctccagaagaggtcagcgctgaatacgacgaaccattgaggatagaacttcttcagctagctacattacttttgaagtatctacagactgatcttgttcaccatcgaaaggaactcataaagtttggttggaatcatctcaagcgtgaagataactcgagcaaacagtgggcctttgtgaatgtttgtcatttcttagaggcctatcaagctcctgaaaagattattttacaggtcttcattgctctgctacggacatgccaaccagaaaacaagctgttggtgaagcaagctctcgatatcctcatgcctgccctacctaggagacttcctcctgaaaaaaatgatagccgcatgccgatatggatcagatacaccaagaaagttctcgtagaggaagggcattcaattccaaatatgattcacatattccagcttattgttcgccatgcggacctcttctatagttgcagagcccactttgttcctcagatggtcaactctcttagtcgccttggattaccatacaacacaacagcggaaaatagaaggcttgcaattgaacttgctgggttggtagtggcatgggaaagacagagacaaagtgagatgaaagtggcgcaggaaagtgagagccagaatcaattaggtgacatgcttaatccttctgttattggtggtgatccaaaacgctcctctgatgttccgtcgtttgctgatgatttgagtaagagagtgaaagttgagcctggtttgcaacctctttgtgtaatgtcgccgggtggggcatctatacctaatattgaaacacctggatcttcaggtctacctgatgaggagtataaacctaatgcagcaatggaggagatgatcattaccttcctaattagggtatcacttgtgattgagcctaaggataaggaatctagctcaatgtacaagcaagctcttgatctactgactcaagctctggaagtctggccaaatgccaatgttaaattcaattatctggagaaattacttgggaatctgtcacccactcctcagtccaaggaccctgcatcagccctcgcacaaggacttgatgttatgaacaaagtcttggagaaacaaccccgtctcttcatccgaaataacatcaatcatatttctcaaatactggaaccttgctttggcaacaaaatgctggatgctggaaagtcactttgttccttgctcaagatggtgttcagtgcttttcctcttgaagcagcaacaacgccacaagatataaagttgttgcatcaaagggttcaagaactcattcacaagaatcttgctgctgttacaactcagcagatagcacttgagctcaacaatgctcactcaatcattagcttttcattgtttgtcctcaatgcacttgcagaagtacagaagaatttcattgacccgttcattggcttgcttttccgtgttctgcaacgtcttgcacgtgacatggggtcttctgctggcagccatatccgacaaggacagaggcctgaactggattcatcagttaactcacggtctaccatagattctactgtcatatctaacatgaagactgtcttaaaacttataagtgagagggtgatgtcctcttctgaccacagaaaatctatgggccaaatacttcaagctcttctttcagagaaaggcactgattccagcattcttctgtgcatgctagacatgataaaaacttggattgaggaagattgtaggcttgcttcatcaactggttctgttagttcacttaacccaaaggaaataataacttatcttcataagttatcattagttgacagaaaaagctttcctccagctgcacaagaagaatgggatgcaaaatacttgcagcttctttattcactgtgtgcagattcaaccaagtatccgttgtcttttcggcaagaatttttccataagattgagagacagtatatgcttggacttagagctaaagatccagaaatgaggaagcgattcttcaagctttaccatgatacagtgggaaaaacattattttctagattgcaatttataatacagttacaggactgggaagctgtgagtgatgttttctggttgaagcaaggtcttgatctcgttttggcaatattagtagaaaatgaaccaattacacttgcagcaaattctgctcgagtaccaacgcttatgatagctgggcctgttccagatcgcatcaccatgccacagcaggttcctgatgctcaggaaagcatggatggtacaacactatcgtttgactctcttgctgcaaggcatgctcagttcttaaatgacgcgaacaagcttgtggtggcagatatcatggctccattgaaggaacttgcatttgctgatcccaatgttgcatatcatttgtgggtgcttgttttcccaattgtttgggtcaccttacataaagaggaacaagttgccctagctaagccaataatcgcgcttctatcgaaagattaccacaagaggcagcagggctgcagacctaacgttgctcaggcacttcttgagggtcttcatttgagccatccccaaccacgcatgcctagtgagcttatcaaatatattggaaaaacttgcaatgtgtggtatattgcaattgcattactcgagagtcatatagtgcatatgaatgaggccaagtgctccgagtcattggctgagttatacagacttcttaatgaagacgacatgaggtgtggattatggaagagaaaatcaatcactgcagaaacaagggctggtctttcacttgcccagcatggttactggcaacaagcacaaaatctattttaccaggctatgattaaagctactcagggaacatacaataataccgtcccaaaggctgaaatgtgcctttgggaggaacagtggttgtcctgtgcgtctcatttaggtcagtgggaagtcttagctgnn
